United States Patent Application Publication US 2012/0108651 A1 - sequence listing, part 5

SEQ ID NO: 431 - DNA, 607914 bp, Homo sapiens
ttatacattattaagtattcataaggtttaaatctctaaagctccaatccaaaattgttcatggatcattaagaaagctttagagaattttggtcccagtcctgtttagccatcattttgcagagttgtatgactttgggagaaagataaaaaagttgaagaattatgtcaaacttttagtgactatgtgaaatcttagcatatcaaaagtaggtaaaataattaaatgaacaattatttaccaaatgataccaatatgagtattggtatcgtgggagattaaaaaacatgatgcttattttctaagagactacaatatacttgggaagttataacttgaaattaaacagttatgagtggaagaaactaggctttgtcaacaggtgaatctgggttccaggtctggtctcccctcctctctgataggtctatgatcttgggcaggttacttgacttttctgtgagccagtttcttcatttgtaaacggagcctaagaatcctcccttatgcacaaggctcaatttgaaaagtaaataagataacacacataaagaagctgtttgccacaaggcctggcacacagtgagccctcaaaaaagtgaactcctgaaaattgccacaactcctattaataactcaatctgtgcatttaaaattttctgaagtctagacttcaagaagttaaaatagctctcacgtttactgatttatcagtaagttggaaagtataaattacagaccacaaatgttttgaaccactgagatgaattaggccaagttttcaaacacacttttgctgtattatgtaaggatcattaaaactataatactaactaaagataaagttataccatttctaattgaaactatttatacctgtttatttaaaaaattctctgtatcactgcagagatgattgaataagaaattaaactttattatgaagaaagttatgtgtaaaatatactgacaaacacacacacacacacacacacacacacacacacacacacacacgtttgtatattatttcgccagaaatagctcttctccccagagaaatacccttcagctgctgaagaatattatgtaaggaaaggatcttaaatgcttagggtttaacaactttgtttttcaacttgttttcctgcattttgagtataacatcatatgagattgttacatgcttgtgatcatgttaaagaagagagggcttattgaacacaaatgccccctcatcctgttgtctgatctgacgttgtttatgtaataatattgtaattttctgcaccaagagagcagaagattggcatgacatccgcaaatagaaaatagtttaaaaaattctttaatttttgaaatgcatattgcatttttttctatctactaaatttaccttcttagcagtgcttttctaaggtgaaaattaaactagtgtatattctcagagctcataccacctgactggaaaaaatttctctagagcatattgaagaccagctgtgatctaatacatgtttccatggataactaagaggtgacagtatgggagatttgcaaatttgaagaatagctgagttcagtgacaggatgagagttgtcagtggtacaattcttgtgataaatgtattttcgaaactgggtaaatgatagatattaatactgatttttggaacaatgttttagtttgccatgctgcaggaaaaatcaaggcagtagcatgccaccatctgtgcatatattatgctagaaatctaggtaagtgagatttgttttaaagagtgtaatgaaatcaaaccctggccccactgaattatgaaagacagatatcatgtgtttttctagttttagagagacttttaggttaaatctttgcctagtgtattatcttatatgactcagactaaaagtttgttacattgttaatttagataattccacaatctactttcatttattaatatgtgatttgttggcaatacattattaaaaatgtactgacatcaccctgttgacatcagtgtcttcaggctttactgggtatatgatcaggagatcagcagatgttaaataattgtccttattaatctaagtaaaacactgtaaaataggccagtcatttgcttatgaaacatcagatccccaattcaaatagcttccatacttccagtgctattattcatttctgttagcatggataatcaagtgttagctacatatcagtacccataaaaatgttgcttctctgttttgttttgttttgagacagagtctcactctgtcgctcaggctggagtggtggaatggcccgatctcggctcactgtaacctctgcctcccaggttcaagtgagtcctgtgcctcagcttcccaagtagccgggattgccaccacacctggctaattttcatatttttagtaaagccaggctttcaccatgttgcccaggctggtcttgaactcctgacttcaggtggtccgccggtctcagcctcccaaaatgctgggattacaggtgtgagccactgtgcccggctatgcttctgttgataaatgactttacaagccacaagaagctaaaaagatgtgtggtttgaaatctttccacactttaggtgtgtatagtttttcttctgtttgatgaccctagcttcgctagatcctgtttggcccagttctaatctgaaaggcaagagactgggtcctgggattctgagccagttctgcctctggttgtctgtgtgactttgggcaagctgattaatttctttgcattcatattttcttatctgtcaaatgggaataactgaatcagccaataactgccattttgtgaggaaatagtgaaggcaagagataggaatgtgctttgaaaatgaaaaagtgcactgaggaaagtataaggaggcaatttgtgcctatgacctgcatttgcaatttggagactctatcttggaaccaacgaactgtttggacttctgcaagaatggccatgttattttggatgagttctcaatcgagctttaggaaggtggagggtaggtgagagagtggggtggagctgggtgagagagtgttctacatctactgtgaacatatgggggaacactaatatagagctaaaaagaatttttgtcatgttttcaatgaaaaattaccccaacataaggaaatgactgagagttactatggatagtgtagtatgctatcttcagcataccactatctagctgacagaagtcttcatgctcgccttcatgttttctcattaaatgctaaaaaaacaaacagctcccacctcaaaaatctaccagatggaatagctgaaaaacaacttaaaaaaaaaactagtcattgttcaattgctcatagcaatactattttattttacgtaaaatgacaggtttgagctgatgcctgaagcttggctcataagcttttgcaggaaattgttgttgatttcaggcagtgtctttgcaagacaactgatgtcaggaaaggaacacattttaatagtcacctgcaaataactgtctctttaaaaacacacaaataaataaataaaggtgaccttatatagtctttcattttcatgtcatagagaaaaccttgttacagtgacgtgctgatggagagaacaattttgggagtatagggaagtttcccaaggaggaaaaaatttaatgtgaagaatggcgcaggaaatattgtgaggtgaaagagtatgaggactgaactagccgtgcactgtgtgcatcataacagccaatttttaatttcctgtgtagcattttatattgtgggatgatggcagggaggatgggttgttggtttttcttttgttgttgttcctcaggctttttattaatgacctgtaggatctgtttttttgtttttgtttttgttttttcctgtttaactgcatcccctctgttggtgaattcattgtgggtaatggcctgtatacccttagaggtttgagatgtctgatggggagcaggcaggaagggcagggcaatgagcaagagcttgtacaaactaataccacctttgggagaactgaaatgacagctcattagctcctcttgcagggaaattcagccaaccaaagtaagctcttctggaatgttgtttttccttcttccttatgttttcaaatatttcaacaagttacacaaatgttacttctcttagcatccctagcacattttgtaggtctttttgtatcattatgagataggtaaataatttgcttggccttttattttccagacagcacctggggtacataaaagatatttccggaaaataaaaaatctcatttcagcatttcagaagccagatcaaggcattgtaatacctctgcagtatccagttgagaagaagtcctcagctagaagtacacaaggtactacaggtatgatttcctcttaatttttgacagggtttggaagctcagagttatgagtcaacctgttcataaccatataatcaattagaagttatgtaagaaaaatgcagtgagaaagtagatgtagccagcaagtcaaatgagaggtgacaatttatgtgctataattttcatctattattctaataacttttaataaatctctgtaaaaacatcaaaaattctataagcccataacattttaactgctcttgtctgtctcatcttgttctttcctgtccctttaataggtagctaagtatgatttcacttcactaattcagacacaaataatgtgaaagatggtataattcagagaacacctgggctgtcctttatctttgcttagtaaactgttttttccttcagggacatgaaagctaacgttagcctggcacacatgattctgatttctgaattggtggtgcttgaattaatgacatttttctgaagcaaaggaaattaaatagtgcactttattgttccactggcacatattgttacatatcctgagcaaacctattttagtgtatgtgtcgtgctaaagactgaataccagccaatgtctgtagctatctgatacgtgactgtttactcctctattgaatggggtttatcatttgtttggagtaagaggataggccttgattgaaacaataaatatttatgataaaagaaaacgagtccctttttgacagggacctaggctcaggcataaactgacaattagactcaagtggtgaattaaattaatgaatagttagcctttataatacaaatgcaaatagagctctaatttccaagttggctagttgtttttttctgcctaatattccattctttataactcagttttaaataatagttgcttgaggtatattactgtgttgtgtcattgtgagttttatgcagttggaaattttataagtttgagttaatctgtaattttaatagtttgtaagtttattttttcttgatttttgttatttttctttagggataagagaagatcctgatgtctgcctgaaagccccatgaagaaaaataaaacaccttgtactttattttctataatttaaatatatgctaagtcttatatattgtagataatacagttcggtgagctacaaatgcatttctaaagccattgtagtcctgtaatggaagcatctagcatgtcgtcaaagctgaaatggacttttgtacatagtgaggagctttgaaacgaggattgggaaaaagtaattccgtaggttattttcagttattatatttacaaatgggaaacaaaaggataatgaatactttataaaggattaatgtcaattcttgccaaatataaataaaaataatcctcagtttttgtgaaaagctccatttttagtgaaatattattttatagctactaattttaaaatgtcttgcttgattgtatggtgggaagttggctggtgtcccttgtctttgccaagttctccactagctatggtgtcataggctcttttgggatttttgaagctgtatactgtgtgctaaaacaagcactaaacaaagagtgaaggatttatgtttaattctgaaagcaaccttcttgcctagtgttctgatattggacagtaaaatccacagaccaacctggagttgaaaatcttataatttaaaatatgctctaaacatgtttatcgtatttgatgctacaggatttgaaattgtattacaaatccaatgaaatgagtttttcttttcatttacctctgccccagttgtttctactacatggaagacctcattttgaagggaaatttcagcagctgcagctcatgagtaactgatttgtaacaagcctccttttaaagtaaccctacaaaaccactggaaagtttatggttgtattattttttaaaaaaattccaagtgattgaaacctacacgagatacagaattttatgcggcattttcttctcacatttatatttttgtgattttgtgattgattatatgtcactttgctacagggctcacagaattcattcactcaacaaacataatagggcgctgagggcatagaagtaaaaacacctggtccctgctctcagttcactgtcttgttggacgagaaaacaataacgataaaagacagtgaaagaaaataacgataaaagacagtgaaagaaaataacaataaaagacaaggaaaaaataacaatgaaagttgataagtacatgataagcgaggttccccgtgtgtaggtagatctggtctttagaggcagatagataggtcagtgcaaatactctggtccatgggccatatgaaaaggctaagcttcactgtaaaataataactgggaattctggattgtgtatgggtgttggtgaacttggttttaattagtgaactgctgagagacagagctattctccatgtactggcaagacctgatttctgagcatttaatatggatgccgtgggagtacaaaagtggagtgtggcctgagtaatgcattatgggtggtttaccatttcttgaggtaaaagcatcacatgaacttgtaaaggaatttaaaaatcctactttcataataagttgcataggtttaataatttttaattatatggcttgagtttaaattgtaataggcgtaactaattttaactctataatgtgttcattctggaataatcctaaacatatgaattatgtttgcatgttcacttccaagagcctttttttgaaaaaaagctttttttgaatcatcaagtctttcacatttaaataaagtgtttgaaagctttatttacctaatttgtcttgaaatattccttataattccttataaaatattcagagactgatgctattaataaaccaaataaaggattgatgattatcttatcggagtgattccctggaaaaggtaagtgcttttctgattttattgctgtccaagttcccggttgatgagcctacttcctgtcttctttggctggccttttattcatcaagtttttttttttttttttcaccttttctttcccaacatgagcatccttgctattttccagtacgtaatcacttgcacctttacagaaaggtcatatccttgctgtatctaaaatattgccatgctaacatattgtaagatgctgagtcaaggtagaaaaatgcacaatatatttccaagtgtgcagctctcttcagaaaaaaaaaaagtgtgtcagcaagcccaaaaggaacatgacagcttatcaaatacttattcatttcctctgaaatttgttcttaagagataaggtcagtagggagacaagcttaggtaattgtctgtttggctgttacaggcagggaacctttgtggtagtgcacaggtagaataagtctatagagaatgcctctgattaagtcctctgctataaataaagggctggatttaagatattctttcgggtagaatggacacagaattaaaaatgtgagaaacagctttaaactctgttaataatgtttcaacatcagcttatgttttatttgattcacttcgttaagcttagaatccaaagtctactactagtaaaacccagatttgcccttgagcatttcaaggttataggatgcctggtcttcctgttaggatgctatacattcaactttgacacctatgttttctcttgcagtaaatgggataccactattttgtagtttgcaactaggggggaagttaaactacccagtttggacattttcctaatttggggtgattggccaaacttgtagtaaaaggctgaattcttatcattaggtcatttagttcttaaatgaagattttttttttaatgtagcaagatataataaggctgactaactggatagagtccattaacatatatggaattgagatatatatatacatcttggttgcacacatacacgcagaaatagaactgttttctcacaagatgacaaaaggctatactacgtatcacattcagtattggacagagagagtaaaagcaggaatgcataagaactgatttttttttctttttctttttttagtcacctggtgggccatttaaacattttatttatttattttttaatttttattttactttaagttctgggatgcatgcgctgaatgtgcagatttgttacataggttacatgtgccatggtggtttgctgcaccatcaacccgtcatctaagttttaagctctgcacgcattaggtatttgtcccaatgctctccctccccttgccgcccaccgcctgacaggccccagtgtgtgatgttcccctccctgtgtctatgtgttctcattgttcaactcccactgtttttcatctttgtcactgattatccacgtgaccttaggtaagtcagtctgttactgttactgcatttgccaagtaggaataattaagtcgtactaacctcacaagattattaaggtacaataatttacatatatgtgtgtgcgtaattacatatatgtataactttaaggtagtaatattactgaatgtttaaataacattgactgatagtcacagatctctaaaagggagggtgaatagggaaggaatatacaaacgtctcctattataattctctctctataggagctcctgcccttttaaaaaataccctgagtgtgaggtgggatgcatattttgaaaaaaatttccagatgattgatactaacaaccccctacccccattgttttttactgatgggttgtgttgagatgatcaaggttgtcttctgctccatgagtcttttcactctctctctctctctctctctctctctctctctctatatatatatatatatatatatatacacacacacacacacacagacacacacacacacacacacacacataaaaaagcagcagggcattttgaagtggtgtaaattgcaggattccaagtttcagtaatgggttgtttggactacatgtgctccgcgagtatcaagatgaatttttgaagatctgttggccagatttcccagcgtcacttgtaaatgtcttcttgtgaaaaacaagtgccaaatggcaattgtaattgcataggatttttttagtgtttcatgattgcctcccctccctgacacccttccccactggctgctgccccaacatccattattttttgccagtgcatttggacaccctgaactcctatatatctctcccaccccgtttttataattttttattttctttctattgctgagaaaggcaccaaaaggagagggaagcctttttaaaggaagtcacagcctagaggcatttaaatttgcagcagctactcttctttgtttattaaatggtcacttgtgtcagagatcctatttgtatgaaaaataaaaatgaagagctgtctgcctaggattagtgactttttgatttctgtacctgcattttcaagatggtgtggttttattgttccctgttagtgagccacttgtcctatctaaggtgaccagactgatttgagaatgcagtttggcgcataaataaaatgggacacatttttcattggcaattttattttttaaaaatgaaatattcaaagtacttttctttcaaatatcaacacataatgtttaactttaaatatttacagcatgttgttgtgatgctcttgtagaaaaatgcatgcttctggcctgaaagccagagcaaaatgcaaaagaccatttaactgcagccagagaacatgaacctgtacagtatccagtcacttttcagcacaggagagcaggaatacaaaattggaacctattgtttcctagcaacatggctcagaccattataacacaattttcaatatgattagaacctctacctgttgttatacagaaactgaaaacttggcatacactgtaaacatctttacttttcatgagaaagtaagcagctaaaaagaatgtttttctgacataaaggctatacttctctttttcgccttctttcttactgatgcttttgccagaagaatagtaaagatttagacgttgtcatgattcatacaagtaaaatatttttcaaggacacaatctgatatactaacatttatttaagaggttaaagtccaccactaaatctaaggaaagatttttaactgccaaacacatttcctttgacaaataatgtaagatgacaactgccaagacaaaatccacagcaagtttaactctaagtattttcagttactgtttagaaagtaatttcttcttatgaacagtagtatatttggtccttaatagctttcacatgaaggacacactgaaaataatagtcactatttatggttgaattcttttttgttgtttgttttctgtatttttaaattttactttgcttttttttgtttttttgttttttgcgctttttttgttttttttgttttgttttgttttgttttgttttctttgcagaagaaagaacctttatagaaggctgtggaagagctgaagtactagtcaggtcagctatgtgtatgtgaatttcttcaagaaaacaggaatgttccattccatctgtagccttatgtctttccacaagctatatataatatgctccaatgtctccaaaattttcttttcaatacttcgttactgtacttttgcttctattaccaatgaactccattacaatcacccttacatgaacacatcttcataaatgcaaaaactttgccctgactctcttaagtgatattatagtggggcctggtctagttaaaaatatatttttaaagaaaaaaaaaagaaaaagagtcaaaataacatgatggaatgcttgaaactgtgtcaacagtgatgaaaatgtctcatgaaaattataacttaatttcatacctgtctacataggtagcatgtgaattccaaattatacattgtcaagttttcatacatttggctatgttgtatatattatatatatgtagtctatatattatagatcttctagataaattgacagtaaaggacacacttattttatacattttttgggttaaaaataaatcatatacttatttatatggtaaaagtgttttgttgcaagttagtatgaattgagatttatttccctttccttcaggagtcatgcttctaatcaataacgattagaatgacaactaaaagtaaacatatttaaatgtgttaaactttgaacttttcagttcatttggatctctagactgtagtgcaagagtgaaaacaaaacaaaacagaaaagcacaaacaaaatgggcttaagtaggaaaaagaaacaaccatggagtattccctgcctccagcccagaatgttcttcataggagagtccaactactatgctctcactttaacttactcgaatggtgtgtggctgtgcagtgtcagccatctgtctgctgggtatgagaaattcatatgtttctctgaaaaatgcttttactttcatcaggaaatgcaaacgaattgttctttcaataatttaaactgcagaactgcaagtcaatgaaggcattctttctattcagctgaataggaagtgatatactcaatatctccatcttcttcttaagaaatgccaaaatgtttctcttcgatttactactgattagtagttttgttttttttttctttcctccctcaagctttaggagttgtaaaaagaataataatagttcaaggcagtattaaaaccacagctgtaagtaataaaaagtgcatttcctgaatataatacaaatgtaactttaacaaactaaaggcacgaaccaaccaaatacgtattacaaactagaaatgcacagttcaaggtaatcactattaagtaaaagcttcaaatatttgtttctaatggatatttaaagcagtttgaaaatgatacatcatcaatgaattgcaaaaacgtataattgcttaaaatataagcaaaatagactctaatattgacattttggatttgtgataaaatacataatcacatttatgaatgcactctctatatacagttcacaaattatttttccattaatttaaaagaacatcagaggttctaggaacttaaggtccatttttaggttggtgtggaggtattcaaattttcaacaagtttgttagtaattttagaattccattctgaataaatactgtaccattaatacaggcctgattcagaaaaaacccaataatatgattttagtatggattagcaatatatcaagctggtgtgtttccagttataaagagagatgagttcctcatgaattctgtctctcagaatacatgtgtaagtggtattctaacccgaaggttttgaaaatgaaatgtttgaatacacccttccctactgtttgccagggtcatttcctttcccttgctttcctttgtgtagtaggaggcagactcttgaaaaaccttaacatgagcttatgactttgcatattttcaaagaaactgtcatcgcaaagcaaggcaatgaccccacactgcatttaggtagcatctggaaagaatccaaactaacattccatcataaatttgccttcagacatagcaaatgttcagattcggtgatgaaagtgcagaagctggctcaggggaattttctacgggccacattgtgctgtcatgtattttcatttgtggtaacttacaattacacagcattttacaaactatctctttgtcactgggcacaaatcttccagctcaccaaggggcttgttttactgcaggattcctagagattgagaaactgcagctgatattaacactaatcctgacctttctccaaattttaaatgatcgcagaacaaataacccgtcctggaaaatagttattttcctaggcagtagagacgattaaataaagataaatgggtaagtacggagaacgaaaataactaactgtataaattattttagtaaaaatgagtctgcctctctatagttagttgaaatgttttcggttggaaaggatttacttgattcgatttcctgaagatggctgggagatgttcaatacagaattgtacatttgaaagataaatctaagtgggctgaaacaatgtggcagcaactgctgtgatgtttggtctggtcttccctttagtactttcacttaagtaccaggtctatttttttaaggttttggctcttatgaatttctgcagtagtagttaatgtatgtatcggcatcccagacacgtatgcctgctaaagcctttgtttgtttttgtaccagaatcatacttttaagtaaattaccgttcatgtgcacaaaaccattgggtcagtgtatagatactgaatcactaatgtgaaactatgaccaaaacacatcctatatataaatgagaaattcctacccaggttaataaaagctatgtttacatgataccaatacagctgaacaacttttagtaaaaaattgagtcaaaacaggtcgtgtgagagaggtcacgctggccagctgctttggtatcatgtacacacgagcaaatagcggctatacagtctggttaccacacccacagggaagcatggtagacagaacccagccaccacacgccaaaacacagcacaacaatatggcatttactttaacaagcaaggaggaataatcaagaaggaagggcaattgggtcctcactctaggagatggtggctgaagacattttacacctgtttttaagtttcctataacagatctggaaaacgtcaaagggctggcagtctttcgaaaggcaagtttcagatactattgcaccacctattcaaatagcccgtaagttctgccaacagttaaggatgaaactgcttctcacaatagagatagagaaccttgggttctttctggatattggaacatatgcatggctcggcaaattgaaagtggtgctttctgaaaactgtttttagctgtttgagttctacttgtgttattttgaatactgccacacaagaactaaaaatctctgtcatttcttaaagagtttaaacaaacaatattaaaataccatcttccgtcacattgaaaggcagttggatatgtttttcctccatatttacatatacagagttctgatctagaaaaccaatacaataaaccattttatgttttaaaaacaggcagtctttggtgacgcaaaggcagagatatttttgttacctcctgcctatttcgctctgtctcataaagtgaatattattggcactgtcagaaagttctaaatactgctcaacagacaaaacaaaatacccatcgtaaccttgtacccgcccagtgctcaaaagctgctgcttttccccttctgtccatgccctaatcccctcttccccctcttgcagccttctttgttccttagtccaggcctgggccactgcgcgctgtctggcaatctccaacacgtgattcttttcctcttcgacagttgtcccataccggatgttgaagcacagggctccatgctggagctgaatatctgcaaaccgtctagtcctcccattcaacacagaagtcatctgggacacagtgacattgacaccattctccagaatccgcctccccccagtgttaccgatgagcaccaggtcttcctccagagacccaagcttaatgaagtagtgagtgtccctcccctctatggtaaaatgtaggttttccaggtaatgggcattattgagaatggcagcaagccgcctgctatcttcattggctactcctataatatcagctgttactatgccatccttgatggcaaattttatacctttcccaaaaacagaagggacagcagcaaaccttggttgcttccctccttcaaggcaccgtccatcattgtatcggggagtcataggtagttggtccaaggaaatgaaattcctgagctgtttctggagttcacactgaatgcccaggatagtctaggaaagagaggcacagagcagatgcagcatggagttagacatctgtcagatacttggtgattgtggaaaggacaggcttgcaagtttgcttccttctctctttaatttgtcagtgagtgatttaaaaataagccagatttggaatctcttcatcagagatttggaaaagactaacaggtgactacctagcattcttatatcttggtggagttaagcataaggaaatacatttaaacttgaaatcacagaattgcagagctggaaggcactttaagttggtccagctctcccaaaacacagacattttattttcactgatttcactcacactgactagatgttattactacatgtagagtaatacttaggcacagtgaggcacaaagaaatgcataaggcatagttcctactttaaagagtttaagaccttataattaactatggcaaatcagccagaaattcattgatctttttatgtggacttaaaaaaaacctttttttttgggcaattttcaaacatactaagaaataaagagaaaagactaatgaacctccaagtatccattatgaagcttcagcaattttcaacattttgctaaatgttttttagaaggacttttaattacagaaagcatttacatctttacaaaaagggatgaatttataggacctatctagaacttcctgtcccttataattttttagacttaaatttcaaggcctcacacccaaatttcagttttattctatcaagcccattttgttttcgcaaacacagatattcatatttctttcagttgaaagaaaaagctccttattttcatttgtacctcatacttctggtgatatcatctgctgaatcttaaatgttttgatgttcctattttttctcaaaactgtacccttgtaatatttattatttttgcttcattgtgtttatgtattttttctttatcagaataattttattctgttattcccatgctcttaagacatcaacccctaaattattttacagttggaaatctgatgttttcgtgtctcttaccgaacaattttctctaggtagaatccataattgctcttggtagcccatttcagaatttttaaagtacagttcctctttcctcttatgtacctattgcagcagtcatcaagtaacctgttaatcttttttttcccccaaaactccaattctctgatcttttttctcatggagctttttttataccttctcattaattgtgcacgttttagtgaatattcaagaagactaaaaaatcagtaagcaaacatatgtatatataatttctgggtattgaatgcccttctgttgtttcagctaaaaggaggtgataaaacttttactaacctttccaggatcccactcttgagtttttgtctgaagccgtagaagctcgtaagttaattctaaattttctaattcaggtttgggaaatccaggtagtacattgtgtaattggaaaccaaatagctccaaccaacttctgatgtctgtgagacacaatattaaaaaaagaaaatgaaaaatcccatactttataagctttgttgaaaacttgaaagatacctctcctgccttcaaactgtttaggcaatagaagttaggaataaaactcctatttatttatttatttatttatttatttatttatttgacatagtctcactctgttgcccaggctggagtacagtggtgcaatcttggctcactgcaacctccacctcttgggttcaagcgattctcctgcctcagcctccttcctgagtagctgggattataggcatgtgctaatttttgtatttttagtagagatggggtttcaccatgttggccaggctggtctcaaactcctggcctcaagtgatctgcctgcctcagcctcccaatgctgggattacaggtgtgagccaccgcacccagcctaaaactcccctttatatggcccacactaaaacacctgatcctctctctacagggtagagtgttgatttgtggataaccctggattataatatcagcttatatgatgaaacaagaatcctgaatttttcttttacgaaattattcatataagcttgtaagagtaaaacacagaaacagctaaaaaatgtagtaggatgcaaaagtattatatgttaacatgcacgttttgctcactctagaaaactaaggaagacagcaaatgcacaataacttgcgggctaactgtcaggaagaggaagcatatttacaaaggcattgagattctgtgataaaatcaacagtactgagttactcaagtttagcttaaagttttaaatagtttaaatacctgtggtatactttgcaacatcttgaattttgccaactgggtagttattttcaaaggagtagaggttgaatggtttaggaaggaggttcaactgtttccatatgtgatgattaggcgttgtccatctgccagcaacaacatcataatccctttgccccaggtgcactaatttagtaaggaaatcatagagtcctccatgaaaaccaataatgacctgaaagtcagggtaagtgtcatgatagatatcgccataaggtgtgtatagtatctcctttatgacctgacctcggctgctgaacacagctagtggggtacctgtattatcacaggctacataatattcttcaccactgcttaactccatggcaataaggtgaccttggagatcataatacagagatgtaatctccgagcttgtgtggttgtacaaatgagtaactcttatggggttggtaaggtctgcataaaagaactgaaggtgctgccctaggctggacttactcgcgacacgtcgcccaagcccatcatagtaatactgcacagtccagccagaagccttattgtaggctttctgcagcaggccattagaattatattcaaaaatatcatttcccctctgcctcagaaagccatcttcatccattttatactgaatttctcctaatctggtgatgcggtctcggaggtcatatcggagaggagtaagacgagcactcttcccatggcttaagaggttgatgtttccattcagatcgtaactataacgccactgggttttgtcatttacagaaacagtctgaagttgcccatcagcatcgtattcatagaagtaccttgttatattggcatctactcctacccttatgtcacatattaccatgcggcccacattatcatattgaatggtcatccagtaggcaattgcctttaggatttcatattggacttcaatgacttgtccattggcactgaagattttggtgtgtttcatcactgtagtagttatgacctgatttaaatcgtaattaattacactgaattttccaaactgctctgttctgccagagacatcaacatatcggtaaagatctataggcaaaggggtttcattgattacagcttgcatgcttgtgactcggaaattgttgtagctgtagtcgaaccgtgcattcacaaggccttcttcactgaatctgaaaatctggcgtccaataagaggtcctgcaggaaccaaaacaaaaacagtaagaagctaggcgatcaatgtggaagagtcagaaaggtctagtgttattttatttagtactggtgcttttatattcataatacaatattagagactgatctctgatatcaaatgcctgggcatattacctcatggatatatattctcatagtggtaatcctcaaatataaaaaattaaaatactctatagttatagaaaattttaattatagaaactacagaagtaataacacatccagtagcccagggtgatgaaattgatacttcttgctataatcactgacaaaaatgctttcatttcatttaacctttgctacaaagtcagagggtcaggttttgacaaattccagcattaaagtaactggatttgggcattctataaacccaaagggtgaaatacattagaaagttctgacttgtgaagatattttgtcatcaactgaggcttataaaggttacacagggcttgagctagtttcagtgagacttatatcttgccgtttcatctttgagaagatttggtgctgagcaggaatgggtatacagttacactaggcacttggatttcaaattacttgagagctgaaagaaagaaatgcactatatgtttttaagaaatcagctttcatcagactataacatgctttacattttcaatgtcagataatttgataagtaaagtgaaagttgggttgaatgtgtgtagattaatgcttctatctcacactgtggtcagtaaaaatgtcataagaaaatagtgatgttgttgtacacaccaccactctttcacaacaaacctgtttgcctgtatctgattgtgcagatgaatccgtcatgcatcaggtgtattgtcttaatcactccagaagactcttcatatgttaatgtgacctgagtggtatcatagagaacctcagaaagccttgcttgcttggtgtacttgtataagactctgcgccctgtccccagatgcagggtctgtagcaatcggccatctcgactatagtcttggataaaagaagtgctactgtccggtggggtgtagatgttccggtagtagcccactgaaagcatggtttgtaagctgtgacgcaccatgctaggcatggtgactgagagcagacaatctggttggtcatactcaaagatgtaacgccgctggctgtgtaggagaagcatcacagactgaaacgagacaaaggcagaatagcatattatggacaactaaagttgaggcgactaaagaaaatacacattcatccattcaacacaaatcaatcaagcacttactgtgtgccagacactgtggcaaaccctagtggatacagtagtgcacaatagtggtgtctatcttcatgaaatttacagttttaatggaggagaaagacaagtaaccaagcaattacaatatagtgtgaaatgtgttatgacaggggagttacagagtgcttctggaaggcagaggaagaccagcttactcagacttgagagaccagaaaaggcttcttggataaagtggcatctgagttgagacataaagattgcctagggattgtccaggtgaaggcagggagccgggggcaggggtagggaaagagtattcttggcagagagcacagccttgtgagggtctggatatgaaaaagaacacggctttttcagagaatgagagaaattttgtgtggctagaacttgagtatgttgggagtggtgggaatggcaggagatgacgtcagctatgtaggctgagtccagatcatgctaggctttctaagccacactaaggagtttggattcaagtatgttggcaacagggagtcatcgaagggtttctattttatttcatttttttagagccagggtctcacggtgttgcccaggctggagtgcagtggtgtagtcatagctcactgcagcctcgaactcctgagcttaggctatcctcctgtctcagcctcctgagtaactgggactaccaatgtgtgccactgcatctggcactcttgaagggttttaagcaagttaagggacggttgcaagagggcacttgcaagctgggagaaactgtcaagttggtattttagaaaggttacttcaacgtgcatatgtttcagaggaaggtaaatggatggcagggcatttcacaaattaatttatagttatcataaagtattgattgacttcacatactagatgtcttcctaaaaattgtgcataaaatattattatggcactattaatgttttgcaattgatgttttaacttcacatttccatttgtgttttaatattagggaagcatgtcattaaaactgaatgattctctggttatgcagcccctctcccccaaactgatctgtattttagaaacagttgtttgttgaggtataatgcaggtaacaggtgtttcataaatattgattgtcttgttttaattctaaatgcagacataaaaggagcactgttttagggaggactctaattgactgacatgtgcatctcatcttttaataaaaataaaaatttctcatccttggagattctgatatgactccctagaggagctttatccttcccctttagaaaattaccttttcaagcaaagagatttagttgagggttatttattcaagtttgtgttatgaaaacaataggtatattttcattttctaagcacaaattatataaatatttatgaatgtgaattacacaagtatatgtaatgtacatttatatcttctaaatatgacattacattctaatattgaatgtgctttctgaaactgcatatcctccctacccttctgagaattattgactttgaattgcatttcagtaccatgaagtcaaagtcagtggttatttgctcatttgttcattctttcttttccaccaacattacgcctgcagagccagaggtgagtgcagaaatcctgtcaattcgtcacttgtggacaacctgcagcttgccacagcctacagttccaccactgtgacctctgaaaacctcctgaacaaaaggaaggagacttggaaatcctgaatgggcttggagacattaagggagaactgcctccctggaccaaggcagaattcaatagaaccagcaagaaattttcctatgaatgggaaagcaggtggcagggggcaggggtggaaaagctttgtacaggaattgtggaaaagcttttgcattatctctagtctgaaagtcacatttctcagttcctttccactctcttctgtcaacttgctgtgagtaaatgacatctgtcacctgtgacacgggccagggactatcaccatatggcccccacacattatctagtaccagcctgcctgggccatgccttttccagtcactgtaccagcctttccaagtatttatggcacgtcgttgttattctctcctctgttcccatcctcctgcctgcagtaaaccactgcctgaaccgtgttcctaggtggtgctgatgctgggctgtctcaaaagcccttagtctgtttcaaagcttcctgccaatggcaagaatgtggatgatgtgattagaaatcaaatgaatgtaactgttacattgccaaaataccatttagctctcatttggctgctttttcactttgggtgggcattattatcagtttgctcaaaaacagtgcttatgaatctatccaatgtccacaatgctgttataggataaaaggccatttcttattagtccaaataacagagtgggagacttttattcttttaattgattgtgaggttctaaaagagataattgtaaaagcaacaacaacagcaacagcaatcatggctgtatgcttatttgaacaagactagaaatgagagcagaaatttgaaaagttaaagcatttgaatgaccaccagatggcagtgtggggccacctggaagctgaagccaaagtcgtcgttctgtctctctaggcagcctctgaaagtgtcagccccaaagaggcaattgctgtaaatgtataaggctaaagtatcttattaaatgattataaaatatatttaaatgcattttaaaaatgaagttcataagaattattttaggaaactgaaaggtttacatttactctaatacaaaattttagcccacaagtcttcaaaatataattaactcagagaagtctcataaatcaagacagagaattaatgaccacatagagaaaatttaagaaacaataattgatttttttaatagggaagagatcattaagcaaccacagccattacccaaataattatttttctcctaatggctacaaccattgtgcatgaaaatgatatgcataagtttcacttactctagaagaagtcaaactattttcacaaaatttctgcgtgttaaggtgaaaaatctgctgctgctttttaatacatcgtgacacaggtatggcaagcgaattcacaaggtaataccagagtattttggggtgtaaaaagagaaatccattttaaagtttgagaattcttagtttaaaatatactacaagaacgagcctctttatccctgctctgcccctgtcatagtgggagaatgtgccacaaaggccatattaatgagaggactggaaagaacacaaggagatacaaaacctcaagtcagtgaaaaagttacatgttacatgggattttggtaaattcaatgttctttccctttttccctctagaatcacaatttcaaagatgctttaatttcctccctccctccctgcctccctcccttccttccttcttccctcccttactttcttctgctctttcttgttttgatttacctccaagtggcagtaagtgctagctagcatttaaattctctacttgggtgttttatattaagttatttcatttaattatatctattcagtgaattagttatgattactggtaataataatgttaataaaatcaattttatgacaaatgacttttggaaagtaaagaatcgttccataattatgcgttctgtaggttctgagttttgcataacaggactgcttaaatcagtagctacccttttaattagagaacaaattaaatataaaatcaagaaaggaacaaaagtgaactcaaaggtacaaataagctggtttgtctcactggtcagaaagttaccaggacttgtcttgataccttattctgggtgaggaaggtcttatttttgtccactgcagacactggcagtctcaccgaggtttttgtttgtttgcttagcaattattgccaactacgtttttgtagcaaagagaacttgtgaagtttgcttcacgtgattctttgcttaagtaaatttgatggaataatcagtgaattcggaaaagagaaacaataaaatctcctcattggtgtcagagaagaggctaaataactgcacccagggatgaaattgaagttttcaataggctcttatgttattgtgcagatagtctaaagggaaagtcttttttttattattatactttaagttttagggtacatgtgcacaatgtgcaggttagttacgtatgtatacatgtgccatgctggtgcgctgcacccactaactcgtcatctagaggggaaagtcttatgagacctagatgtgactgtctataggcaattagctcagttggtcggactctggtgccaatgaggttggaattatgagtgcaatcctacgtatgcttctaaggagtgctggctacttaactagtcacatgggggacctgtggaaagattggtgcaaacctgtcttcctttctgaaaaactaactcagctaatattctgttagtgatcagtagcactgtttttttcatatgaaggtcatcaatatacaccttaagaaatactttgcctatgcacacataccagcaaatttttggattcagttaatgttgtaacaggcttggcattctgtaggcactagtcacacggttttgccaatcattcttgttaccaaaattcaaaagaggaaagacctgctctataagattcagattttgccagtgtagaggatagattatagatttgataaatatttctagcaaaaaaggacatgaggtggattcaccaaaggactccttccttttgccctggctcccaagtgaactctgcttcatctccaggcatttccaacttggtaaattctccagcaacaaactctgggaactagtaacatggtttgataatgacatataaccactggcacactatttttgtttaactttggggagggcgtatcagaaaagttgggcattatttggtaccaatagggaaatctgtcatgtgagctatgagctcctatgacttctctaagaacatctagaagctaccttgtactgattacccttgaattctcaagggaagccatttttcaatttttgtagaaattaatttaggactgatgaattcctaaatgtgttgaaagaatagatttgggaaacaagaggcactatcttaggagattagacattgagatagagatcaattactcttactgtcctctggtaccaatctggccagaaaccattttgctctgtaggggctgatgtttgacaaatggttcctgtagtgggattaaaatatttttctattattcccagacacaggccacaagctcccattatggatgctactggagactcagtgtacagaaaagagtattaccaatgaggccccactaccaccattcccgcaggctgattacttttggaaattagtcttcaaatgtatacaactaaaacttcactgactatcctaacaaaattagaattgcttatcctctgggtaaaaagccctttaccagagctgagtacattaacacaattttataattttctagctatttttccctcggtatgagctttcataataataaagataaccttttcaaaagcatgaacaaagatgttcaaatgaggagaaagctaagccgttattctgactttagtctgaaagagtacttggcagagtctgggactggggaaaattttcagctgaaaaacagtttatccttataagttcaacatctttttgttacttctacagaacagaacagctggaacacagacttttctcctgcaggtcctcaccaagatggacaattagggccattttcgatagtctcattcagaaacttgaaacttgtctttttcccctatgtacttactttttctaagtaggtatagctccaaattttcccatcagcccaagttcttgaaataattttcccactctggtcatattccattttttcattccacgttcctctttgaataaacgtcaccaatcccgaaggtgaatatgtgatgttcacttcattatatctgcttacaggagaccacagaatgggtcgcccagtctggtcataaagaattcgaagggtgaattttcgatggtcatcatagatctttcctgtgcgggttatatgatcaaaatctatggagagtaggtttctgttgtgggcctatgagaaagagatatgaaatacattttaagcacagccttgttcccctcattagagcactgacaatcatgaatcctttcctgattatccaacgatagagtctgtcttgcctctgaagcctcacggcttcacattccacagatgccacctgtctttattcctctaccacattgtacactctcagagagcagggctatgtcttaagtacttgaaatactctagactctcaataggtggttgttgattgctttttccccagctcaagccttaagtgcagtgccacagttttcagtaattatgtgatcttattttatgtaagtcagttgcctactaaggagtgggtattccttcacccttttcaccagtgaagtggccataacataaaagggtgaattatttgtgtgattagaaatcagacaaaaggaatacagtgagccccctctaacttatacagattcccttctttggtttcctcattcacctgggcttggagttttatatgatttcacacctattataggggaactcaggttgccttgccctctagttatggaatctcacttagcaatactttcacggaggcctgtaggtaaatgaactaagtgttggtaggtcccccagcattcacaagggcagcaccactaactgtggttaaagcacagagttaagtttggattccaagtttagaaacagtactttcacatgattctggttctagactttttctaccgtatggtagcattttctctgggcacctcaaaaccttgtagcagtcccagagtgatcctgattcaagggatcttgaactggattccatgaaagacagtattcaacggtgcctgactgataaaattcatctgggttcacacaagataaccaaataactaaatgacttagtaaaaaaaaaaaaagtttaaaaaatcagcagtgggacaactgacctgattttttccacgtttcagctggtagtgtcagtgtttgctagatctaccagtaacttctgctatgggtagctgattacaacacaatcacttagaaaatgcaatcctcaactgtttttttttgtgtgtgtgtgtttcagaaaaaaaaaaggtgttcttgattttagtcattaagaggttcagtccctgctggccagtgcactgaagaaggccctgtggaagaggggagctttgaagaaggcataggtggaaagtgcaggaaggaattttaaaatttattttattttagcttagctcagtttagttaagttttagttttagtgggttttatgttttgttgtgttaaaactttttatttttacatagtctgactcacaagaagttgcaaaaatggtagagttgctgtgtacccttcacccagcttttaggggacagacttctgatttgggtggagagagtcctagtgtatccggcaggaacaaaaacaagaatgaaaaaggagagactttgaggagtctaagtagcagtgaactgcagtcaggagacattcaaactagttacttgtctgtgcaccagtcatttcttccatctgcgccttagttttcttatctgtgaaacaagagtgatgttaccactttacaccacaaacttgtgctaagaattaaacgatattccatatacaggtacttggtaagctgtgaaacaacactagtaattgttatttgtataacataatgattacttttctcattttatttaggcttgtgaataggaccacatttcagattccaaggtgattgtagcttagtgtactagatttatatcggtaagagttgtcaacatgatcctgaatgaaatgttaaatatcttgttaatgaaggggaggagtgaaactcacattaggatttgactacattaatcatagtcagattaaactgattcactagctactcaactaaacttgatgttaattttaacttttgtggtcaaggatctgtttaactatctgaaagctatgcaatgtatcccaagaaaagtgcatataaaatgcatatatattaacatttttaatatactcttaggggggctttgaacctttctgaaaaacctaaacataaaaccttttcaggtctcaggaatccaagatcaacatcctggttcagaaagagttttgatcttagaggtctggatggctgcaaagctaatgctctcataccagactctggtcttcctttgttcagaatcttgtgctctttgctttaaaaagtaacctttccctcccacccccaaatataaaagagataactttttcatggcagaaaaattagaaatatagaaatgtacaaaggatataattacatgtaatccaaccatccaatgaaaatcactgttaacacttcactgtatttcatttcatttatcttacttttttggcataatctctgtgcatacatttaaaacatacaactaggattgtatttaaagttttgtgtcctactttttcagctaatgttttatctttagcattccttgtgttattcaatgttcttaaaatatactttttaatggttgcatgtcttactacatgataaacatttatttatctattctcccaattagaaatcagaaagtagtttttgtttttctctttcatattgcatgttttgctgaacatttttataagtaaatatttccataatacagaaccctatgagtgaaattactgggtcaaatgagacatgttaaaagacccctgatgcaacctgagagattactttatagtgcacagaggttgtataaattcatactcccattagctagtagtgggagaggctatctcagtccatccttactagcattgagtattatcagttaattaacttttcccaatatgagagtgggaaaatgatatgctgctgtggcttaaatttgcatttatttgattactactgaggctgaacactttttaacatctattggccacatgtgtatcttctataaattgtctgctcatgatatttgcccatttttctattggggtgtgacactttcctttttaaacctcttttggtttcagtttcttcattggtcagctggggctaatgttatttgcccttaattttgaacttctgaaaaaaaaaaaaagaagacctaccaaatgttccatgccatgaattgtatctggaagactagtggttagatgcttaaattatctgggggcaagtgccgtttgtgtcaggggtaggtttaattcagggagtacaaccacaaattgggactcttgactctttataccatctgtggccaatgcatgcagtgttgtcttgcatacatatacagccacctgttgttatgtgcttatgtgttgttatgtgcacctaaaaggtgataagaaaagcgcatatttcctgtcttttgatacaacgggcctggaagcctataggaaaccaggtgttcttgaactacccttcctgtggtttcacagccacatatctccaactgtaatactgttcatttacaatagctgtaaaatatccatgtactcccagagatggttgtaactgttgcaatttatgctataatgatagttaaagagccaaagtaacaagtgatttccagttcaactaaatttgtggttttatttgtctgatagattaagtttactactcaagaacacatttcttagtaaagtcattatagctacataagcagggatcactgtttaaaatccaccacaaagcaagcagaggacaactctgcctaatgttctttctctgcctgtcaagacgtctgccgctgtgcttctctgtttatggataatgcactctgatattccagtgctgctgaaacactagtttcaaagtcaggtttggaagttaatgtaaaattcggctaagagctaaaaaagaatgaaggaactgaagatgccacaggttcctccctgagtctcctggggaaaccatgtgtgagaagcctggcaaagagaatgcttttccagctgagcctctcccaaccttttttttttttttcgagccggagttttgctcttgtcacccaggctggagtgcaatggcacgatcttggctcactgcaacctccacttcctggttcaagcgattctcctgcctcagcctcccgagtagctgggattacaggtgcccgccaccacgcccagctaatttttttgtatttttagtagagacagggtttcgccatgttggccaggctggtctcgaactcctgacctcaggcaatccacccacctcaccctcccaaagtgctgggattacaggcatgagccaccacgccaggcctccaacctccttcttgagtgctcacgtgccaccagcctctatgataagaataagaactaggctgaacactacctactactgggtttgtgggcaaggctgagaaagctccacattcatacaagtgcttgctttcctgaaagatgatagcccttgacctaagtgtggaccatcaatctttatttccactcttgtttcagtattcaatctacactaatcctttccctggaaaagagaagggggggaaaaaaggattgaaatttgggaatagctccaagttaaaaagggtatctttggatagctgtgcattgaataaaacctttgagtttggcaactgacaggctgtgtggtgtggtaagaaaactgtttggtaataggtttttaataagggaagatggatctacgctgtaatgcatccttcggtttcccttatgtttttttcagctatactaggagacaggcctgattgttgttcatactaggaccagagaggaaagagggaagagtgtgctctggagagccacgaatagtgttgctggcagaaatgaaaaggcctgtaaaaagagggtatatggggaaaagcaaagccctttcctgctctttctgaggactttgtgttctaattgttcaagagaaaatcctttcaacccttctgatttgaaagtcgttcagttagaaaaataacattgtactacgttgatctaaaggcaattggtgatatttagctgtttttgacctacacaaagggcaatttgctatggttcaaccaactacacacttgcacacccacgcctgtgaatgtgctgaactctgagctatgatcactgcagttgattttctcccctccttaaggaggagaaggctgaattttcaagaacactgtcactagacaactgtgttacttgtttaatttttgctgaagaagttggaaggtaaataagtgagatgggccaaatagccacgtcagagtttggaagatcctgcatttaatttttttgtttttgtttttgtttttgagacagagtctcgctctgtcgcccaggctggagtgcaatggcatgatcttggctcaccacaacctccacctcccgggttcaagggattctcctgcctcagcctcctgagtagctgggattataggcacccgccaccatgcccggttaatttttgtatttttagtagagacggggtttcaccatgttggccagcctggtcttgaagtgacccagtgatccacccgcctcagcctcccaaagtcctgggattacaggtgtgagccaccgtgcccggcctcctgcatttaatttttatgaagttgtgagaatggatagaaaagtcacagttggggctgggcgcggtggctcacgtctgtaatcccagcactttgggaggcccaggcgggcggatcacaaggtcaggagatagagaccatcctggctaatgcggtgaaaccccatctctattaaaaatacaaaaaattagccgggcgtggtggcaggcgcctgtaatcccagctactcggaaggctgaggaaggagaactgctcgaacagaggagacggagcttgcagtgggccaagatcgcgccactgccctccagcctgggcgacagagcaagactcttaaaaaaaaaaaaaagtcacagttgatcttaaaaagtaccacatgctactttactctcactagttttaaggtaattagtatttgatttttagaaatcaatcactacattaattccacagatttttttttttattggtatctcttggtagacaatcaaaagcttacttaagcctacttttatttcacagagatgcctaccaatgaacagggcatatgttcagtactagcatcagcctctaatatttcacctggaattcccatttttttctttctttttgaaagagaactaaacttacttttaaaatagatggaataaatgtataatttctctagacattttattctttaaaaattatttcatatttaacaagaatcattgtatgacatttatgcaggattttctttttttctttttttttattttttggtgtatatgtgctttattattttaaaatcaactttatttggatagtttacacacagtaggagtcaccaattttaagcgtacaatttaatgagttttgacagtcattgaatcaggtaaccactaccacaatcgtgatagcatttccatcacccccaaaacttctcatttccctttacgtcaatttaacatccccaccaactgttttgtcccccatgcaggattttcaatcatttgtttacatagtgatagatttctagaaaagtttacatgacatcataataacctttgacacaaaactgcttgagttagaaggaacccttctgttcactcttatccgactacccactgtaatttacaatcacatacaactagttgtttctaattcttttgaagaatttgattcaataatataatgttttttactcccaagacactccctttactttgccagcatatagaaccttatcaacagaggggatcttaggaaatgggcttttgagccagactgcctgaattcaaatcctgtgatcactgcttactagctgtgtgacctctctgtgcctcagtttcttcatctgtaaaatgggaatgataatgataaacccatctggtaaggtgttataaatagtaaatgagttaatatgtggcagtatacatggtaaggcttcaaggaatgctaattgctgctgttatggttaatactaccactaataatatattgcaccatccatgtccctctttttatagatgagaaaagtgcaaaattatgggcataccagttcttcctcaaaatcatactcatttttctcacccaactttggctatattatttaccttggacattttttgcactatgctaatttgcccttgcttaagtactttgctgttgaccaattcatctgtgtaaccatacaacagatatttaaaatttttttataccaaatcattaatgctcatatacaggtgaaatggtatatgaaataattctttctttctagttatcttagtgaggttgatccaagattaacaaaaataggctaggcacggtgactcgtgcctgaagtcccagcactttaggaggctgaggtgggcggatggcttgagtccaggagttcaagaccagcctgggcaacatggcaagaccctgtctttacaaagaaacaaaaacaaaaattagccgagcacggtggcatgcgcctgtagtcccagctactcaggagactgaggtgggagattcgcttgagcccgggagttagaggctgcagtgagccaagatcgtgccactgcattccactctgggagacaaaaaacaaaaaaacaaaaacacaaccaaatatagcaggttctatgatttggaagccccaagaattcctggaccccaaaaatcaatactgcccagtagccttgatataggaaatctcctgtctccagggggctccttagggggaaaagcactgttacttgactgaaaactgcagatatatttttaaatagattaatctgattaatatatctccagtcaggctccttatctaaattttcacaaaataaatgcttccaccaaacctgaggagaaggaagttaaaatagtgtcaagtgaatgaaaatccaactctgagcaccctgtagctgaggaccaaggcaatttctcagaatagagggaaaggccagagccctcttggctgcccccaccaattccccatcatttgtcagcctgagaccctgtgttcaaccgagcttgtttctccttctcagctcacatctgaacactcacgtttcatttaaaaaccaacctaccctattctcagttatgtttgagtagaggaaaaaagtaaattgggagagttttagataagtccttgcttcatttcatttgtaaacacataataatcctacctgattttataattttggtcataaagtgctaagccccctccattgtttttcttttaataaaggaggctgcagttcagggattttgctataaccttacaactcagtctacaaaatcttataaacagctctgggatccaaagctgggatacatctcatatgacagcattgttatccatggacatagcaaggtacaaactggatgtagttcctaaaccagtatgcttttggtaaatgcccaattctttttacaattgcctctattgttatctgcactctaatttctctattgtccagggaaatgtatttatggggacagattgatgcagcagataagcagatacatggactagatgcaaaagtgccttgcaaggaaggaagatgagtcaaacacaactcaggttggagggaaatggattttttaaataaatgaaatttcaggatgttaatgtgacttatttcacttaatggagctggtgaaggatggctcagaggtaacaaatcccttgcctgctcaggctgagcagggtatcatgtttcccaaaagtttgcctccctcaccttaaaaaggatcctgacgttgcatgaaaaaaaatcactgattattctccaaagataggtctatccttttctgatttttttttctttccagctaaaaggtctgggggaggtgtgatcggcagcttttgggaacatttgacgtctatcatcttaccaaatgggcctttaaatgaacctgtcattttgtccttgaacaattagtgctttatggcctgcacacttgcaaattacaaccacacttttgtgtgggttttcaaaagggagccccatttcccacagtacagaaggggtttctatgttgtatgacttggaaattctgtctcaacagctctgatagctccacctgccctcagtctgaaatgacagcttcactagaagaaataaatgattcagtccaaggtattgaggaacttgagagcatcagagaagcttattctttggatgcttacaaatgggtcattgcatattttggtccaggaagagagaaaattggcatcagcttgtcccttgaaagctaccagaaatgaagggacgccatctcggaaataataacgtcagtgggggaagagaatttgctttgtcaaaattggattcacatgtcccttttgggagcatactcatttcattaaattggaaatgccaaatctggggaaattgaggcatcagcataaaaaaaatcactaggaatagggagatcgggtaaaaattaaccagttaagcagcctccttcctctttttgcctgcttcatgcttttcctgcctggaagccagccagttgtcctgtgcctcccacacttgccagtacattagagtcgattatttgtccctttttgtcagcattgaaatgaggagtcaggccctgccaaggtagctccactgagtggggcaatgatttatagattaattattttaaggaacaaggcagcacagtgtgatgcagtagaaagagtgccatgctaggtgaggacctgcattttagctctggctctgatccttaatagctggttgactttgggcaaatcacttaacctacctgggccttggtctccttatctgtaaattgaaagtaacaattgacagctgtggtgatcaaataaaatcctggctatgaaaccattttgttcactctgaggcactaaacatatgtaaatgattgttattgttattagacttctggggcatgccatggtaacaccacctggccaataaggggcctcatttttcagtcacaggacctcagggagtagcctagaagtgatatagagaagagggccttgaatttgttgcccttatagtccagtccgcaaatctgctcaactctgccacaggatcggaaatgggtcacattataattagtactaactaaacactttacttcttaacactaatgagctcccaaatgttttatgacaattagcttctcagcactaagaacaatttgggatatggggtgtaaattacagtttatagtttctctccattatctgtgcatatggaggacagaaaacaggatgggttgttctagaaaatggaaacttccaaggtcacataatataggatgagttatcctaaagaatgaaaaatcccaaagtcacatagtatatgatttggttcagaaagtttttttgaggctatatgctgggagaggtactaagaaatcatgtcttcaatacaatttttctgtgatgagtccatgaggtcgataagccatatgtagataattcttactttctctagtagtacacttttattttacaggtgaaaaaaaaaaatcaaggcatttcttaaagcgtttgtaaaatagggtatcaaggccaggttctctaacttccccatccagggttctacccaggaggtcctatttctcaaagaattccgatagaaatctttactgctacccacacattggtttgatatttggattggtttcacttctccattcagtggcatatctggtaaatattctgtcagaaacttgtcaatagaatcgaaacataaaaattgacttgtgcacatacaaatttcagtagctttataaaaaaaaaacccaaacaaaaccaaacaacaacaaaaaaaccacccactaaagtctgtggctgtgtgtcaccaagagaactgattgaaaagtgagcactggccgggcacggtggctcatgcctgtaatcccagcactttgggaggccgaggcaggtggatcacgaggtcaggagatcaagaccatcctggcgaacacggtgaaatcccgtctctactaaaaatacaaaaaagtagccgggtgtggtggcgggcacctgtagtcccagctacttgggaggctgaggcaggagaatggcgtgaacccgggaggcagagcttgcagtgagccgagatcgcaccactgcactccagcctgggcgacagagcaagactcttgtctcaaaaaaaaaaaaagaaaaaaaaaagaaaagtgagcactgctgtagattattttgttcatatcaagccatatgaccggtttgactgcctctctctggaattgggtggttgtttgggggttgcacttccacaaccttaaggttaccaaatttttgatatgagttctacatttcttttcaaataattaatatgtcagtatgttcaattctttgccttctacttttaaacttaacttcctcgtaaagcaacctttttcaattacctactccaccctgactcattccgattacctgctccaccctaaatcattcggatcacctgctctaccctaactcattcagattacctgctacctgctctgccctgactcccgccaaaacactcaccccgtcattctctttaaattagccaatcggaattagtttagtctgtgcggtctaaccctagccaataggggaacgacacagcaacacgtgcgtcagggataagagccccttcccctcccttgtccaagtgtgcactcaccattgctccatctgtaagggcgcacccttctatagaagtaacttgccttactgataattaaaaagaaaattttatattcgagtgctattccttttgcggcaccgaaactttatatataacagaaaccttcccggtatatcaggcgtgacacaggtgctcaaagcagatctggcctcaatagtgagtgattatttcccgcaggctggcagttgctctagggctgatattgaatgttactacatgtagaaagctggccacatcatcctaacactggttaacgttcaagaggaggcaggtagacagagtgctatggcgattgtaggctttgtgtgctgcagaaaagctgaccgaggtctcctggttaactctggtgaactgtgcttggtaaggactttaaaactccctaatctataacttcctccaggcagctctgagtacctcagcccaatctcagtaccagtcctttatccctctggccctggatatgtattcatggcaatgctataattcactgatttttcctcttgtctttgcccaaatgttgccttttgtctcacatccttttgtgtgtacctgcgaggtctttccaaagagctacctggaaagcagggacctcggtcaactcagtgaacctgatagacatctccagggcatgctgggaggggtgctggagggcctcctttgactaaacacatttctccagccagactttcttggtgaaattgctactattagagcactttagctggctaatgacaaagaaagctcctattagaatgctcatttaaggatactgaaccattatcggccattagcatcctcttttgaattagtatatcatataagccagtcagtcacttagaaaagctttggagaaatgggacttcagtttagggaggctctgcagttaaacaaacaaacaaacaaacaaacaaacaaacaaaacacctataaaagttctatatcttgtgtaaagtcaagccttaccctcagcctcctttcaaaagccgaaacattgcctttgttttgctccttcctctgccgccactcgatgaggtttgcattgtgctctccgggcaatgagatgttgcatttgcccagggtagggttgactgcccctgccaggatgtggggctctgagctgaggccgatctccatcccgctggcaaaagtgacacgcagggaaccatctggattcacccgataggtactttgagtattttctgtagacagaagagcaaaggaggaagagggggaaggaagggaagagcaggaagcagaaaagagacaggtttagttttaggaggcacgtttgggggataagcaggtggggtgctgtggtcctatctgccttctgggctagactaccgctctgacaggcaaacgtgttccctatccatttgggtcttgttattttcacagctggagtatctgtttcttggataaaagactcttgtctaacactgcaggctgtttttgtttttttcttttttcatttttaaagaattccctccctcactgacttgttggatcagcctcctcagtttgatatgctgggagctagaatgagaagagtgtgaagttcaacgtagcaccttaccacctgggcccaccatcacagttgccgtactccacaaaataccactaacaaaagttagtgtactcttagagtgtctggtgtcaccacctaacaacagaatgaggtcttaatgacagggcagagagaaagcaatttctctttgtgcacttgtcctctagcttctaagacattccaaatcctatctcccttccttcctttcttcttctgttcttccttacttttctgtcttcaaatataatgagtttttaattctctcatttcacttatattcttgcttggtctgtatcctaagattttcctttttcttcacccatgttggcattgatctagaatgccaagctcagctggagcccaggctccatttatttaatataacctagccagaccctgaaagacctttgcaaacagctgggtattgggaaataagttgatagcagagcagacttggcagggattgaacctcatgactcccacagagatgggcccaaagttgatgtgagaacttgtaaaaggtgtgaattttgtctgtgtttcaacttccatagctggaaaacaggaagagtacatcttctcagctagaggtgaattctgtttatgaatggtgtacgcaggtttcaaggtggatgttgacataggggctgttacagtcagatatcgttggaaacaatcttaccttgttttaaaatatatatggtactagttgccgtcaagttggttgacatgaggacattttcacggttggaagtatctagctccacttttgtcagcttctccaggtcactgtggaagctgctgacctctccagtgggaaacgttgcattggtcaggtgtccctcggggtcatacctgaggaatgtaaccaatcccagctttgaagcgtctcggcagtgataacaggactttgcaaaataaaaatcacttggcagctaatacagtttaactttgagtgataacaagtattattaaccttgttcaagaagaagaaaaaggtcagagagatgattaatcaaacgaaggtattttttgcagcttctgaattcttgataacttccttgagctgtgctgttttacagaaaaaatatatctggtaatgaatcaccagggtggaacactgatttatgaatcatgtcctgctgtgtgcaacgttgcagggaggcctccgtttgcgatttgggtcgatcccattagaggtgatggattacaaaacccagcagagggtgctgttgtcaaagcaaaagaaggtacaaaagggccctcaaaggctgagaagccaatatactgactttgggttatgatgggaaaattataatttgctgctgtttaagttgccaaatttgaaatgaatgaatcattcttccaacaaaatgaacaggcacagaggataatggaaacatgttcattaaaacattctggagccctctgatcttgatgtcacttaaattttaaaaatctttttagggtatagtacataaggttttgtaatttgtctatatgagtaagagacaaaaaataattacctgggataataggctataagctatatctagaaatatagtctagggagtttactttttccaaaaaaaaaaaaaaaaaaatcagaattattggcaatctcactgtcctccaaatgaaaactgcttccctgaaggcttttgatgtggagctgttcttttattgccaatagaaccatgaaaaataaacacttcattaaaagtaaacacatgtacttggaaacccattactgttttcttttcaagttgcaaattacaaaatatttaagcacttttatttgccttttaaaatgttaaacaattatattctttttacccaaaatgagcaggattcagcctggacacaatggtagagactggctgtactactccctcccccaacgattacacaaagtggcatagtaattcagtatcaatccattatattctaaaaaactcagcctgggtagttgctcaaattttaataactataccagcctttggaaggcttgggaaaagcagttggactgtactttataggacagacttgaacttgagcctatacataatgccacctaaagttcagttctgcatatacacgtgcgtgtgtgcacacacacatatatattatcagttaaaacagtcacatatgtgaatagaatgaatcaaataggttattgacatcacagatatgcctagccttagatgttaaattgggtgtctcctttgtttaaatggatttcagtcgaaatggttggcacagtgctattatgcagctaaggacgcgttatcaaagaaagactgaagagtgctgtttcttcctggggttaatggcaaaatccttccctctgcaaagactgcccacgttctgcctgctgtggggctctatagctacaagaagcagaagaacggagcataggaaggctcgaatacccactttagccccaaccttgtctgtttggtcttccatccaggggagaaaaacaataatatccagccttttttaaaaaaaattaattaatttttttgagacagtcttgctctgtcacccaggctggagtgcagtggtgtgatctcggctcactgcaacctccacctcccgggttcaagcaattctcgtgtcctagcctccctgagtagctgggattacaaacgagtaccactacatctggctaatttttgtatttttagtagagatgtgttttcgccatgttggccagactggtatccaactcctggcctcatgtgattccccctgcctcagcctcccaaagtgctggtattacaggcgtgagccaccacgcccggcccactgtccagccattattctcccaaggtagaggaggcaggagtttgcaggcagtagaccgaaggaagctgctgcatgcctttcttatcaggggaactgtggccccaacaacctggattatgcaggcacttcctctctgttccacatgaggcaccagcaactttgcctcattggtttccctttcctgatttctttctttctttctttcttttttacaatagtaaaactttttttttattattatactttaaattttagggtacatgtgcacaatgtgcaggttagttacatatgtatacatgtgccatgttggtgtgctgcacccgttaactcgtcatttaacattaggtgtatctcctaatgctatccctcccccctccccccaccccacaacaggccccagagtgtgatgttccccttcctgtgtccatgtgttctcattgttcaattcccacctatgagtgagaacatgcagtgtttggttttttgtccttgtgatagtttgctgagaatggtggtttacagcttcatccatgtccctacaaaggacatgaactcatcgttttttatggctgcatagtattccatggtgtatatgtgccatattttcttaatccagtctatcattattggacatttgggttggttccaagtctttgctattgtgaatagtgccgcaataaacatacgtgtgcatgtgtctttatagcagcatgatttatattccttcgggtatatacccagtaatgggatggctgggtcaaatggtatttctagttctagatccctgaggaattgccacactgacttccacaatggttgaactagtttacagtcccaccaccagtgtaaaagtgttcctatttctccaaattcaacaacccttcatgctaaaaactctcaataaattaggtattgatgggacgtatctcaaaataataagagctatctatgacaaacccacagccaatatcatactgaatgggcaaaaactggaagcattccctttgaaaactggcacaagacagggatgccctctctcaccactcctattcaacatagtgttggaagttctggccagggcaatcaggcaggagaaggaaataaagggtattcaattagaaaaagaggaagtcaaattgtccctgtttgcagatgattgtatatctagaaaaccccattgtctcagcccaaaatctccttaagctgataagcaacttcagcaaagtctcaggatacaaaatcaatgtgcaaaaatcacaagcattcttatacaccaataacagacaaacagagagccaaatcatgagtgaactcccattcacaattgcttcaaagagaataaaatacctaggaatccaacttacaagggacgtgaaggaactcttcaaggagaactacaaaccactgctcaatgaaataaaagaggatacaaacaaatggaagaacattccacgctcatgggtaggaagaatcaatatcgtgaaaatggccatactgcccaaggtaatttatagattcaatgccatccccatcaagctaccaatgactttcttcacagaattggaaaaaactactttaaagttcatgtggaaccaaaaaagagcccacatcgccaagtcaatcctaagccaaaagaacaaagctggaggcatcatgctacctgacttcaaactatactacaaggctacagtaaccaaaacagcatggtactggtaccaaaacagagatattgaccaatggaacagaacagagccctcagaaataatgctgcatatctacaactatctgatctttgacaaacctgacaaaaacaagaaatggggaaaggattccctatttaataaatggtgatgggaaaactggccagccatatgtagaaagctgaaactggatcccttccttacatcttacacaaaaactaattcaagatggattaaagacttaaatgttagacctaaaaccataaaaaaccctagaagaaaacctaggcattaccattcaggacataggcatgagcaaggacttcatgtctaaaacaccaaaagcaatggcaacgaaagccaaaattgagaaatggaatctaattaaactcaagagcttctgcacagcaaaagaaactaccatcagagtgaacaggcaacctacagaacgggagaaaatttttgcaatctactcatctgacaaagggctaatatccagaatctacaacgaaccccaacaaatttacaagaaaaaaacaaccctatcaacaagtgggcaaaggatatgaacagacacttctcaaaagaagacatttatgcagccaaaagacacatgaaaaaatgttcatcatcactggcctttcctgatttctaaagggattcctcaacccttgacaagctcactctatcattcctccaggaaagctgaacttagatgctgtggatgcaggttccacatggactttccagcttgggggcagtttccttcagtcacacagccccttgttttaagggaagatctcatgtaaagatatgagcagtggttatatccactcatcagagcaagatgacaagatcagataccaactgggccatccatgcataggggtacaagggtcaaaattcccaatgaacctttgcagtgacctgtggctaaatctggtttcctagtccacccacccaaacaccttttcagctaagttattggtggtctttgtctgataaacatttcaaagcttatttccaagagcacaggcatattcctacatattttgtacccatccctcctccccatattgacggtggtatattcagagaggcaagctaaagattcctagataagactgtaattacccagatagatttagctgggagactgcttggtgtatatgtgtgtgtttgtgtgtgtgtatgtgtgtgtgtgtgtgtgcacgcacgtgtgtgtgtgttttctggtgaaggaggcaatggtgttgggaataagatatttcccatgggtctgtccagttgttgggtagctggaaagttatattgcctcatttcctttctgtggccagagaggccaatgaaagtgtacatttgactgtaactccatgataaacaaagcaccccaactccaacacactcacataccccaattctgctagttcacagttaaagcaatcacatttaatggtatctgcagggtggtgtctctgatgctcaatatggccctggatcaaaacatacagatcccacctctcttctgttgggtcatttccaaaggaagaacaacaggcagatgtacacatcagcgggtaattcctacaactttggaaagattgctcaaagtggataagaaatagagcgagattttgatttcttatagcttacttgagttttttctgtcatcacaggggaatgcatctttccagactgagtgtcgaagaaacaagtttaatcaaaatctcttctgctgtgtgtttcccttcggtgcctccatcctttggtgcagagatacaagccgatatgctccaacgaatcccttcaggccacagcatgggagcaaacccaccctctttgcatgcagggcacagcactcacctaaccaggctgcaaattatagctgctgaattgtgccatcaggaaatgacagttgccttcatagccatcagaagtggatttggtaagaggagatttgttatcaaattgtcccttgctgtcctgattttacagagttccactgtgatggtctcagagggtaccagacagttaagtaatgagtacactcacccttttcctcagcactgtcataggctgtgtgcatgtgcacttgagtgagtgtgtgtgtgcatgtgcacacatgtgcaccccagtagagcaaaggaaacatttgtaaagaaaattcagaatccattcttgtccttgagaagcatatagtttagttggagagatgatatttacacatgattaaaaatatatttggcctggtattttctcataagggatagcttgccctttcctctgaggacaatttaagccagagttaaactgttcaagataaaactagaggctcccacacctttgctttaaaaaaaaattgcagataatagaagagaaattcattacttactcttttaaaggaaatatgaaagagtcagaccctctttacactttcatgtcagaaagctgaccaacctaataagaattctttaggaaatatgggattcccctttcctcactaataaattcctttggcttcctatgattcagttccaagtccataatgtccttctatcttcatttgtccttcattcaataaatatcagagtcttgtgctagggaccagggatacagtgctgaatgaaattcacagtctagtggggcagataagatatgcacacaaataactctaatgccagaatattgccatgaatttctgtaaagaagaaactagaatctcagaagaggcaaaggtcatttccagctgggctgagcagaataggaggaggaagagcagaagcaggtggtgtttgaatcctagaaggtaggtagagattgggaaggggaggaaggcattccaaatggaggtatgaagaaaggcacgctgactgatgggatgtctactgggggaccagcattgctggagcacagggttcctctaggagggtagtgagagataaggcttatacaataaagaagcatagacagtttttcaaggggataaaaggatgatccaaacagtgttttggtggcaatgagtcttggaaggggaggcaaggagcagggagaactgttaggaggctgcagacccagttcatatatgagaagatggtggtctgttgccttcgttaaatatattgtgattgcctatcattcagatttgtcttccccactagactgtacaactctcacatctttagagggaggacacagtgtctcattcatttttatattctccgtgtctggaacagagtagatctcactccatgtacttgttgaatgagtataaataggatgctgccagtgaaaaaaaggatgggggtggatatgagagccaatgtggttacagaacagacagaaccatcgatagtgcttctgggagggcacactcaggttacatagatgtgctatggagttcagcggaacttccctaccagcttctgttacttctgttcactctgtctttatttcagttcttcccagaaataccgacgataattctgttttactcactcttgatccttatcaagggcataaagcacaaggagaggtgactgagcaagggtgtcaactctctatttctaaagatctgaaggaacagccaacatttctatgttcttgtttaattgaaatcattcacctgcctggaggcatgtgcctgaaccatacaatgccttagttccttttctactctgggattctagaaggcattggaaacgtcacatgtgtttagaatgactgattattacataagcatttctgcatgggaatcgcatcctatccccaggcaaatatctcacccagagacatggcttgtttatcttgccccctaccccttctgatcttataagggagaagggggaatctgtcattagccatccatgataaaactgggcatttgtaaaacagtctagaagatacccagagatattatgaaggcttctccaacctgtcagtgggtggtgtttttgtttgtttgtttgtttgttttttgttttcttgatgggaggagaggatgtgttaataaagtctgaaaacagagaatgcagaagacgaaggatcaagagatcatgtaaacggagagtctccttcaagtgggagggcttcccacaaagggcaaggggcctgacgaaccgtcaactcagaatggaccagcagcagtgacacgactgatgctttggccttagtctgggaccttttcagtttagtagagcagaagcctttgccagggaaacaagcaagggcatcctggctacttttgcagccttgtggagaaaggcttgtctgctgtgcgagttgctaggcccctccctcagatctcagctgctgcggggttattacaattaggagcccacctgtgccgcctcaggccagtattcgtgccttgacaatcacttccttgttagctgtttctctgtggtcagcttttccccctgacacttgggacactcatgggcaatggtgcatcaaatactaacacttggggtgtgcaattttgatcctggtccaagtcaaatggaattatgaaaattagtgaactatgtaaacaacatcacactacctaataaaagcccaggcactaccactacacaagatgcattttaaaatcccatttggattatccactgttcagggtcatctatgtcatttttcctcctgatagctgcagataatagaaagttgaatggattagtgactggcctacctttacactgcagtcttccatcctgccaaatttcacttctgtttctgtttctctcatgctcctctcagagcagaacttatacttccacctgtgcaaacaatttgtccccttgtccacataaagaagcctcccttttacctcggggaattactcgagttcttttaggagggcctggtatcagtggtatagcagccttctaccgaccttagcactgctctgaccctgactagaagagtaggtcaaatgctgtgttctccaacttcagaaggacaagagaaaacttgaaggagtgctcagaactagccaaaggactagaggacaaaagtgaaaaaagtcagatattgtataaagactgtaggaggaattagtcacattatgaaggttggaaagttgctcatttctgtttacaggcaagaagggacaggagctgtgttttgttaaagactgctgttcagcaccagaatagactgcttcaggagaagaggtaccttctcctttcaacagatgctatttgaccaagagggtttcagtataattctggctggagttaagaaggtgggagaaagaacaaatggttattcagcctcccttttcatctcctggtgctacctattcctcttttactgctacttgaggggaaactttctagctctctagattttgtatggtcactctcgtaagcccacatgatcctctgttttctgttatcctgactctggataagccaactagcatgtgaatgggcacgttacttccctattctgggtttcggtttcttcatttgtaaaatgacatctaatgtctctttgtggccataaaatttcatgactacccccatgtggatgtctgtgtttctcatagcttagtggctcgagattggttactcaccaatgatgttagttgataccttttcactcactgttggccaaattctggtaacaggcctggaccccattcaccgtgagaatcttgcctaccacacagtgcctgcatcaatgtgatgccagtggaaaacaggcacacaaattgatatgacaacaaaattatcttctctcttcagcatcatcaattttcccctctatattagatcatttttatcagtatacaaatatgctgttatttctctcacttaaaaaactcttctgtttactctgtttctcctccagctctaatttctctgctctttacagcaaaactcctcaaaagagttctttactcactgtctcagtctctctcctcctagtcattctatattattattattgagatataattctcacaccataaaaatcaccattctaaattgtacaatccagtgacttacagtacatttgcaatgttgtgcaaccatcaccaccacttctagaacatttctatcacccccaagataaaccccatatgaattaaccgtcactccccattcattcttctccccagctcttggcaactacaaatctattttctgtctttatggatttgcctcttctagacatctcatataaatggaatcagaagggtcctttgtttctagattctttcactgagcataatgtttttgaggttcatccacattgtagtatgtatcagaacttcatttctttttatggctgaacactatttcatgacatggatatatcacattttgtttgtcttctcaccacttgataggcatttgagttgtttatatttctcagctattataaataatgttgctatgaaaatttgtgtatccattctctcttaagagaatattctactcaggctttggtccctcatgtgtcacagcgcctgctcttcacagtgctaaatcaagtggtcaattctaagtcctcatcttacttatcaggagtatttggcacagtggctcactctttcctcctggaatcacctgttttatttggtgctatggtctgaatttgtccccctaaattcaaatattgagactgaactgccgatgtgatagtactaacaggtgaggcctttaggaggtgattaggtcatgttgtctctgccttcatgaatgcaattagcaatcttacaaaagagctggagagagccagctaggtcccttttcactgtcccccttctgtcatataaggactcagcaggcagtgccattttggaagcagagagtagccctcaccagacactgactctgctggcatcttgaccttgaacttcccaacctccagaactgtgaaaaataaatttgttcttgattaattacccagtaaaaggtattttgttatagcagcacaaacagattaacacagttggcttccaggacattccactctcctagttttctttccacttcactggcctttccttctcagtgtcttttgctggttcctcttcataccctcaactcttttcttctctttctttttttttgaaacagagtttcgctcttgttgcccaggctggagtgcagtggcgccatctcagctcactgcaacctccacctcccgggttcaagtgattctcctgcctcaggcctcccaagtagctcggattacaggtacccgccaccacacccagctaattgtttgtatttttagtagagacggggtttcatcatgttggccaggttagtcttgaactcctgacctcaggtgatccacccgccttggcctcccaaagtgcagggattactggtgtgagccactgtgcctggcccatatcttcaattttaaacatggagtgcttcatggtcagtcttcagatctcttttcttcattgtctacactcactttcatggagagatctcatcccatctcatggttttaaatacaatctaaacaccagtacatctcaaatttcactctccaccctctcccctcaattctagactcatatatccaattgtctacctgatattttcacttagatgcctaactaaattgatcatatccaaaactgaattcccaatctcccacctcacaaccttccagtataatatgttccttgtatagtcttcccctcttggtaaatgaaaaccagttgctcaggccaaaacctttgaaggtatctctgacccctctttctcccacactcaatactcaatctctctataagtcctgatagctctactgtcaaaatgtattcagaattttagcacctcttactggcccaactccctggtccaagtcatcatcttttgcctgcattattgcaatagttcctcctgcttcccagttaggttcccctgtttccactacacagtccatttgtaatacagtgtgattttttaaaaaatgaaagttggcttatatcacttctttactcaaaactctccagtggctccacttcttagagtaaaattcaaagtctttacagtggcctacaaggccctacatgaagtagttctggttacttaattgatttcatgtcctcattaaccttactcattccacttccatcacaatggctgccttactcttccttgaatgtgtcaggcttactcctgctgcagggcatttatacttgctcttccctttgcctggaatacccctcataccaccccccaccccccagatattcatatggcttactcttacctcctacagatctttatgcaaaagtcaccttctttcttggtgaggcctttcctgtccacccaatctgaaataaaaacctcttctgctccacccacttgatctcccttactttactagatttttctccatagaacttatcaccatttgaaattgtatacatcttcctcatcttcctccagtacaatataagttccataaaagtagggatttttatctgttttattcatagctatatccccagcgcctagaacattgtatggtatgtagtaggtgctcatgtgtttgttgaataaatacatgaatggttgaactggttcttttgaaaactagttaatacttcagccatctcttgctgggggactgaattccaccattagctttcaaaatagttgtttgcctaatttcagctgcagtgtgatccggcttgagtttttaaaaaagacattaaaacttctcattagaaattttatcttttctaagggtagtatatttaaaaacacaggctcttgctggttgaatcctgggtatttatgtgaatcaggacaagttaactattttgtccttcagttttctcatccataaagtgggcatacttaggggcacctatcccatgttattatggggatcaaataaagtcacatatgtaaattacctagcccagtacctggcacttagtaaatctttagctaaccgtagcttttattactcttattaagatggaagagaattactttcaaaaaacagaggaagacttgcaactgaaacaactgaatacatttttctaagtgaaaccaaaatagctgtctggctcttttgtacagatggcatttctttggaaaatgatccaaaacttgaaggccaattgttttgtccctttcttcaagaggctttcatgggactggacatattctctatatcctcccaaaatagtcacacttggaaccccttatactttaacatctccacttctcacattcttcaactttgatgccattccagactctgaattcagattccatggattagctcactcagtatactggtaaaaaactcagcaattccttttgtggggaaaatgcttcccgagtgccaaaagaccagctttctagatgggcttacttgcaaacaaggtcatccatgccttaaaaggcaaggacaatggtctctatttctgtgttacggcacctcctagtagcttgctgtcagacacattttgtgttagttccccattaaacaaagttatcacagttccagtctataaatgccaaaatgtgctggattattcaacttgtgcagggaccctgaggaagcccaatcccgtacagagcatttggctcttccttttacagaagcagccaatggaatggagcctctcctattcagcatttgccccacataattcttctcttgctttccagggtccacttcttatatttgaacttctctcttacctcccacagcaacttatactgagctgggctgggctgggcatacattcatttattcattcattaaaccccacagggctcaataaatagttgttaagtcacactgcttctttgctgctttagaactacagttttgttatttaaatgaaattgtaccttatcttcccagggatgttgtaaatttcttgagtacttgtacttctacctcattcctgtctcctgcagtgccacacttgagtcttccttgatgcagtctgtttttattattatgctctgcaaactgctctggaaaaatgggtctgaactctaggaattaggtaaaattttctccttgacttttcattttttaaaatggtggttgttaggagaaaacagcatgcaacactcagcaattactaaggcattttcccagtataatacaatttcaaataaaaacctaacaaagcccatgtcaagaattagaaacttactcataaacggttgtccatccattttcgttacttttggtagccagaagccctgtgtttcctggataggtcattaaggccagattatagccttgggctgacactcttttcaggactccattgctgcttatagtcagccagtatacttgtccgccaggcaccacaagccatagcggcattccgcctgcatcacggcgaatgtgcactgaattgccattgctgctggtaatcgcgcccaagtcaccttcagaattgtaggtgaagttataaacatagtcccttgttatcaagttcagggtgtgtaggtgggttccatttacagtgaactggtacagttcctgatcagcgggtgaagcaatctcataaatgttcatgtcattcaggtgggcttggttcctgctgatggtacgaattcgaacatttccgaggtctgccacatagagggttccatcaggcgacactgctaaggaggaaggggctttcatctttgcatctttggcatagccaccatcacctgtgggagaaagacttgattttaacaattggcatcataagcatttacatgaacataccacagacataaagctctgtgcatcaagaatcattttaaaggaaacaatcagtgaaccaacattctctgtattccctccctgaaaaatatgaagcctattattcaaaagattgtaattcttgagtcagtaccactgcagatgaacagtaagatctaattatctcagttataccaattttgtgaaatcctcaatcctgctgttcagaatctattgtattataagaaacaagaactgcaaataatgatagccacacaaaatttggctggaaatctgagagttatgcctgtcaatgctttcaggatctgtttcaggactttccagtcctactgtgcctagatgccctttcttctgttaattcccattgtcacactgtcaaagtacactaagtctataagtacaacaatgattcagaacatcaaatttgatacctggaataaacattagatttgctttgaccgaaagatacaaattagcaaaatatctataaaactaattgtcgaagaaaacattggaaatattgatcaaaagtcatattgaccaaattgctcactcctgactcctctggcctaaggaaaggcaaaggttaagagaaccattcgggcctggatgaacagtttaatagcactgcgtgtagtatggagggatttccacatcccagcaataattgtatctgttgacattaagaggaccgtttgccatctgagatatccactacatgttttggggagaaggctcttttttttttttttttccaatttcgattagaagaaaacttcactatgggttattgagaaagtcttagctttttaaaaagcaatgtatctagcagaccaatgtcctgagaactctccattgccagatttaattttgctcatctatcccaaagacagtctgttcttagtccctttgagtctcaaatagcacatgcttttaatctgaaaaccaaccacttatggggaagtaattttttcctcagctaaaccagtaaatgtgggttttacctagttttcctttctctaaagtacaaatatttaataatatcatgatctttcatttgtatagtggtctcaactttttaagagtctaaacatttttattacactagtttatcctcagaatagcaaggtgatataactgagacaatgccatctttattaaacaaatgaagcaaatgagtcatgaagagatcttgcagctttgctagggtcactcagtgagtcagttgtgagaacaagtcggtgatctgactcctaatccatcgctttctccactagctcataccaatgtttgcaagtaacactttgcttttccttttccttttgactttactggggcacgtttttcttttcaaaacagagaggggaagctggtgaattgctaaaaaggtcatacctgaaaaacagtcacagtttggatcaattttgcagtcacagtcagtgggggcaccagcgatgatgtagatctccccattggtggttacttgctgaatgcggtttactttcctctcgtctgtttcagctatgaagagcagcccgctgtgggagacactgatggccctcgctgactctagagtggagtgaattgctaccttgctgaccaggaaatgatcgatgcctggcacctggcagtgaatggggcgtcctgcgatgatccgaacacgcctgttctcagaaatttgcagcacaatgttgttatccaagacatacaatgaattgtccataggatttactgcaaggtctgttggccactctaatcgcacctgtgaaacgaacagaacacataccattaggttaccatgtctttccatggacagttttaacttgaaaaaaagaaaaaaaaattggtgtattgtttcccccgtcttatgaattttagcaacattggtgatgtctcggaaagtggagggcagggggaggatggttaatcacatgttctggtaaacgtacttatcatttatgccatttacaatataatgtaattttttccaataatttcagaaggatcatttagagtagaggttttcaaagtgtgttctctggatcagcagcaacagtattatctgggaacttgtgagaaatgcaaattctcaggtcccaccctagatctattgaatcagaaaccctggaggtggggacccaaacatctgtgttttgccaaggtgattctggggatcattgctgtaggaattccggtagctatgatactcaaatctctctcactgtcctgtagacgtataggagagcaaagtcatacaggtttctgggtgacagaatgccagagaagccagattttactcaatgagcaaccttttgcaacaggacctgctattagcatagacctagcatccactttgtggaacactcaggtacagttcgtcagctgttgatttagaatcctggggtgtagcacactgcttacttagcttgacctggttcactccataggttcccctttttagcaaagaaacaggttgtttttttctttcactgagtattcgctgagtacctttctctgggttaagccttgtgctaagctttgggggctcaaaaatgactacgacacggcctctgtcctcaaatgatttgtggtatagtagagccctcagaggaaccattagacaattactctccacgttatgaaaagaaggcaacagaggggataagatagcacttcacctggactaggagtcaggaggcaagatattcccagagcaggtggtacctaagtaaggtctgaaatgaacagtaggagaagaattgggtggaagttgaggggggaggggcatcagagttgaggaaaatctgggtactaggaaaagcatgggtgaaagtccagaggttaaagacagcatggcccatccaggttactaaaactaattcagtaagactaataataggctgggtgtgagggagacctgagggatgaggccaggtgttatggactaaattgtgtcctccccaacttcatatgttgaagccctaacccccagtgtgactgtatttgtagacagggccttcaaagaggtagtttagattacatgagatcataagggtggggatctaatccaacaggactgatgtctctccaataagaggaagagataccaggaatgcttacgcacagagggatgactatatgaggacacagctagaaagcagccacctgcaagccaaagagagacacctcagaagaaactaaactcaccaacaccttgatcttagatttctagcctccagaagtatgagaaaatacatttctgttgtttaagccattcagtctatagtattttgtatggctgccctagcagactaatatatcaggtgctctggtttgaatgtgtcccccaaatatcatgtgttggaaacttaatcctcaaattcatatgctgatggcatttggaggtggggccatatccatcacctcaagcatttatcatttctttgtgttaagaacgtttaaaatccactcttgcagctatttgaaaatatataacaaattgttgtttattatagtcactctataatgctctagaacactagaacttagtcttcctacttagtggtagttttatatccattaagcaacctctggctatccctgtccaccttcccaacctctagtaaccactattctactttctgcttttatgaggtcaacctttttagcttccatatatgagtgagaacatggggtatttatctttctgtgcctggcttatttcacttaacgtagtgtctgatatggtttggatctgtgttcctgcccaaatatcatgttcaattgtaatccccagtgttggaagtgggtcctggtggaaagtgactggatcatgggggtgaagttcttatgactgatttagtactgtccccccttggtactgtatagtgagttctcatgagacggggttgtttaaaagtgtgtagcaccttccccttctctctctcttcctcctgctctggccatgtgaggtgccagctccccttcaccttggctatgactgtaagtttcctgaggcctccctaaaagccaagcagatgccagaatcatgcttcttgtacagcctgtgaaaccgtgagccaatgaaacctcttttctttataaattacccagtctcaggtatttctttatagcagtgtaagaatggattaatacggtgtcctccaagctcatttatgttgccacaaatgacagaattttgttcttttttgttgctaagtagtactccacagtgtatatgtaccacattttctttatccattcatctgtcgatagacacttaggttgagttcatgtcttagctgttgcaaatagtgcagctatctctttgacatactgatttcctttacttttctgaatcataacagttctatttttaattttttgaggaaactccatattgttttccataatggctgtactaatttacattttcctttctctgcaactcaccagcatttttttttgtcattctgataacagccattccaactggggtgagatgatatctcattgtggttttgatttgcatttctctgtttgaaagataattaggattagataaggtcataagggtggggtccccatgatgggactggtggctttataagaagaggaagacagacttgagctggcatgtttttgtcctcttgccatatgatgccattccaccatgttatgatgcagcaaaaatgccctcaccagctgccagtgccatgctcttggacttcccagccttcagaaccaagagctaaataaatgtttttcttcataaattacccagtctgtgatattctgttatagcaacaaaaaacagactaaaacattgggtaatagagggaagcacatgtccagttttgttttgatggctgtgggaagccactgaagggctttaagtaggggtgtgagatagtcatatttgggttctagacagatcatcctggctgctgtccagaccatattagagaaggaggcgagataggagggaggcaggcatttagggggctcctgcacgggcccaagttagggattatggtgcctgaactgggatggcaacaatgggtatggagaaaagcagatggatttgagacatgttaaagagttggaagcaaaaggactggtgtgtgtgtgtgtgtgtgtgtgtgtgtgtgtgtgtgtgtgtgtgtgtgtttggtgtgccttgtgccaagagatgtgctaggcactggagacatgcaggctagccaaacatggcttcaccttagttcctttctagacacaggagttgattcaatgcctaccctgacatctccttgacagtaactatttatccctaggtgtttctcagggaactgtgttccacaccattccccaccctaccactcacttgttctctatttcttttcttttaggctaaaggcagaaaaaaagtcccattcatggccaaaatagtaacagtaatgtagccacttttcttttttgctttgagtgaaagcccacagaaggctttgtttttcttgtggaatctgaaagtctgaaaacaaggtatgagctgtcattgcattctgcggcctactacttccccagctcaaagaggcttacaagcaatcagtaatgaagtggataaaggtcaatttgagataaggcctttcttctaattgtgtctcattagggagggcaactggtgatattgtgaagaggacaaaggttgtctttgacctcctctactgcaccatgtggggctctttgcccatgtctgagtctctcccatacatccagcagcctcattctgtttctatgtttctgtgtgccttccacctctatccacatagactggccttctctggtcagtaccagatgcttctgtgcagctaggaatttgagtgctaatggggtataaagctgagcttgtgttatgcatgttctacagagcctttcagactgaggccatcggataaacattaaacaccagccttaacagctcccagagcagtttgcggtgatgtgttcctcagcacgtctgtctgaggcctttgcatgtcagtgccctgccactgagagggagagtgaacgcctgctgctttggagggcgctgactcctccactgtgtgcccctgccttggacctctatacactatcatgcttgtccagaagctgtctgtgtgcactggtcctacggagcatagtcccccaggaaatgagctggggctggctgaggaagaggaaatgaattcatttccgtacaacactcccattttgattgagtctcaagtcagtgacccagaaaaaacaaacctggcagaaatgacgttctaattatccccactctgggagccgaggccagggcagaggctggggacagcacacacctggcagaagccagagaagaagcatgtttcagattctgtttttagctatcaaggctgcctctgagataaaggctggtagttgggaaataagctgttaaattctccaactcacccaaccagatttaaaccaatacgattggtgtcatgtttattatatttaattttgcctcaaaaatacaccagctattttgtctgtttgttttcttttccatggaataagtcaccctccggcatcttcctgtgactaaagtgccctttctgcttctgagccattttctatacaaactacacagattccctttaattcccatttgatttggccgggcagcttgtctatgcaatctccacagatgaaagatgtgtggctacttagtagttgagagtctgccttttcagaagctggacctcttcacctctcgtagcttgtcagttccttttatgtccttctcatgttaaatactcctattgccaggtaagttttcaaggaactggtgccttatgctcacacaacagaaatactgtatttactaccaagacattttcataacatacagcttaatataaggaatggagtctttgagctgattctgacagttagaattagtatctactagttgcagagagaccctagaattatatgatactaaggtggggctaaggttggcccccaattgctgctaccatttgtccaaatgatttcttggggtaaataaacacttcttttttgggggggtgggaacagagattgaagagcagcagcaaagctctgtaaactctgcctagtgacccaacctacaggcaaactatttggcctcatttgtggtggttgccacaccttgtaaaaatacattaatttgtttgaaatgtcaaaatgcatttaagctaaactagcattaaaggtcacttgtgtagccgccagctggtggaatgtgcctatctcccaacaaccttccctgagaaataaccctgagcataaaggagctcttggtcaggatgtcaacctttgacagcattacgtcttcctctgctaattgaaaacttgccttgaagggagttgactctcaggtcaaccagtcccatgattggtttagagatccagctaattttgacctaagtagcaatttataaagcagcagaatcctatagggagaaattcatgtttaaaagcaatatctaaatataatcccttggttagactaaactggaaaatgtctaaattatgtataagcctaatcccatactgtatgctcaaaccaccatttgtatacttgggctccctccaacagtttgagtcctggttcccacccttattagtatgtaacccttggcaaatgaggtatattctacgagtctctggtttcctcatctgtaacaaaacaaggaggctagtgatagtatatctacttgtaaagttattgtgtggattaaatgagataatggtgtaagttgcttagcccagtgcctggcacatagtaagggatagcaagtggtattaatagtaataacagtttttatagtcatagacctttagagctaggaggaacctggcccagttaccattcaatgtagctccttttcaactgtgtttcccagacttcaattgtccctgtgccacctttatgagttttgcctcacccctacatcacctgcactattattgacttaatattttgctttaaattgacttctaaaatgtgaataggtgctgccccttcctttgaactgttatgtaatcaataacacatgaaattacaggcccagtcatctgagccattaatagaagtgactactgtttactgaatgcctgctgggtgtcaggtacttcatatggtttaccacttaatataaaaattacctgagaaaaactattaacatctccactctcagatatgtgcttttagcccctatgccatctgattcgtcattcccaagactggacatgtttcttcattcttgtctcaccaaatctggcctccccttatccccttttgaatcaacctaaaggtttctctctttggctgtgaaggtcaagactttttatgagttgagtgatttatctttttctttgtcatctattatctttcagttcaatgctttatgagttttgaccacgtgccaggcactatgttataaaggtaaacaaacagatttctgctcttgattagttcaaggcagatacagaaatagataatttaacataatgtggttaagtgtcatgagtgccatgatagatgtatgcccagaatgacatggaaacacaatggagggagtttggggcaagattcctagaagagaaatgtaaacttaattttgaaggatgaagcaaaggtattgagaaaaagcaaggcgggaagggtgatcttggcagagggaaaagaatgaacaaaagtacagaagcatgaaatcatatgagagtgaaggaactaactgctgtctgggatttcttaggcataaaataaggtaggtggtagtggtgaatgagttctaaatgtttgctaggactaggtccaggttcctccactgaggctctgttgtcaggtggtgccagtcctgtgcattgtaggatgttcagcagcatccctgacttttacacattaggtgccagtagcaccttacccccagttgtggcaactgaaaatacctccagacattgcaaaatgtcccttgaggggcaaaaatgtctcttgctgagaatcaccgcattaagtcatggagagtggtatatgctgatagctttagacttaaactgtgtgtgttgaggagtctccactttaaagtggagagctgacatgatcagattagtattttagaaagattacttaggctgcattttgggggacaggccggaaggagaccagactagatgcaggataaccaatttggaggacagccattcattggtacattcatcccttaatatatccttttatccaaccatctgacagatatctgggtcctgatccagatagacatagtccctgccttcatggaacttggagtctgggacactgcttctcatacttttttgatttactcatccatttgagaatctgatgaaagctatgtactctctccctagaaaaaggcttcaatgcactagaaggaagtagttaggacctcaggctcacgagttaagatttctggagttgaaaattccatctgtgtcatttgctatccctgtgaccttggcacgaatcagttaacctatctgagcttctgtttcctcatttacaaattgaatatagtaacactatcttttcaaaaattattattggaattagataggaaaaaatacatagaccatctagcacagtgcttggtacattaaaagagctttgtagaggctagctatttttgaaaattatggaacatgtgtgtatttgtgctggtccctgtctattgttctgttccttggctagttcataaactcttaagtttaatcatatagtcatgctttcaaggtttctcttgattctatgtcaccagtcatttcctccttgtttatctatgccattccttgagaatctttctaagctatatgtcctccaagaaatatttggctggtattgggatatattatctcatatatatctgtcagccaatttcatggctaatattttagcttattacttgaactccccactgttaattgtaatagtactcttggtacaattccagctacagaaaatgctaccttaattgatttcctttcttctgtcaataaatgtctatttatctcatgttaggtaccatgctaggcactaaggagccagcttcagtcaggatagactagattcctcccctcataatgtttatagtcttttgctgacttcatttccttcatcttccagtatgtacaaggggttgttagtggcatagagcagtagactatttctgttccagtttattcattttaagaagttaacatttatggaagtgctcaaaaacatatcatgactgttactatattttacaattgtcaccaagtgctaataatttcttttcccaaagttcaagtgtgctgaagaaaccagttgtttcccaaaaggtcctgcctccccatttcaaacatgacacttctaatctccctcttttactacactgggagccttgtggctcatttaaaaaatgactctgtttgattttgatctgtgagtcctcttcagtaggaatttccaggaagcgtatgattatctcttctgtagtatgccagccctggggaagatacagtgacaggactgagtgctctctgccaggtgttatgccagctccatgttagatttttccgcacttctaaaagctgacaactccagattgttagcatcactttttgtcagttttcaaatggtcttctcatttcttgacactgatactctctgagcttcttcaaatgtataaaagagggaaaaagccatctggagaaagtttggttttttgcacttggaaagcatgatgacacctttaagagtgatggcctttattgatcttgcttttaaaaagtggaaattattagaagatgaaatacaccaagattacatggccttgtcaacagggcaaattatttcccattatcttagatacacactcttgtgtctctctgcataatggctggagagtttgaagaacctctcaacctttggtcaaatgcattggcatggtctgtttccatggcttcccaattagagtaactgacacttaagttgcattgttcattgcaaatgaatagctaggatcaatctaatcaagagtaacaatttggctgatcttgagaattattctactgcagaggatatagattaaattgcatctctcccaatgttcctaaaacattttggaagtggggaaaacaaagcaaagcaaaaccaaaccaaacaaagcaaaacttccaaagtagtcctagtatatttcatcttctaataatttccactttttgcaagcaagatcaataagggccatcgctcttttaggtgtcatcatgttttctaactgtagaaaaccaagctttatctagatggattttctctcctatttataaatttgaagaagctcagacaatatcagggtcaaaacaaaatgttaaatttgtggttcctaaaattcctgtggcagagactgctggttctaggcctattcttatattcactctttcctcctgattacactcccagtttatttatttatttgtttgtttgtttgtttgtttgagacagagtcttgctctgtcgcccaggctggcgtgcagtggcatgatctcagctcactgcaacctctgcctcccaggttcaagcaattctactgcctaagcctcctgagtagctgggactacaggtatgcaccaccacaactagctatttttttatttttatttgtatttgtatttttagtagagatggggtttcgccatgttggccagactggtcttgaactcctgacctcaggtgatccacccacctcggcctcccaaagtgctaggattacaggcatgagccaccacacccagccaactctgtttttgaatctgagtacattgctgtttagaatacaagacattccagccttatttgcaattatctgtagtcaagtgaagttccaggcaataatatgtaagaggaagtgtggaagcacccacacttacaaatagatacttaaaaaggctgcttaaggagagctgacccaagtggaaggaagctcttcttgccctttcttccattctgcaatgtggatataccagtgagagttctagcagatgtcatggaccatgaggtggccttgaaaatggaatttatgtgttagagtggcaaggcaaaaatacagaaacctggaacccagatgacactgcggagctgccatctcagccctaaaccacacatctagcctggctgctctcttgcttacatcactgtcatgttagggttttctgttattcttggttgaatctaatcacggggaagacagtgctctgttaggctttggtcttgactggagttactcactacaacattacattcaaactggtctaacagatttctagttttacacctctggatgaatcacctatgattggaaaattaaattaaactaaattgaaataaattaagtctgaaagagactgatgcatgtagcaaagtccactagggcagtgttaaggggatgactaattgcttaaacctaatgattaacctcaagcattcttgaatacctagggctccatctttgggtacttcaagctcttccagctccatgactccttcatttagatccagtacttctctcttattctaaaatacttgtttgtcttcctatgttctctaccaagactatgagttttcgacggcaaagatgagaactcttttatttttgttttcctagtatctggcattaagctggcaaacgtttgttgaatgaaaatattagtgcttcattgacagtaatgtttttggtccatgaaagcatttaaaaaaattataacatgcaaataggctctaagaaaaactatttctcatcaacatgtttgtgtcagtaaatctgggtttccagagacccactgaggttagtgtaaattgccataaatacctcaattttaagaaatgcatttcccactgcctccatactttaacttttctgaagtgaagatgtatcttatagtcaatgtgtatgtttgatggtacatttctccccattacccaaagatatcgaattgatgttatgtcttatagtccatggtgtcttagaatttaggaaatatggtatttccattttggtctggggagtctgggaattcccaagtctctttcagaaagtctatgaggtcaaaactatttttcaaataatattatgtgcattttgtactttatcatgtgtgtacagtggggctttccagaggctacctcaggctagtgtatcttcagttttaaaaaaaatcacacttttattttctaataaggtaaatattcataggataaaaccaacaaaagaatagctcgttggggcccccaacaatttttagaaatgcaaatgggtcctgagaccaaaatgcttgagaatggttatcctagaggaaagaaacagtgaaagacaccactctattatataagggtttccttgaagctcattaagaaaaaagcatatattcctcctaagatagttcctggggccataagtcctgtccaaaagcatactgaaggagtggctgaaaatcttcacttcctctagagacccaatgcctgatgggtaccataaaagtttgttcttacaggctgcctcagaacaatcagcacgtacacactctctctgagtctgctgtgtaattgccactacctcatcttaataacaggcataattgctctgagtttccgtcgaccctttcttgcatctcctctctgaagcctcaattttggaaatggcacttgtgaatacacagaatgtttaaccacttccagttttcaatttacagtcaaagtcatctatcagcaggagatgaaggcccagtgtgaaaactacagaatgtccttcagactccacagctaatttgtttgtaaatttgattgttattgtaaggagaacatattgtacatgatgctacttacatgatgctacttgccgatttactgtttgtatctctgtttctcgggttttatcattacgctaaagaactgaaccctctcagcccttctgggggtgggaagaggaatatgaaaatgttactatgtttttttattttgagtctctattttaatttaattttacatgaattcattaaatatctactgtatatctagcactgtgggggatacacatacagaaggagaggcaatcagagtacacagttcaaggtaataagaaatcaaatttgaggctgcgtgatgagcccataaagtctgagataattcagagtaaggacaggacctctgctggtcttaacacagtaggaagtgagactcttgtcctcttgagatccaaggctttgcttgcataggagccagagacttataaagaagcccctgaaatcattctgcaatttgtttctgctgagaagttgcagaaacttgtctgttgcaggttgttaatattatagtattggcttgacaggacagaccaagcttccaattccctttggcacctaaagcaatttacaggccagaagtatgactgcacagcttttatgaaatggtctgatttcattgatcagccactctgagattatgttttcatttctgtagctactgctaacccttctttctgttataatatttcaggaagaaactattaaaaattttcaccatggagatgttaagctataagtgggctgggctctgaatgggaaggtaaacatcacaactcatgattgttctactcaaaagttcatttcaagttatactagaattccacagattgtctctctcatcttaactctgtaatgtttccaaatgatagggacactaataagagcagatggcctaatgaacatttagagggaagatttaactggtggtattttcattaggcctccagtgtgcttccgggttttgcccaccacttccctgtgtgtaatacaaaactgcactcactcaacagatggcccagctcaagcttcatgcttctagaactctggagatcggccacctgaccacttaccatgtgtacagaatcatttaaggaagcatgcgggctatagacttaagcctgaacaaaagcaaaaaatggtgatgaatagtgagtatctgagcttcaataaaaggggaggcaaaatcaccctcacgaatagcaaatctggctgaggtctcccaataacaggttcttacagattcagtaatgatgaaatcctctgtgacaaacagtccactctaattaatgtttcatctaaactgtaagcatatctgagtgactccagcagcaacaatgacatgaaaatctaacacctcattgcacagtgtgctagttattaagctactgtctcacagctcccaactcacccctttaaagatgctgctttgtgatgctggggttgggactcggcaatctacatttttcttttgccagctagatttctgataggtcctgacgatacagaaaataaagagattctgagaagctaaaggagggagaagggacttgatccttcctgcttgctttctgttcctgtcagtgtcatctcaacagtagcccttcatcctggaagcagtacctgactgcacttccagctcctctccctaccctgagaatcagtctcattatgctgcctcagaggcaccagaagcaaccagctggcatcttcttttttttttttttgagactgagtctcactctgtcgcccaggctggagtgcagtggcatgatcccagctcactgcaagctccgcttcccaggttcatgccattctcctgcctcagcctcctgagtagctgggactacaggcacccgccacctcgcccagctaattttttgtatttttagtagagatggggctagctggcatcttcttctcagaggactaggtcctacctccatggagcaaattctccaactttctaggttctgacaaccccaacctcttccctttgtttccccagtcggagagatggtggccacttcctacagatattatctctatctcttgtttttttctgaccctgtaacatctgtacatcacattctctatattaaatcctctctgttaaaataacgaatgtactttctgtttttctgactgcatcttttttttttttttttttttttgagactgagtcttgctctatcccccaggctggagtgcagtggcatgatttcggctcactgcaacctacgcctcctgggttcaagcaattcttgtgcctcagcctcccaagtagctggaattacaggcacccaccatgctcggctaattttttttttttttttttttttttttttgtagagacggggttttgccatgttggccaggttggtcttgaactcctgacctcaaatgatctgcccgccttggcctcccaaagtgctgggattacaggcatgagccactgcgcccagcctctgactgcatcttgactaacattcacaacattaacccacatacaaggatagaggaacagcaatacactattgtaggtcagtggtaacagaaaactagtaaaggtgaactggaagcagcaaggactattttggccccagagactttgctatgaaagtccagaaatccactgtgcttggatgttataaagttggttgtgaatgattttatccagagcttctctgactctggaaatgccatgtttatgtcattattctctagaaacttctcattcttgcaatttttgagaatgatttcatggtcgatcatgtgactctcccatgttattcggagacacaattctgtaccaaatggttcatgaagttgccccgtgacaacatttcctatgtgctcaattgttaacagtaatacattagatatttactattaaatttcttttatattcactcttgctagttttcttgtcagacattgcaattactccttcagaatcctcttctcattgatttggagttggaagtgtgttttgagatgcgccaaatgaacccctgctctttgttatgtatctcaagataaacacgtttcaacaggtgtagcctgttggtaacattttatatgtccccatgtttacttttccaaacacaccaacttttgcatgaaaagatggcactcttgctgacagccaaataactttctctttgagttgtatttccatttgataaagaggggttggcactgattcgtgcactttcccctctcataattaatagagagtgggagtaggtttaaaggtacagtgtagtctgaaatttagttaggccaactggcttgcattgggactcagcacaggatgttatccctagaacctgaagacactaaccactgaatttacttctagaactcctggcatcaggtgatctgcttgcctcggcctcccaaagtggtgggattacaggcttgagccactgtgcctggcctctgactgaatcttgactagtattcacaacatcaacccacatacaaggatagaggaacagcaatacactatcgtaggtcttctgtatcttagagagatacagaagtatcttagatatttctgtatcttagagagatacagaagtatcttagatatttctgtatcttagagagcttcaggttcacctcaggtcatggcacctgctgagcaaaatgtgtggaagactgagtggttcaaaagcaggtttgcaagccttgcatcttgtgacttgccctgaactttgaagatgcttttcctctggtgcttaatagttttaataagagctaacgtgccattgtcctttgtgtggaaagaggacactgctgagggagttttatttatgtgataaattatgtttttgatatagcattgagcacggtacttgacttttattttaaggcccctgacaactttggctatttgcttgtgtgcagacatttcagcagaatttggatatgctggagctgaggatgttggcctgctgttctctacttatataaacaacctgagctgtcactttggagggagcaatggaaatatctctgataacaggttattatattgtgattttacctaagagatgcaggcctgaaaaacagttaaaaaaaggtttaaataaatttggagaaaggatacaatatttaaatgaactctgcggatagtctcattgcattgtttctcccagtttatcattttgttaaatttggttttttttatatatataatagacttaagaaaactgatagatgtgttggaaacttgaatatcttgataaaaacagaagtcattagttagatgaaaaaattcatagaccaaacttgcttcaaaaatcctaggatgctgctttcttcttatgatatatcagcttctttccttttgacttcccacttagctgggagcctttttgttttgtcttgggaaagtcatattcttcatagtgacctagataaactctgtcttctttcttatgtactctaatatttatttttttgtgtgtgtgaaattgacccacctagaatggctgcaggccacccactgaatgagctgcttttttacttcttgatttcaaagagatagaggatgatctaacatcttacattcacagatgtataaaactcatactacattccagcctcagctccatagtcatcacaacagtatgtgaaagtagaaagaagatgaagtatttggggcaccattcaatgactatagtgaacattcattaagtgatctagacagagcttcacatcagcactagggagacaaaacattctgggaaggtcacagcaggttaagaccagtctctggaacatgtttgctacagcccatcacactcacctacagacagatatatgcctctctgtaaaaggtacacctatgtgaaaaggacagaaaggaagattatataatttctctatcagttctaaacttcttggtcccttttagttttgtaagctatcagttcaattctcttttgtgagcagaaggtcaaatactactactactactattactagtaatagtaataataataatgataaaataataatctattgaacgcttatgagccaaacactttgctaagtgatttatgcatattaccacattaaattctcacaacctccctatggggaaagtaacattatcacccccatttacagatacagaattttttcccaggggcacacacctagcaagtggtggatctaggatttaaacccaggcagtctgtattcccataccattaagctttactgactttatatattggtataattatgaagaacagtctaccctaaaggcctgattttgtctcttgcatcctctattaaaggattagagaaaggtttggctctcctttgccgttccagaaggtgtttttctgcatttgacagagccaggagactaggtctgggttgcataagcaataaataacattaagcaaaaatgcatttaaattagagactgacaactacagatattcaaaatcagaaaaaccaccttgcagacttacttggttcttgtgtcctcccattttagcaagtgtatgatgaatcaacagaaaatacttcatgaagatgccaattaacatcttacatcatctcttttatttgtaaagcccttcacacttttccaagtgctttcacattaaaaaagagaggccacttaatcaacaattgggtcatttatttaattagccttcataaggaggaataattaaccagctccaaaattctagtgtcagtttttacatctagtactgaatccaaaattatacagaaccttcatttgggtcaagaaatagaaaaaaatgatttaacatttttttctgtattaccatctttcagaggagagcagaataaatgatacagaacgaaatgttatttttctaaaatatagacccggtaactacaaatagtgtttatttagcattattatgtaattttcagccataaactctaatggatctctcatttacaggtgagtaataatgtggagagccactagggactctgaaaaaagcctttttaaatggcttttggtgctgttgtcaaatcagagtctaaacaactcttcctgccatctcatgctctgtgacagcataatttgattgctatgtagactgaagtttgtgccactttccttccacatgcctacctaactgacatggcaaacgtacacataaaagccaaggttacatgtaatgccatatggtctcttttttcacttctgatcggctccaacaatttatagttgcaagtgcctttcaaaaaagaaacttccttcatgtgtgttttctcatttaactgacatgacctccttaggagacattacatgtttttatcccactttttattggtggagaaactcaggctcagagatcttaattaacttgtctgaggtctcactgcaaataaatggcagaatatggactcacacccaggattgtctatactccttctactagaacactcttagtcaaaggaaaataggtgaattaggcaactgtccagagaagtttggtaaaacatgcctctgtactcctgaagaaatatgaataattgttccaggcttataaacatgtctggtagaaagtttgctcatttttattcagtagtcatcactttctgatttaaatactttcacatttaaggtaattgacatattgaggtctttgagaagagtgtggctaagttaacaatgccttcctgctatggttgatgtagattgagctccctctttatcttgtaggaactaacaagcactcccatttctgcacttataatataagcctttggatcagcgggaggaattggctgtgactcgtggtttgactgagtgcatgtggctcaaatgaatagaacaaaacattgctgatttaggatgcttatgtttggactcctgcaatagcccattgctgagcagttaaaattgctgctctattgttgtggtccaggcatgagaacggtgaaagaaaatgggaaaatacactggaggtttggttggtatggcttttaatgccatctaatctattagttgatagttactatgaaaatagttaattcaattggttaaactaaccatgaccaattaggatagagtaaatgtttggcataagggccaccaaatgacatttttcgttccattctactactccctgggcctcattaatttgctgtttgatcttctgtccactctctaatcttctcttatcctttcttcacctctctttttttcccacctatttgtgcctactgcacactggtattactgacccttgagaaatgtgttttcaaatatttcagatatatagctttcatcgtccctgtcttgctgtctacctgtaactcactctttccttctaccacatgcccttgtgtctgaattatctggagtgtggccagagaccttttctttgctttgacagtgagataagttccatagtcatggaaacattgagagggtgtggtggggtggaggtggtgagattttcatctttggtggcaagaacttttaaaataaactttcttttctttttcccctgggagatccctttattcaagcaaacttattataattcagattttcttgattccctacagagcttcacaaaactcacaagtctgtccctgcagggaatttcatttatagtggccttcatttgaaagatctaattctgttctctttcagtgtgcacatgggagactgatggaagtgcacaaagaaaagcaagtaatccatgaagaagttgagtttcaatatcatctgtatcagtatcactcaggatgatgaaggacattctgtagacatgaaagggttggcaagggagagagggaaagacaatgacagatgttaggcaagagtttaagaaggggaaaagaaggtgccttttctgttaaagaaaatttttttttgagacattgtttcactctgtcatccaggctggagtgcagtggcacaatcacagcccactgcagccttgtcccctgggttaaggtgatcctcccaacttagcctcccgtgtagctgggactacaggcatgcaccaccatgcccgactaatgtttgtattttttgtagagacgggggtttcgtcctgttgcccaggttggtcttgaactcctgaggctcaagtgatctgcccacctcagcctctgaaagtgttgggattacaggcataagccaccatgcctagccctcttctgctttaaaactactgtttttttttttcttttttttccacccagattgctgtaacttttcatgcctggatgactatgtgtgtgtgtgtgtgtgtgtgtgtgtgtgtgtgtgtgtgtgtgtgtgtgtgtgtgtgtgtgtatttaaaacaacagaaaatgctgaacccacttgtataaaattaaattgacatatagattttgaagaggaggctgcatattaccccttctacagagctgtgttattttatctgaagcttgcaaaaaaatctaaggacaagagaaagttgttttttcagttatgtagagagcagaagacaaccaaggaaggcagaggtctgctgcttggggcaggtggtatagtactgatggatgagagagaggggaaggttttgttttctctgttaaggagaatgacgacagagaatattgattcagagttaccaaagccaaaaatggatgaagggattgtaaaagagcatctaaattctttaactgagttcaagttttctagctaggaagaatcactccttatagagaacatgcaaatggggtttagaacttttttgtgtaattattgagaaatagtgggcaccagaagattagagatggttaaatatagttctgacttcaagaagaatcagaaatgtgccccacaacctgcatggagggagctttatgttgatttggaaaagatcttcaattgtattatgaaacagttgtttttttagctcttagatgaggaaatgatgtttacagacactgtgactagaaacaaattttttcaagtggttcttatttccttttaaacagagttaccaacctggtaaggtttctcatgacacctttacagataagttgggggaaatatcagtgaagagagtggctttcaaacttgttttgactgtgacactcactaaaaactgtattttacaccattatccagttgaaataaaaatattatgaaacactactcaccctcattacacatgatacaccttgatttttaaaattgtgtttcacctttttaaaaagctggtcataggccattatattgatttcccaatgtattatgaagaatcacaatgagtaggtgagagttcaaacacatgggttcataatctaacagataactagtctattggtgccacaattgcacctacctatccatcaattttataatggatgaaggcatagaaggcattcatcagatacataggcgacacaaggctgggaaggatagtgaaaatattagatgatatcagaagagtataaagaattggactaactcaaacaacatggaattgaatagagactaaggcaggacccagcagtatgttgtaaatcactaatggtgcaagtgtaagatgaggagatgggaatgagagacacgtgaatttttagttttctgtaattacatcacatcatatgtcaaatgtgtgatacagctgtgaaaaaatcccggtcaactttagctgtggttctttaatctgtgccctttatttctttagcattttgcaaaagtgcctttgaggtcaccatgcaagctaccatcacacggaagtaagcttgaataaagaaggttctgggacaccacctcttgtttgaatctgctgtttgcatctattttataaattgagactgatttgtttgaagtaaatgttctgtggctaaagttttttttttttaaacaatcaatgggcaaaaggaaaagaaacaatatagaaagggagttgtgacagttcccattctacctctgagtactcagagcacatctggattattttattcattctggaagccatggtggcttccattctggaagaatggtgaaggaactcaaaaccatgtaaaatgaagtatagttaaatgaagtgggaatgtgacttaagaggcatgaaagagttgttttcttgtactaagagggctgtcacgtggaggaggcagtttaatgtaatttggtgaaaataatgtgggctttggcgtcaggttgaccaggttcaaattccaactcagccacttattggttgtgcggccttaaccaagttactcaattcctctgaatcttgtttttcatatgtattaaaaacaggggaacataatacctatcttgaaggattgtcatgaggattaaataagataacatatataaacgtacccagtattgtgcttgattcactagtagattgatctcatagaatatagattaaatttataattcaagaaagcctgaacagttgcagtaagactggatggtgaaagttaaaggaagacaaaaagtcaaagggatccaagaagagcttgtcatcagtcagaggtattcaaagatggaatgtgctgcctgggggaggtagtactaattccctaacacaggaagcatttgaaaataggttggattgttactacatggtcagaatattctggagaggagtcaagcatcaaataactgagaagagtaagattcctagtggactagttcaatagatgtaatatatgaggacaaagtttgctcctccaaagaatgttaccttccttcctgcacaactatggatgatgcttcccctacccgtgttagacccatctgacaaatgggtgctgttggaaaccagtgggaaacacacaaatcatccaataagcacttatgaagccctggctgtgtatctggatgctctagacaaacacctcaaagtgtgtaccttatgggcagtaggtcaacaggatttcctatgcatgcaaaaggtccatcttgcttgtgtatctcctattgggctgactttgggaaaagcattaggctggctccaaggagtaacttgctatcccatcaagaaacttgctctaactcccaattccattctagtcaggcatcagatggaagtgagttaccagagcaggatgattcaaaagcagcaacagaaataaagcacccagtgtcttgataatcaactcatctcctgaagtgaaaggcctggttgcttatagcagtgcttacaaagggcagttatgcttcagagtttatactgagagttcagtttcagatttcagtaaatcaaaaaaagatattgattttgaacaaatggatgattttattgtcaaagcaaatttcatttcttgagatgattagattttattaaactctttcctaactgccactaaacacacattctgtgaataaacagcatattcttcaaccaagcggcatttgtcactcagctaaatacaatgctatttggccatctccagaggttggaaaaatgcacacttgggttcagaaagcttgtgccaaaatcttagttatatcactcaataactctatggtcatagcacaatatataatccctccgactaacagttttctcctctggcagatggggataataatatctacctctcaagggtggttgcattgtgtagacaaaatagaatagtgtaaattagattcttagcatagttcctggtacatagtgagctctctataagtggtagcagttattcttagacttactataggacttaatgatctgctaaagattaggacaagccctgagaactgattcttctttgggcttaggtttgccacagaaaagtacagaagatgaaggcaagtaagatgaagaggaccattctctcatatcactttctaacctccataggtactatgctagtatacatgggcctttctttgttggagatcttttggttttgaaatgctggaatgctggaaaggtaacaagaaactttagaaatttggttgtatttctgtggagacacctttgtggagttggaaggaaccttgagaaaacagttggtccattttcctggctccagagaggcctgtatgtcaagcattcatagattattgctatccaatatttgcttgaaaagtttcaaaaggtgggaactccacaaaaaatttttaaaaatatatgatgctgccatgtagtgttagaaacagtaagcttttcttaaggtctgattcaaatcttcatgttgcagcataggcctctattttctctcctgtccattcctgtcagcagaaacaatgcactctcatttagacatttgtctgtgccctcacccgtcaatatattttgatttactgaaatatgaaactcagcactgtgtaagctcagctggatcactgtaagtactactataaacaactggggctttgctcttggtgggtgttatgaagctccctgctcagctttcttctctctagctgaagatggcccatgttcttaagtacagtcatgggaaacatcggttgccaatctgtcacagttgtctaaacagatgggaagctctggtcataatggctgagcatctaggaagctgtgccacacacaggctttctcctggtaaactctctatcaactgacccatcaatttcattcggtgttctccagctttagtccacctgtgccacatctgggtgctgatctgcccacacctgagagctgatttgcttcaatgccaaagcctcttcttcccagccaaacatctcaaagaagtgatctattttccgtttctccatttcctcacttcctactctgccgctggtatctgactctcattaattagcactctatcaaaggtactcttatcagaggcgttaatgctgtgaaatctaatggcttctttaaaaagcacctcattttttatgatccctaagcagcatttgatactgaccattcccttcctcttgaaaaacttgcgtctcttggcttttttgacaccttcatggttttccacctaattgccaggtctccttctctcagcctcctttgtgggttctcattcctccgttttttcttgaatactggtgttccatagagtttggtcttgagccttctcctcttttttatgctgtgtaccctccgtgagagagctcatccactcccctatttaccattgccatgtgtaaactaatagcaatcacaactctaatctgtagttagacctcaagctttaaacctgtatccaatttcctgccagatatctttatctggatgccacacaggcacctcaacgtaccccaaactgaacccatcatccaaccatcaagcaaacctgcttctcttcctcttgtattccctgtaccagtgaatggtactaccatacacatgttccctcaattctgaaattgtcagtcaacaagttatttgatattggctccaatgtttaatgaatctatctacctttctatgagattttaggttcagccattaaaattgcttgcctatgtagcctgcataaagctgagcagtgtcatggaaagtctcatccagagttgtatcccaaagaaatatcagctgaacatcccaaaagcattggaaaacagcttaatttttatagcagtcccttggaaaggggctgatcatatctacattgatatgttttttccttgtcatacctggatttcttcaactgtctcttaagtggtctccctgcctctagtgttattttgcttcacttggttctccatgcaacagctagaatgatctctgaaaactgatttccatgcttaataccattttaaaaatgcatttcccttcttaacgctgttattatctcttcattgttcagtataacttcattatgcttataaggaaggcccttcaccatttcaccctcacttacctttctagcttcatctctcactactctttcatattctttttaccattatgtccttttggttcaggtatagatgttaactgtacctgctgagcccttcctatgcatgttccaggaacacacagtctactgtgggagacgggttggatacacagtttgccaacaaagatcaaattacatttaagcatggtgatactaaattccagtaagggattgaagcaacagtgaggactagaaccatcaaggaaggttcccatggaagaggtgaggtgtgaggaggatggagaatgggatttggaccagcagaggtacttccagactggggaaatggggccatgagaagtaggcctttaataaaggtagagggtgataatctggacactaatcaatacagtctccttgttttgagccagtctgggtggacaaattggatttactctttagtgtgtctcaggcacagaacaggaaatggtggatagcagcagagttactggccaaataatctggacataaaacctgctttctttcctggtaaatcctgctggcttctgccatccccttctcataccacacaacctcccctgcctccaaaaaaatctactgtatctctaaagctaaagttgtgtacagaaaggggaaagagggtacttcagagaaactgaggcttggaatgaaatgccatagagaaaagtttctgtctcctggttaccagggcttcttttcagtgggctgcattgtatttcccaacctgaaaaggatgaggtagattttatggtgggaattatgtttggaaagtgtcatgtgaaaaagaacccttctcatggtgatgatgatcatatgtttgctctactaagacaaataattctcttttcaacataacttttctacacagaaacagaaaagttgtttagagttgactgattgcaatactaaatgccctattttaagttaaaaatatcccacaagtgaatcatacatgtgcatcttctctgtccctcctcctccatacaaatacattcacacccttctttattgccataaataatgctccttttccttgccttctgcagcattttgaatcatggaaagttagactattctaggacttgatagcctgacccattcaagtctctattaaaaaagggtttgttcattttgtcagttttccaggcccaactccccatttcacttttgtagttgactatatatgaacatttcttgagtttctggggcagggcaggggcacatagagaagcagaaattcaaaacaggccagtgttttatagagttgtatgctcaaggtgggtggaggtggcaggagatcttagagtcaatgactaaagcaaggtttcttaggggtgtgttccttttacttactaatatggttttgctgtgtccccacccaaatctcatcttgaattgtaactcctacaattcccacaggtcgtgggagaaacctggtgggaggtgattgaattatgggggcgggtctttcctgagctgttctcgtgatagtgcatgagtctcacgagatctgatggttttaaaaatgggagttttccctggctaacacagtgaaaccccgtctctactaaaaatacaaaaaaattagccgggcgtgatggcgggtgcctgtagtcccagctactcgggaggctgaggcaggagaatggcgtgaacccgggaggcggagcttgcagtgagccgagattgcgccactgcactcccgcctgggccacagagcgagactccgtctcaaaaaaaaaaaaaaaaaatgggagtttccctgcacaagctctctgtttggctgctgccatccatgtaagacatgacttgcccctccttgccttctaccatgattgtgaggcctcccccaccatggagaactgtaagtccaataaacctctttcttttgtaagttgcacagtcttgggtatgtctttatcagcagcgtaaaaatggactaatatatttaccttgtttttctaggttttaggtggtatgacaaatgaagcaacaggaatatcataactgtggggtacactgctcattgcctccccagtagcaaccctttactccttgctaacagaactctgattttggtttaagaatcaggtagcaatgtgctcagggaaggggacccacttctaaagggtctgaattcactatggaatctcatttcccctttgccagtgactggtgaaggcatgggcatgtgactcaattctggccaatgtgacacaagaaggaaatttgctggcatctttgcctatctttggacaactcgttatgtgagataattaaactttattgtttaaacaacttttagacaagtattttattacttgcagacaagaccatcctctgtgatacactaatcaatttgaaaactctcaacatccactttagtgtttttgaaaagattatttaataatctactttattagggtcacaaatttatggaatgttagagctggaaggtttgaggactgtctaatctatttccttcatttcttgtttctgcagactaaaaaagtcagacactgaatgttgggactatgctgtatgctctataatctctttaaatgtctaatactgattttgtagaattgtggtaaaatcagaattttggacccagatgagagctacactgaattttcttttatcctcactggcctaaaaaaaaaaccaaaaaaacacagatttcctaaataacagtaaaatagatctcagaggggatgttgcttttacttaagaaaacttccaaacaccctagaaatagctatttatatacatgtgaataacaacatgctcatatattcattaaaaaagatgtctaaagagacttcgtagtcactatttttctaaatttcagtcactgtttcatttgactttcttcacagaattggataaaactactttaaagttcaaatggaaccaaaaaagagcccgcattgtcaagtcaatcctaagccaaaagaacaaagctggaggcatcacgctacctgacttcaaactatactacaaggcttcagtaaccaaaacagcatggtactggtactgaaacagagatatagaccaatggaacagaacagagccctcagaaataataccacacatctatagctatctgatctttgacaaacctgacaaaaacaagaaatggggaaaggattccctatttaataaatggtgctgggaaaactggctagccatatggagaaagctgaaactggatcccttccttacaccttatacaaaaattaattcaagatggattaaagacttaaatgttagacctaaatccataaaaaccctacaagaaaacctaggcaataccattcaggacataggcatgggcaaggacttcatgtctaaaacacaaaaagcaatggcaacaaaagccaaaattgacaaatgggatctaattaaactaaagagcttctgcacagcaaaagaaactaccatcagagtgaacaggcaacctacaaaatgggagaaaatttttgctatctactcatctgacaaagggctaatatccagaatctacaaagaactcaaacaaatttacaagaaaaaacaaacaacccatcaacaagtgggcaaaggatatgaacagacacttctcaaaagaggacatttatgcagccaacagtcacatgaaaaaatgctcatcatcactggccatcagagaaatgcaaatcaaaatcacaatgagataccatctcacaccagttagaatggcgatcattacaaagtcaggacacaacaggtgctggagaggatgtggagaaataggaacacttttacaccgttggtgggactgtcaactggttcaaccagtgtggaagtcagtgtggtgattcctcagggatctagaactagaaatacgatttgacccagccatcccattactgggtatatacccaaagattataaatcatgctgctataaagacacatgcacacgtatgtttattgtggcactattcacaatagcaaagacctggaaccaacccaaatgtccaacaatgatagactggattaagaaaatgtggcacatatacaccatggaatactatgcagccataaaaatgagttcataccctttgtagggacatggatgaagctggaaaccatcattctcagcaaactatcgcaaggacaaaaaaccaaacatcgcatgttctcactcataggtgggaactgaacaatgagaacacttggacacaggaagggggacatcactcaccctgttgtggggtggggggaggggggagggataactttaggagatatacctaatgtaaatgacaagttaatgggtgcagcacaccaacatggcacatgtatacatatgtaactaacctgcacattgtgcacatgtaccctagaacttaaagtataataaaaaaaataataatagaattacttatcttggaaatattcaataaatgagattggccttaccctctgattaattcaagcttgagagactttacttaattgtatgtcaatattctacctgacattacttccatcctcgcttaccattttctcccaactaagcttttctaacgaggaaaaaagtaacttacataaagagaaacttctgctatctggtgttataacagatatgccaggcttccattctacctcatttctacatgagaaaattgttatccatttccatgatgccaaatgacaataatacttgaaaaccagtgatgcctacctgagtgatgtccattcctgagtcacagctcagtggttgtgtggaagtcagaccatttgagccgattacagttgtgatcacagcattctcatcaattttgcgaatcatagtcccatccacaaagtaaataaatccatgcctatcaactgtgatgcctgttgggaaagagcaaatgagcattagtagtctagtgaaccacatttgcactaagctctgtattttgaaaaaagccatagcaatggaaaggcattttaaagacatatagattcaattttgctcagcacagacaggacagtaatgggagaggtttgttggggcatacattcacttctttgtgtattgagaagaaatgacaaaaagtcacacgcggagataaagccaggtctaataattttgtccagttttacatttccacccccttgatacttgcttgcccccacaaacaataaaaaatcatctttaagataaatgggaaaagacggggagatcatgtatattacatttttttttagggtgctaatgcacaggctgctgcttattttcacgattgcattaggaaataactgacttgaaaagcattataattattttcatcaattcagactttgttaaaagggagtttgtaataactttgatgaaccgggctgagtttttttctccatattatctattaaaaggggagttggcgagcaaaattatagtatcacaaagggaatggctaagtttctagaaaagataaaagccgataaaattttcacagcagtttttacacacagtgttaattacagcctggtttcttaaaatttttattataatagcagttagaaggcttgggttctaatactgaataccccacttacaactaatgtgtgactctgattgagtcattcatttgcaaatttcagactcctctttggtaacatagggacaggatcgtctgccttacttagctaaagtgatctactgctctggtttggctgtaactgaggcagagctcagttttaaaactaggaccatccttgacaaaccaggatgagctggttactctatatctaggtatatctaggtgttttttttttttgtttttgagggagttttgctcttgttgtccaggctgggtacaatggtgcaatcttggctcactgcaacctccgcctcctgggttcaagtgattatcctgcttcagcctcccaaatagctaggattataggagcctgccagcacgcctggctagttttttgtatttttagtagagacagggtttcaccatgttggccaggctggtctcgaactgacctcaggtgatccacctgcctcggcctcccaaagtggtgggattacaggcgtgagatatcgggcctggccctaggtcgttatatcatatgaagtaatacatataaaaagtatcagatacactttaagaacatatggctctactcctatttcccttggtgcttttgacagtgctcttgaaaataaccacatggcatttttcaaactagtctacaatttagtcttttccccacttccctttatttaggtctggtgaaactcattgaatggatgttaaagtcagaatttctgtgctaacaagcgtgtccttttagcacaacacaacacacaaacacacacacacatgaattttctggcaaaatgtgaactcatctagagtcattttataaactcaacttaataaactgcttttagatgaactaattcattggcaggaagttaatattaagacttggctttatggtatactttgattaatcctgatgtttgattaatccttaacatctataaaagttacaaattcattttaatgtcccctgaatacttctaaagtcatctatgttttggtgagttctccaaggaaaccagcatgtccaaacaagggaattccatgtccataaatccctttataatttttagaggtataaggacccttaaggtggtttataaaaagacttttaagactggggcaagttaaatgatgatggcgtatgaacaattattttaatctccagaacattttggatgaggatgaaccaagggggaacttctgcctgttatttttgtgttttgcaacatcaatttcttgattgcttaaaatttggtgtggtttgtggcagacctattatttagaaccaccttctatgaccactatattaaatatcgctgagtataaaatttcaaatttggctgtcataaagggatagactgaaagatcaagactcaagactcaagtctggggatggaaagactgaaaggagatgtgctcgacatgtacgaaatcatgaatcatttactaaacactatgattactaaatcgtagtgaatgtcaccatgctaggctctgtgagggtataaggataaagaatctggttacactgaaactaagactaagaggaatactctggaactttagtaaattaaggatattaaaaataaaatgaagtgttgctcttatgaggaggtagtaaacttagaggatctgatcctctaaaaatttgagcaggttcacaaaaggtacagagaaataaatgtattcttaactagtatacatgggaaggtctttacatgtctttgctgatatcagggaggacaattcttttccttgactaccacacttctcatcccatcagagtgcaaagtttaggctgatccagggaggataatctgggactttacatagttttcttacttttactttttgtgaagatctaaacactgtgaacttctttgtctctgttcatgtcagctgagttccacagacgagtgccctttgaaataagtctgggcttattaaatactcactagttgccttcagggcttgttctgctgacagtttgtagaatattttcctttcatatatttgtgtagcaacttcttttatcatggtccaaattccaaacatacttctttttccttgagaagctttaattaactttgattgggttacacttatgtttggagttgaaaaagaaacagtagaaaaggctttgaggaaactatgtgataggtgcttcataaatgtaccgagcatattttatatgtacatattttcctctcatttgccttcccttaccaaccaatcaaccaaccaacacataaattccccaaacaacaattttgcaacctctttgctggtgaagcttaaggggtatttaattttcactgagggtaaaaatcaaattggaaaccccaggcatgaaaaagagaataatatttgtccatcatttggggaggtttcccctcccataatgcttattgttataacccagggatagtgatgatgctgtagatatattactgcttgtcagaatgagtgaaaggaggtgacacattcccagtatatattttaagctttattctttggagatgggcatgtgagtgatttcagatcacataaagccatctggggctagcaagatctgcagattcaatttactttccaattttgatattgctgtgcccagatctccaaaacttggtaaccaatgttgtgggcaaaatttgttccaacggtcatgttcattgatgtgttcactgacagcattttcattagcacttaaacaatcaaaggtacagtctctggatgagaaaagatttaaagatttaaactgtactaagaaaaccacttccaggtttaaaaattttcaaccggaattcatttttgttttcaaagcaagtaaaaatacagagatctctgatattaccacaaggttaggccgtgatgcaaggcaggtggaggtggaagtgggaagaaaacacacaatagcttgagtcccctcaatttaactttgaatttaaaaatccccctgcaccaaggaaaacactggcctcagatgcccagacagcatgtttagcttggagcacatttttacatttgggagaaaataaataaatccttgtaaattagtgcatataatgaaagcactgacagaccataacctggaagtgtgaatggtgctgtctccattcatcagcattaagccctaacaagctctttctatggagagacctgctcataaataaagtgcatcttgtaaaaaaattattcacaacatcccatgcaaagtaggggatattatataatatctgaactgcaggctcttttctctgtgaagcagtgctctgtatgaaacagctgcaaattataggcaaaattatttgacttcttcccttgtcttattatcctccaatgaataaatactttaattctttagatgacaattgcctaaagctggggcagcctggatagttacttataaatttatcacctgtgaggggaaaagatgctactgatcaatactgaaggaacaggggcatcctgatgtaatcactgagagtccagatgtggtgcttaatagcctggaaatagtagctaaatcccaaattagataacagtgaagatttgagtttttggctgtgtagaatgccaatttcaaatgttggcagaaggcatctctgtacttaattttttaaaattacagctgttgaggccacctacatttttattatttctatataaaaaatgaaacatctttcagaatataagctttggaaagcagtcataacattctcttcatctatagccctagcaacaagaaaactgaaatactggatgtttttctgccacaatctgctgtttaattttatcagacaaagataaatggttaaatcaacttccagggaaattcctaagcctaatatggtgtcagctcaatctccaatactgagagtgctgaattgtgtaactgattcaaaaatgttcttttagtcaaggagaatttttctttgttcatgtgcattccaattctctgaaaattggtactatatgtgtggtatatatggaaactctactaggcagaaaagtccattcttcaacccatctgactactgtccacttaattaccctctgggatcagaaaggcccaagttacttatgcataataagcctgttaagttttctcactatgtagccactaaatggagcttctagaacttggagggtttacagatttctgtgtgtcactagaggttggaaggaggcagagcttaatgacaagctgagatgatttcactgtgtggttaacagtggcatcaggatttctccagtaaggagacactaataaactcactgtaatattatatgactagtgaatagtgagttatttaatcagatattttgtttaataaaatgttctagtatattctacatagtaaaggtcaatttccaaagaacataaacacaaattaaaaatgataagctttcaaactaatattctgctgactggaatgtcttattttgattactcaaaaggcacttcaaagggcttcatagtcattataaagaacaataaatttgtgggctagttaaccaagaattctgattgagagaaagacagacgacaccagtgtttagcatttgtcttgtcttcagctccttgtgatcctctcaaaactttagacttcagctttgccataaggcaaagtgaatggacagcccttttaaatccaccaaccactatttttcttaaagcttactgagaaaaatgtttttctgtttactcattaacttattcaagatttattctgcaccctctgcgtgtgagcactgtcctaggcaatgagagtacaggagactataaaacagacatggcgttgctcttagaaagcctggaaactggtagagggagacagagaaataaccaggcaattgcaatgccattagataagcactagtttggggcaagtccaaggtgccatgggagcatccttgggggatgggccggggaaatgaaagtcacaagtgatttctcagacttaagtgataggtaagctgaaatctgaagaaccatgttgaattctagatgagcctagtatgtatgaaatccaggtaaacaccactgaaaatctatgaaagatgactaatattactaaacaataatcatttccatttgccgagaacactatgatattccaggtactgtgctggattccttacatagattttctcattcaatcctcccaacagccttgtggagtaggtactaatgtaattttttagatgaggaaatggaagtgcagagaggtagagtgactaactctaggttacatacctagaaagtgctagtttaaagcgatggggaaaggactccctattcagtaaatggtgctacaataactggctagccatatgcagaagactggaactggaccccttcgttataccatatacaaaaattaactcaagatggattaaagacttaaaagtaaaacccaaaactataaaaaccctggaagaaaacctaggcaataccattccagacataggcatgggcaaagatttcataatgaagacaccgaaagcaatgacaacaaaagcaaaaattgacaaatgaacttctgtacagcaaaagaaattatcaacagagtacacaggcaacctacagaatgggagaaaatttttgcaaagtatgaatctgacaaaggtctaatatccagcatctataaggaacttaaacaaatttacaagaaaagaaaaaaacaaacaaccccattaataagtgggcaaaggacatgaacaaacacttctcaaaagaagacatacatgtggccaacaagcatatgaaaaaaagctcaacattactcatcattagagaaatgcaaatcaaaaccacaatgagataccatttcacacaagtcagattggctattattaaaagtcaaaaaataacagatgctggcaaggttgtggagtaaaaggaatgcttatacactgttggtaggagtgtaaattagttcaaccattgtggaagacagtgtggtgattccttaaagacctaaagacagaaataccattggacccagcagtccccttactgggtatatactcaaaggaatataaatcattctattataaagacacatgcacgtgtatgttcattgcagcactgttcacagtagcaaagacatggaatcaacctaaatgcccatcactgatagactgtataaagaaaatgtggtacatatacaccatggaatactatgaatccataaaaaggaatgagatcatgtcctctgtagggacatggataaagctggaggtcattatccttagcaaactaatacaggaacagaaaaccaaataccacatgttctcacttataagtgggatctaaatgatgggaacacatagacacatagaggggaacaacacacactggggcctatcggatagtggagggtgggaggagggagaggatcagaaaaaacaactaatggatactaagcttaatacctgggtgatgaaataatctgcacaacaaacccctatgacatatgtttacctacgtaataaacctgtacatgtacccctgaacttaaagtagaagttgaaaaaaaaaaaaaagaaaatgctagtttaacacaagtttgtctgagtttaatgcccattctcttaaccactatgccatgtagcttaaatgaggttatcaattgctttaccacagggatggggtacagactggcttaagaaggttcagaaactccatgaaattatccacaaaatgttttgtgtatgggtattatcatggggagagagcccattggctttgttagattgtcaaaaggatctctgacccgtcccaaaaattgttaagaattcttgtattcctatagatctcttagacttcttcagaattattcttcaaaggtattctgtggcttcatcttcacagagctgatgagtttcaagaaagtactcaagaccttccatgtggtggggagttcagtaactttactattatcatagaattaccacctaaaaaggagaccccacgcagtgggatatcaactcacctaggtcaaaatagcttttattaaaaaagatagggaataatgaatgctggtgaggatgtggagaaaggggaatcctcatatattgttggtggaaatgtaaattaggatagccactacaaaaaatggaatgaaggtccctcaaaaaactaaaaatagaactatcatatgatctagcaattccactactactactgggtatatatagaaaataacggaaatcagtatatcaaagggatatctgcactcccgtgtttattgcagcactattcacaacagccaaaatatggaatcaactaagtacccatcaataggtgaatggataaagaaaatgtggcacatatacacaataggatattattcagccataaaaagaaggaaattttatcatttgcagcaacatggatggaactagaggttattatgttgagtgaaataagtcaagcacagaaacacaaatatcacatgttctcactgatacgtgggagctaaaaaagagagtagattagtcgttaccggaggctgggaagggtaagggaggatgaagagaggtatatttatacccattaatcaatgatagaagaaataagaactagggtttgataaatcagtagagtgatgtaggttacaataatccattgtatatttcaaaataactagaagagaataatttgaatgtttctagcataaagaaaagacaactatttaaggtgatgaatatcctaattatactgatttgatctttacaaattatacaaatgtatgaaattatcacacatagctcccaaatatatatatctatatgtatcaattaaaattaataaggtcgtttcattttcagtatgacagagacaatgctatgtgttcatgtcatcccgtttctctttctttctgagaacagagttagattacgtttctcagcctcctttccaagttaggtgtgggcagaagtaatggatgcgacttctaggcctgatccttaaggaactatctactgagtttctgtatggattactaccttccactgtaggctggctgcatgcagaccatccagtagaggactccaaggcctaaggcattgaggaatcactagatggaagaaggctggttccttgaatcactgcttggagcagagattcttccactccccaggcaacccacattaaattgtgatgtaagaatgaaataagttactatttttgttaagctattgagatactgtgtgtgtgtgtggggggggtgggggtgggggggagggtgtgtgtgtttaatatggttgttagcttggcccgagtattaacattcagcaacccaaatcctattcaccttttaaggcttttataggaagtttccctttcatgaatccttccctgcaaactccagttcattgtggtctgttttctaacccacagaagctgttacttatttatttatttgttaatgtgaattctccaatcatgatccatgtaggtaataagctccctgaggacaggaactggattttagaattagtttttatatctcaaataattcagtacacttgggcacaaatgttcaataaaccttcctgatttacaggactaaatttccatgcatttatactgaaacatatctaccttgaacaaaataaagcatgccaggaggccaagaactgcatatgaatttcactagaaatgagcttagaaaggatgcagtgacaatgtctttctctaaagtcctttaagaggaatacagtcccctatcaattagtgatgattggaatatgggaaaagtggggttgacaaccaagagcaaacagacaaaggaccatggatcaaattaactgcaaacaaatgtgatccatgtggatagctacaatgaatagctcatgacaccgctccccccaccacacacacaaatccagttgttctgtcaatataactttgtttgcgatcttgtgatctcttccgaccttaccatgttaggagttctgaagaaacagaagtgcctcaggattttttttcaggctgatttttcttacagaatagctgtagaactttggataatgcatttgaccgctcagtgtcttgatttcttaacttatatactacctactacacaaggtaacatggtgtgaagctcacaagagccaatgaaatgaaaggactttgaagaagataaagtattatggtggtgctaagtggtatcttaattgcctagttattgctataattctttctgacagtgacttttctaagcctagaatcatagtcaaaaatttccacacaggccctgcttgaacactttaggcttttctgtgttctgtaaataagatttaagtccatggagcattatgtaacccttgtcagtaggagagcaccctatgttagattcaccatagagacaattcagtagttgaaaacagttttgttagctcaggggaaatactacactattaaattattggtgtaaaagccttcaagcttttataagatggttaaagtttccgtacacagaatcaaataaatgaggttccatgccgtgcaactcgctaaggaagacccttggccaaggtggtggtaatgtctcaacatttaacagtgaaaccagacactgataataatgtgatttatttttctttgctttatagaggttggggtgtgtgtgtgtgtgtgtgtgtgtgtgtgtgtgtgtgtgtggagagagagagagagagattggggtaagtagatggtgctagttcaagttgaaatgcacatgtcttgttttatttttgtgttagagttcccactcaaaagatgcctgcaggctgagatttaagggttctcagtatatatgggctaagataaatgaggtttactaaatctgagctgcatattttatatctccccctttagaaattcctcaaacatcaagcaacgatatctgagacactactcagatacatttgaaagaactgtcgctgtcatcctaaggaaggcaactgccacacaagaacgttagtgaacaattagccctaggaaggaaagttcgtttattgcccatggaccagcaaaaaactaattgcagttgttgcactctagggaaaatgagtctatctcaaggtatgtgaatgaccaagaggttctaatataaaaagcaaactaagtataccttgtcccaaatactcaataaaagcaggatatgaggaattaagccaatagtgctcactattcacaaaagtggggtaactcaagaggaattaaaatttctttaggataatgatttgcatgtagtgcccattcaaaaacaacacagagggcccatttaaaattctccctgcatccgtatgtcttgactaatgaagctagtgctagaagagaagttcacaaagtcaggagtggtagacagtcatttgcaaaaggtaaggcagggtaatgagcactgcgtgaatacacattttaaaccttttaagtggaggttcaagagacgtttgggagaactgatttgggctcaatcaagaatatatgaatataacaacagcatacacacacagacacaggcacaaatatgacagcggaacaaaaagcgaaaaatagtcaaagcagttgtttaatgagataaacaacttcttttactgtttttacctttccacactctgacctacaagtgtgacaatctgtgggcacaagaacgcgacattgagaggcatttaaaatgctgggatgttttgttcaaagggggctggtgacttccttatccttgtcttgattgagattggagtttccaaggccatttccctgtctattttcctctaaactcaaatatccagacaagttcatcagagctatgagaggtggagtaaagagtctgggctagaagccagaagatccagttgtgagactgactgtgactttaacaaatttaaatagtctcccagtcctcaggttttgcctttgtctaatagtgagtagaaaagctgagctgctcatgtcagtggatgactgtaaagaccatataaaataacttctatgtgtgaaatctttctgaaagctcaacacaagtgatgttagtatttatttatgttttggttttattacttatttatagagacagggtgttgctctgtcgcccaggctggagtgcagtggcatgatcacaactcactgcagcctcgaactcctgggctcccgacatcattccccctcggcctctctaatagctgggaccacaggtgcataacaccacacctggcaaattaaaacaatttttttgtagatatgggggtctcactatgttgaccaggctggtcttgaactcctgggctcaagtgatcctcctatcttgacctcccaaatctttgggattacaggcctgagccaccgtgccccatcttagttatgccttattccttgatctcttatttcttttggagttcacttaacccatcaggaatagaggttagaatctagttcctagttcttttttacctttgtgtcccatcctttttcagattccttcctttttctccacttcttccctgttctcattttccccctttttttttctctccaaaccccaaccagctctccagtctgcgaatccccgtggtatttaaagttgatgcatgcaacctaattctgtattttagtcttttctaatgagtcctcccgtgtctccccaaagagataatattccactcaagggcagggaccatatcttcttagtttacttatgatttccaaatttgttgcttgaaaaacttaacaaaacaataaagctcagtgaatgtggttctttttctaacaagatataccaggcgcatgatgtggacgtgctacagtagctaaaaccagtgggaatcttatgaatagtaaggtggggccattgacactagtgtgttgttgacatcagtaaaataaatatatttaaagtattaattaatataatggcatctctggattcctgtcggataaccagtaagtttgtgctgcaacaagagatggttgtggtgtttgactatagcatttagcacagttcctgccatacaagactactttatatatataaacacactttatatgttcataaaatagatgattaaggtctattttagaaacataacaatttgagcaatttaaaaaatgagtaattaataacaggcagtgactctgataaaggaatgaaaacaaaacaaaactgagttgtatgaaaatacttccagacgccattgttacaactacagtgattcattccttaattcaacagctcaaacatctccagcatttccaggaactaggaagatatcattttagggccaaagcagaagcaagtggttttggtcatttgtaaattggctagtatttttttttaacattcaatacattatttgaataatgtcatactgttaaaattagatcagatatacttgggaaaaagtgcccagcattcgtaagaaaagtacaacggaaagaaacattttagggtgctaactgttgatctgtggtttctcaaaatttcaagtataacaagtgaaaatcagaagatttcaaagtaacccttcttctgtccactctccctggaaatgtccccagttttactactctgggaaaggtgagatcttgccccaattcattaaatagggctccagtagtagcctgcctgcagttctgattttactttgctcaagagaacacagagaaaggattatgaaaaccaatataggtaagcttagcagaatctattctgatggattttggcttgcggagggacaaagcagacctatcaatctattactatggcttcaatttcctcgggttagagatgctttccaaaatgagaaataattcctgcccactaagagaaattaccactgtagtcagcttcctttcctgagtaaatacaggtaaaatggggcacctacccaccttccttttcccccaaacccattagactgtttcccccaaatgcagtctaataagctttttgaaaattgtgttgcccctaaacacagtctaataagctttttgaaaaatcaaatggaatagctagtaaatgaaactggaagaaaaatagagcaaataacactggggcttcctggctaggctttgatatttgaggcttgaagataacctcacatttgagttattaagcctgtgattcctcagggggaaactttaaatgggccagaactcactcccaagggaacagtgactttcttcggtcaacgataaagctgactcattatacggaggctctctcaggaagttcactgtcagccatttaggaaactccacatatgggtacatactagaggtgctgaggtgatggtctctacagctaatggaagagcttcaaaaccaatctgttcagaaaataacggattaatgcaggggtccttgatgaacctgctccaaggccaaaactggtgtgtgttctcatatgttggtacctgtgcgttacaggatgttaaatattttgaccatcatttctataggagtgaaagtcttatttaaaacaaaacaaaacaaaacaaatcactttctgaaatggaatagtcaggcatacatttgtaagttgatttctaaaccctagttttgtttgtttgtttgtttgttttttgacagagtctcactctgtcacccaggctgcagtgcagtggcgcaatctcagctcaccacaacctctgtctcccaggttcgagtgattcttccgcctcagcctcccgagtagctaggattacaggcacacgccaccatgcccagctaatttttgtatttttagtagagatggggtttcactgtgttggccaggctggtctcgaactcctgacctcaagtgatccgcctgcctcagcctcccaaagtgctgatatttctaaaccctacttctgacttaaaatgtttcaaaattaggaaatatttcaactggttagaaaagtcagaaaataatattacagaccatcatgcatccaccaccaaaatttaatagatgttatcatttgcttcacatatctctttcttttttttttctttttgagatggagtctctctctgtcacccaggctggagtgcagtggcgtgatcttggctcactgcaacctccacctcccgggttcaagagattctcctgcctcagcctcttgagtagctgggattacaggcacccaccaccacgcctggctaattcctttttatttttagtagagatggggtttcatcatgttggccaggctggtctcgaactcctgaccttgtaatctgcccgcctcggcctcccaaagtgctgggattacaggcgtcagccaccgcgcccgcgcccggcacatatctatttcttaaaaaggaaatgatatggatatagccaatcccatctccttatccctatcctctttttccttccttctccagaggtaactactgtcctgaagttagtgtgtatcattcccatgcatgtttttataaattttccacatatgtgtatatatccatgaataatatatagtattgtttttgtgctttaaaaatttatgtaggagatggatgacagtgatggctaaacaataatgtgaacgtacttaatgcctcagaactgtatgtataataaaatagtaaatattgttatgtatattttaccacaataaaaacacgtaaattatattacaccttatgtatccttttgcaattttctcttttatccatgcaacattatatttttgactattaatggttttacatgtagatctagctcattcatttttactgttgtataaatgttccatcatttgaccaaccccctgtcaatggattattaggttgtttctattttttatactacagttaatatcatagcacatgtcttatgcatgtgtgtacttgtgactgtccatacactcttcttcagtcaagcaccctctagctcatctctctgatgttgcaatttttcccctttagttgaacaatgaattttccacgtaaacagaattaaattagggctgtgtctgtacaatcaatgaagtctgaaagaagaaaatttgaatgcagtcaaacaattttgaaaacaaaatgtttattacaaatcttgaaaataatctacttaataatagttattagcttaaaaaagtattttaatacttatcctctttctcatcatcatacttcattcagtacttattctgtgccaggcactgtttaacccatcttgcgtcatttcatcctctataaacccataatgaaggtaggtactatttccattttacagatgacaaaacagtggctcaaagatggattcaaaataaatttgagcccatttttatctgtactattccaaagtctctggttttaactactgcaaacacttcctaagttttccaaatttcacagggctcaaattggagaggcacatggtatgatttaagggtcactaaaaagtctgcccacctgccttaaatatattatatctttacgacaggaagattcttccagctggacacaaactctagagatgttaagaagatatattgataaatctgaccatatgaagttagaaaattctatagggttaaaaaaagagaaaaaaatgacaagcttggaaaaatatttggaacacatatgaaagacaaagggatgtttttcttaatttccagaacagaaaggacaacagctcagtagaaaaactggaaggggatatgaaagtgaatttaccaaaaaagaaatacaaatggtcacaacagatatgaaatgagactcaaattcattgataattaaaggaatggaaattaaagttacaagctacaagacaccatttcccactgctcagatgggcatacattaggaggtttatattgagagctgctgagggtattgcagactggcactctgatacactattagtgagactgtaaatgtgttcaatcttttgggaggacaatttggcaatatctactactgctaaaaattaaccctatgtatatactcacaaaagtgctccaaaatatatgaaccaggttattcattgcagcactgtaataataaaagattaaaaacaagcaacaagtatatcaagaggcaactggcttaatacattatggtgtatccatatgttataatatcgtgcagctcttaaaaacaaagaggtagaaatgtacctgcttttatggaaagatcttcaagacatattattaaataaaagaagcagggtgaggagtaatctatatggtatggtttccttttatgtaagggaaaaatatatatataggtctggaaggaatctcaaaagcctgttaaaattggttatctttacagagagagacctgggtgtgtttgtggcaaagaagcctgaaatttcttttgtatctttctatacagtttgaactatcaaaccatagacattttattacttttacatttttatgtttcaatgtcaagagtgcttatctagatgccttttaaatttttcttctttctcctactcttttttaaaaaaaataaatgtaatttaaatatcttttactactggcctgccaggattccttcaaggtcttccatttaggtttcttccttgacttacggtattgccccttcagcaggtctcctgtaacatgctcaggtgggagtaacccattgtcaaccatcagtactatgacactccttcttggagagctgtcatctatgaaaacagagagctgagtcctcagaaatcgggccataggacaagacagggtgtgtatgtgagaaaataacatacatgtatttttaagaaaaatacaaaagttgcactttatttcataactagacatcaactcaaaaaataatatctggtcttttgttgaattataataaatgctcagaaaattaaagagaagaaaagtcacttataattccttatgcccttatatagcaattatcattgctaacatttacatatactccctttcaaactttctctctctatatacatagagagaaatatataatatatagtaatatataatatatattatgtcatatataatatatagtactatataatatatattatataatatatagtactatatattataatatatagtactatatataatatataataatatatattataatatatagtactatatataatatatagtactatatattataatatatagtactatatattataatatatagtactatatataatatatattataatatatagtactatatattataatatatagtactatatataatatatattataatatatagtaatatattatatattatataatatatagtactatatataatactatatataatatataatatataatatatagtattatataatatataatatatagtaatatataatatataatatatagtaatatattatatataattatataatacatcataatatataatatataattatataatatagagtaatatataatatataatatagattaatatataatatataattatataatatacaatatagagtaatatataatatatacttatataatatataatatagaataatatgtaatatacaattatataatatacaatatagagtaatatataatatatacttatataatatacaatatagagtaatatataatatataatatatatattacccttacacccttacagatgaggcagcatacagtacatacagctttgtgtcctgaacttttcattgaatgctatcttgtgaatatcttccttatacctgcaggggcgtaccaaggtttgggggagcaggtgggagtggttggttctgggtatagagagtaaggggaagtgcattttctgttgaaatcttaaaaaacaataataaatctggtgaatagtaggtctgctttaactatcaacattcgctggaaattccaaataatgtcagtgataaaatacttcttccactgtcccatccccctttagtatgccacttatacccacccagttctgattagggaagagaggagacaaaaagttggatttctatctaggagagatagactgagggctgccgcaaggggctcagagttaggcagggagtcactgaaagatgggatgaagaggagacattttaaacatcccctattttctgcttagatctgtccagcttagataacttttaaacatatgcttgacgtaaaaaaaaaaaaaaaaaaaaaaaaaaagcggctgactatgaggtactcctgggtttttttttttttttcccaacaaaaaaacccagaagctgtctttatgttgcatataacttatgtcattaatgatgctgttgtaagtgccctgagtagtgacatctataaaccctgggctgaagtggccaaaaatggaatcaattgttcaattataaaataaaaaatgaacttctttactctatttccagctgtgttttagcctgtgacagtgttaaattcatagatttccaaagaaatcttagtttgctgcatgttgtttgaattttacactataaaactactaatttatccagtatttctggaggatccatgaagctaaaatgatcttttatgactctgctagtgtagagtgaatattctggattccctaggaagtcaacacactgtagacttcagattccttcaaaaatcagcaaagcatgctagtctcaccaggaaatgacttcccaatttctttaattttatagtcagctccatgcatttggtaatcgtgaaattactggaccatcttgtattgatggtggactaatatggagccatgatcaaagttcaactctaatacagctttatgttttagaatcttaaaaacaaacattttgcatggacagaagtgtcctaattaacttctgaagaatctgtacattaaaacatcttaccctgctggagaagactgataaagcaaacatactaccttttgctgaagagaaactgtatttagaaggaacttgctattctcataaaactttcaataggaagaagtgaatcaaatttcttaattaccattttatggttggtaaaagggcaaattacatgccatccatttctaaacttctaaatgtctctggtgcttttaattaaagctgccacctagaaactactaaagcaattttacacaattagttatttataggttaccataatacaccactcaaaatatgatttaagtgatttgcagcctattagtgtgtgatctctgtcacttttttggcaggggtggtgaggactcttctttttcatcagctgaggcagataagaaaagtgtgacattgaggagctgtgatagggaagcaaagttattttggctagcgatcttaaataaaaagaggaaccagaattccaagctgtcagtctttgcatgtaggcgtccaagtttcattctagacaatactgtggagatgaagtatatcagtgctattcctccacctcttcccactttgcagctattctgccatatacctagcaccacacttctgcatgctaccttcagtggttcccacctaggcttgtctttctcaggtgatcttgtcaatccaaacatatccatcttctgctccattccctccaggcccccattccctccaggcccccataaagtgttttaatgaagaattaatatgctgctctcctagacaattccctgcaccacatactaagtttgcatctgaagaaaatccttatgggaatgaatttaattgtgaaatagtacgctgctaagggaattactttagttagatgggccttgtggggctccccaaaatataacatgtacaaggaaccaacactagaattgctgcatctcaaggtgaggaggggtcggctagtcaaatcacatacaacatgtgaattccatcctaccttgactcttgcttcttctgtggcacccatcctacctagaaattatcaagtctcagattgacctacaaggacataatgtttccttccttccaaagtaacttattacatatatgggtcattattataattattatgactatagcaacaaaacagcaagactgagcataacagtaagtaatactgttatgtaatacagtaacatactttatgctgggtgtcacactaggcaatttacatacattatccaacaacccattgtgtaggcactattactagttttccaactttacagatgaggaatctgaagctcagggaagttaggtgacttgcctaaggttaaacatttaattagcagtggatctgggatttgcctccatttctgtttgactcaaaaacctgaaaaattatctaccatgttatctggcctctaaaatattacctctgtgcttgctagaatctgatgcatacatgaaaattaagacaaatgcagaagaaaaagtcatttaataatgcatctgtggctttataaaaattgaaaaaacttaatataggtcttccaaccatggatgctacctagaccaaacaggcaatgagccaaggctagatgtaagtgccttccttttgtctgacttctctcatcaacagcttatggctttgggattgcaacagaacaggccggaaggtcctcaagttccagttgctgacataatctaaggccaaaatcttttgactaccctaagcagatgcattagatgaactgtgcataaaaaacaggttaacctctaattctggttgtataacaggcactaactcttctgttgcagttacagtaagctgagagaccactaacagtgtttgagacagaaaccccccctaaatgaaaacagcacaaggtcattgagggataaacaacaaatattttgcctgaattttaaggctttatcaaacatgtttttttcaagatgtttctgattctaaaacaaggttgttggagtaaaattctcataagaaatgtcttgaaactgggctaggaatttggccatgggtggtagaatgctgtcttacccagaaggaagacttcagtaagtgcctctcctaaacctttcccacttacaccctcattttaagcagaacagatccacttctcagaacacggaggctatcaagatgaagaatcatcactcttctagcttctcctactacaaactgatcctcatccctataccctacaaataatcgcttcagtctcccctcctattctaggccgacttccttccagtttcctccatgctttgatttattccccgtcttctttatctttccattgactgataagcattgccacatctccccttatagaaaaaggcttcctgagttcattggcctcccacgatttatcactccatctctcacattcaagcttctcagaagagtgagcttcaccagtgatatttattttctcatctctcatgggctcatcaaatgactaaaatctggcttccacctctaccaccatccaaaccaccaatggcagggtcaccaacgaactcctcattgcctaatgcaatagctacaaatgtgtgacacttgatactgtttttcacacctccttgaaattaactactctctggcttcctggacagtgtgctcttttggtccaccacccttttttctgaaggtttctgctctgtttccttcattagatcctcttccattgccaatcttatacagatgagtactccctgtcatttatttgccccagttttgctccagcgcatttattaccctgtcgccaacattatcaaaaacgcatgcacaaggtgggcatctctcctgcttcaaatcctttccctataggataaaatccaaacttccttttcttgcttctgcccccctttcctattactctccaatattcttactctaagaatactgaattatttgcagtttcctaaatataccattctttttatccatgctatggcttacccgtaattttgttgagggctgtccccagtgtcaatctaaatggctttgttaccaagatggatcatatgctaaaggaatttaggaaaaaccataccacttccattgaacaggagaaccaaaagaacattctatgtctgtttctttactacactgtctccctcatagacaccagtgacatcagcaaaaagtcactgattatagccttagcatctttccattaaccccaaatataacttttcacaatagcatgcagatgccaggagaatgagtagggcttcaggatgtacttcagctagacctggatagggacaaaaacagattgtttgtgtctagactttgttattcccagatttcttaatttccaataaagttaagatgaatcccgtaaggttagtgtcatgtataccctaaaaacacttttggaagccgtcaagatttaaggatcatttccttcctatggaacagctcagaggctgtttgcacttgtctggatattgcctaagttctgctcctgctgagttctggcgtcagtttgcctgaagatgtacatgagaatagagatataacccttggtgaggtccaagagaaccaaattaagtcactgattaatttcatcctgtccagtcactccttcaccttccgtatctacttaaaaaaataaatgcatccagcttgtcacaaattttattttatatccccacctagtaccatttcacattctgcttaagtacttggtcatctattacatgactcattagtttcagttctctgtagaattaaagaaagttgcagtaaaaataataaatggaacctaagtttcaactacatcatccatgcatgttttaaaagcatctttcaaagtcaattcaaactcatatacaatgccagggattagtactccatcaacctcttttcgaaactttttttctttgtcccattacattgaagtattgatgagtaaaatggcaaatgtttctctttgttgagattcagatctaagtgcataaaactggatcagataaagacttcctcccaggagaagtacccagaggctatcacatgaaattctatttggggacgcttccatttttccttcaaacaaaatttgtagttactactgtagtcaagaaatttaataaaatgaagatttcctgcctgtgtcccttaaggaaaatttggtgaagtttctaattacagaatcttccaaagagaagtgacaaggtttcctggagatttatttgaataattacatttacagagtatgtaaacgctatctatgtagtgcactatgggtacactactaggtcagaaaaatctgagaaatggttttaataggaaaaggaaactagactaaaagttatttatcttgtaaataaaaatattttgttcccattgaatacatgtcctcagattgaaaagcatttttttcccccaatatttccaaccttcccagagatcatagattttagcagaaaggcagacagtgtggtatggtgaagtaaagtgtggccgaggtgggcggatcacgaggtcaggagttcgagaacagtctgaccaacatggtgaaaccccgtctctactaaaaatacaaaaatgagccaggcgtggtggccccttcctgtaatcccagctactcaggaggctgaggcaggagaatcgctggaactcgggaggtggaggttgcagtgacccatgatcgtgccactgcactccagccagggtgacagcgagacttcgtctcaaaaaaaaaaaaaaaaaaaaaaaatggcatcatgggtttttcggagtcaggcagacctggtttgaattccagtgttgttatctgtaaactgtgtgaaactgggtaaatttcttttttaaaaaataacttttattttaggttcagtggtacatgtgtagtatgtccaggtaaatttcttaacctgtctgattctctatttcctcttctgtacaatgtgactaatactatttacatcatgcattgttgtgaacatcagagaaactgtgtaaaatatctagcacagtgtatggcacacagtaggcactgaacaagttatagttacagttattttaatacattagagctgaaagggagatcatcctgaccccttcagtttacaactgaagaatttcaggacccagtgtttaaatgcccaatgtcataaaattagtcaatggcaccactcagcctgtctatcttcgtgttcgggtaaatgaaaccacagtgaggtacagtgacttgcacggagtcattgaaagaaaacatgggcattacatgtattgaaaaagaaagtccgggctccctcctttggtatttaccaaaacttgctgccattgctaaaaacaaaaacagaaacaaaaccaaaacaaaaaattcccatggctcctgacctgttacctttcgctgactggtttttaactccattggataatttactctgaatttagaatgaatgatctcaaaagcaaattttatttcatcctatttttagaacagatttagagagtaaattagctgtcgtacagattaacatttatttgacttaccttgcataattaaggacatgttggagaaccttcctataattgcaatatgttgcttgttaaagtcttggagcgagcaagctcttttccctaacctagaaatggtgctccctagatgtacatttccattttctactgatctacagcttttctttattagcttctaggtggagggaaaaatcaaacctctccttaaagaaattcattaaacgtttgctatctactaagtggaaggaagaaggagctgatgtacagggtagttttaaagcaaaaaacaaacaaattgggctttcttgagaaacaaagaatctgtaagagaacctcaaagatgaaatgagcaattagcaatactctcctctcattttgtacactgtaataactttttgcatgttttttccttttatggaagtctatgaaatcgccctgcagcatttcatttaaagagaatctcacttctaattcactgacaaaggtgagtgctgactatattcagcatggagataggtgccatagctaggcacctaagtgttctgaccagcattttcagagcaactgatggctggacagaggttctgccagctgagttattataaagatcactgacagggtcttcaaacattgttagcatggttgaaggagatgtggtggctacctagtgtgaaccacacatcccactcctttaagcattctagttcactcactggatcaaagcagatgttgacaacaccagcttcaggaacgttatgtgtaagctgtcccagatggattagacatttagctgtctgaagtctgggccagatgttatcagggctctcttattgctttggaatgaatgaagtgtaccagattatggcaaaggaagctctcggatagaaggatgagtaaatcaagacaaaggaaaatgtagtagtggctatgacaagaagaaaaacttagtttaatattagctttgatacataaatttcagcactctcattactgacgcttcaagagttcatgtaaatcctgttcatcagtactttattactgctgctttccaagaaaaaaaaaagctgcagtgaaccaattatttgctttatttggaaaagctaaaatattcattctctgtgtggcaggttgaatgcagtagttgaggtgaatggttttcagactagcagcaactcaggaggatgtcaatttaaggcacaatacaagcttgattcctctctattttttatgcagaaatctttataataccctcaagaattttaaacctgtgtaaaaggtgagacccagcctaatgtattttcttgaaagatgagctgatcacatgttgcacccgagttatttattcaatcattaaatacttattgtggacccactatgtataaggaaagagctggcacagagaaataaagaaaaaatttaccataatacttggggcggggcttgtgttcccttagggaaaataaatcaccccctgtaaacaccattgaaattccttttaggaattcctggcatagataagagttacttaattgatcaattacacaataagtatgtgtagtgggtcccacactatgctagaagttggtggggaagtggggaagattccataatattagatgtgatttcccatctcaagcgacttatttcagtagaaaaaatctcccattcatgaaagcactggaagcaaaagaaggcaaaataaaatcaagtgctaattgtgtagtgtagacactgttaaataaattcagatttaatggtatggggttagccagaggggctttataaaagacaaaggccttgaagaaagtgaaatctttaaactgtgatactagtaggaattcaatcccaatatagcaaacgtcaaatggttaaagagtaacctcttaaaatttaaagtaataagtgaccatctaataaattaaacacattgacctcactacatttattggcatggaaagatgttcataatacattgtgtaaaacaggttacagaacagcgttgtataatatgattctactgttacagaattaaaatatctgatatgcatggaaaagtctagaaggataaatactaaaatgtttacagtggttttctacatgtagtaggcttatgggtgattttaattaaatttttttattctcccttttctaatttttctgcaacaaatgtttgtattatttgtataataactaagaaaacactggctttgtaagcccagtaaaatgaataatttctaaaatcactaacataaatgcatacatgtatgcatgcatgcagatacacacacacacacatacacacacatacacaaacatcttagagaaggaactgagaagagcagttaaataattaagatgacagggtcaatgatatatgatgacagacttaaaagttgactatccttcaactttgtggcctaagattggcatatgatccagaaaatccagaagttaattgggagacacagatttgttcactagattctaggcaattaaattgaaggttggtctttgaagactgagaagtaaatttaggacaaataaaaataaggccaaactcccacagaaggcaacagaaaaaaattggaatttgttattctagaggcaatatcaactgaaaatataagtaatttccagaatgatttagataaattaatggaagaaaggttcattgaagattcataattttgttaagcaaaagtcaggaatgtttagggtctgtgagatattcaacatacttagcagtggtagaaggtaggcacagaccttatcgcaagcaatgcaggctgaagagccaaagcaggggtctgcaggctctctgctgggtcaggttaaccctttagttgctggactgtggggagtttccaggaggtaattctggggtgggttgtggtgccagggaggcactctgagggttctggctaatagttatttatcaactagaaaagaaagcatttcattcttttaataacagctataaccatactaatgaatattggctaaaaatgcattatgtgccttggatgtgtctactgggacagacttcaatattttggctctcagaggcaaaatattgagattagtggatgggctaaagtgtggcaacagtctcgggattttgtaaagtcaaataaaatctttagatgacccaagggtatatatatatatatatttatttatttattttttacctcgagggctattcagtgaagcttccgatgctctcccaccatctccacaatgactctggtcaaagggaaggcactgatcaccagttcctgccaccacttcaaaattcttggacagatctttcgtctccacaagagatttcaacttgtagactttgcgagtattggtgtctgatagatagagtgattcagacacagggtccatagccagatagtatttgtgagcaggacttgtgctaaggaagagaaaagtaaagttattcaaggcaatttttcaacacgaaccccctgggctcagccttttttcacaaatggaaaaatcttttgatagatgagtgaattcatttatcttccttcttaagtaccaaggagatggatacttctctgtttttctaatagtgggtctaggtatgaaacaaatctaatgtatactgctaattcataatgatgctgacattccgataccatccatttggggatagaaagaaacagaagacaggaaatctcaggaggtcatttttctcttattctccatactcagttatccaattacctactagatcactgctgggtgtctcagtcacctcaaactcaacatatccaaaacagaagttactttcttttcctgctttccccatccctcataaacctacttcctttctcttgggcttctcaccttgcttgtggacaataccatcctcccaggccccagttgtcaattgaaaggcatgtccaaagctcaaggagtgtcgctaagggaggatcatgctggagatctactgccaaacttctttccaagtttccctttttcaattgactaccacagttttctaatctggtttttgttctttcaggacataatggaactggttatatttaacctttttaaagttataatggcaatcatatgattgtgtaatcgcatagttatacctcctaaaagtgaccctaaagttaccttgtttggattctggcattcttgaaacttttctattacatactcacaaggaatctcaagttatttttatctgtatagatggctgagtttgtttattattttgattcttcctaattttagtttttcaatggctacaataaccttagttttggagacattttacttgaacctaaggtttgtgtaatactgacatcatccaaaccccaaatgtggaagtcatccctaatccctcttttgctctccacatgcaattgtgtctgtaaactaactttcagaaacattctcatcttccatccctatgccattacattagttctatctttcagtatctctggcctggaatattttctatagatcgatatgtaggatgtgtttttgaaatcttaaatcatttttttcccatgctgcctgcagagttattctgatcatttggctcccatctttaaaaactttttaatgtttcttggtgtgttagccaagcctttcttctcttaattcattcttacatgtcttttgaggctttatttgggcatcatctcctgaaggaagctttcccagtcttcccttctccagtctgggttatttgcattatcttacctctattctggggattacatatcatattaaattatttgtttatgcgttgtttgcatctccctctcctgccctgccagttgcaataaagcttggtggagagcaatcttgtcttgttcatctctgatatgttcattgcccatacctctgcctagcacccagttgtcaaagccagaaaccagaagccattcttttctacttccttctttccaccatttcccacatccagtgaaaggtggtttttaaattctactttctaaattgttttccagtctgctcacttctttttatctctgctgtttttactctaaggcctcatcatctctcatctgaactacttccttggtaccatttcagtattgtgtatttgtttactaattcattaaaaatcatttattaagtgcatacaatgtatccaagaactgtgctatgttctagagacctacttgtgtgcaagatacacacagcttctttctttatgaaactcacagtctagtgggagagacagataagtagacaggatatgactaccatgagtccaagtgttatgacaggagaaacagaaggagagaaattagtaaagaagagggacttgtgtcttagcagcacctattgtatggtattagcattatttttaaaacttattaaatgaagtccatacttattagatttccttagtttttacctaatgttctctttctgttccaggatcccatccacgataacaaattatatttagtcgtcatgtcttcttaggctcttctgtgctgtgacagtttctcagacttttcttgtttttgatgaccttaacagttttgaggagtactggtcaggtattttgcagaatacccttgactgaaatgtgtctgattgttttttcttacagttagacaggggtgataggcttttgggaggaagagcacagaggtaataaagtgccattctgatcaaattatatcaagggtacatactaccaacatgatgtacactaatgggtttgaccttgatctcctggctgaaatagtgttcgtcagatttcttcactgtaaagatactctttctcccctactttccacactttactctttggaaggaagtaactatgcgtagccaacacttaaggagtagagagttatgctccacctccttgagggtggagtatctacataaattatttggaattcttctaaatgggagctttatctcgtctccatctattattaattcaaccatttatttatatcagtatggactcatggatatttattttatactttgcattaaatccaatgctactttattttgttgctcaagttcttccagctttagccattgggagctcttttcgttgactcatgtgtccctttgccatatccccatcaatgagggattttttttttagcctttcctttctttctggcactaccagatgctctgggctcatctgctataccccctgccccaatcctagaatcagccatttctccaaagactcccctggttccctttattggagaatggtattagaaaccaagatctgggtgctgggtgtaagcactattttttttcctaacatatctttctctccaactacactgtgagctctttgcaggcaggaaccatattcatctctctattctcagtgccaacagagggcctgacaggattggtgcttagtacgtgctaaactaaactgaactgcaggatataaaactaagacataaaagagttcaggccttgctacttaggcaaaatggaggggagagggtggtgagaacaatcaagatacctttaaggactggaatgttattaattgtatttgtaattatatttgccctccaagcatatttatgtatgttaataataatcaggcctgcaaatactaatttgagactgtttatagttttaattggaaaaaattaggttcaattggaatacttaatcttttcctacttaccttcatcaagtaagagaatccagtagattccagggacacctccaaccctggaaccaccataacaggtgctgtaaataaactatgaagggccccaacaaactctagaattgatttggtagccataccagacaaggcatctctctgggaaaaactgcttcaataggggtttgagtaaaattctttacatatatagttaaatttttgccttcagaataaaatttttccaatgtgctcagatctttctagaaaaaagaaggggtcaaaacccttctttgaaacaactacaatattttgatagccagtttgtggagtttcaattcagtcagattagtcatgctttgtttaggaagagtccataggccatttttccaagagaaatgctattttgctatttgcacaaaagcactttggaatgcagtacattcattcattattgaatacccccagtgtgcctgtgaggaaagttagaattagcaatctcctcaaatctcagctggggaaacccagacacatagggagcttgtccggggtcactaacaagtttgggcctggaccaagattagactagattatatgtgattttgtgtgcaaaataccatcagaatactcttgctctgaaggcagcaaaacaaatcagcgttcctgctttctaatgagcaacatgtcctattttgctcagccaggctgttctcaaactttgtgtactggcccttagaaaatagaatagcccaacataccaaagtgaaatctaatcaatgttattttcttgatagccagcagtcaggaaggtccctcctatcaatatgtaacttgccatttcatgtcatttctcaagtgtactttagctcttttgaggctgatttctttctactttctgaaaacaagccacacctgagaaagaaaaaaaccactggactatattccaatttgctttaatcccttgtgtctcaatgcaaattgcaatttgagatatgtgaagatttcttttacaacttgggtgttaggtttactatcaccttttggttagttttacattcaagcaatgctcttcaacttagcaaagatcacttcattcatactagttaaaaatcacatagattgttaaatgggcaattaatgtttataattaatactgtgcaacattttaccagtaagctatttgacaaccaacttaatttgcttaaggaatcagttatgccaaagtagcaaggctgatcgtctgtactggcatttaggaagtggcattgcccaaatgaaatccagattagaaaccccatcagtgccattttgatgacaattggcattcgggagtgaacaaattcaattttctcctttgcaatttcaggcaatttagaacagttttgacaagtgtaatgcgtaaacacattgaatagaaatattcattatgattaatttcagagctatgtaccattgtctgcaaacggtcagtttaaggttttcctattatttctttttggtggaaagaaatagaaacagtgaggtcacataaaagaaaaaaagaaaaaagtgtattaaagaaggtcatcatggtcactgtctcttaatacacttaaaaactgtacttctggatctagggagattgctgtattacctctttctctacctgcaatttgaaaacatcaaatctatttgaacttaccaactcatttgtgttatcaccttagggaaacataatgaaacttaaggccttgctttcccatgaagtactcaactgtcagctttcacttatgaattgttttctttttagtatgttttgatcctccagcaaatcctacatagtggacccttcttcttttggaagacacttacctgagttataacttccaaatttatgttcacactattctttaaccttatttaggaagaaaaatttccctattaacacattatcaggaggtagtctcataggcaagagggggcattaggtagctgctgatgtgatttgcttacctatgtctggtatctctgtttctagggtgcacaaggtatccacgagtggcaagcaaaagcaaacagagagtcatcagtatcattgaacatgccaaacctaaccagacacaccaattcctaactcagattgcggcatttagagagactctatggggatcatttagtcaggcgtgcaagccaaagttgatccaatccctccaggctttgcctcctaagatggtgtcaaggcgattgcatattttgtttggtggatgcgcaaagttctaaggcagatttttcaaaaggttctctctggaccatctgcatcagaatcacttggattcttgcacttgtgcactttcctagggttctccctagccctactgaatcagaatcttgggtggaggtggggcctggaaattttacttttaacaaagttggctggcaattctgatgcaaaataaaatttaggaaccattgaactaggggttgaagaagcagccacggcagagggactaaccattttaggctttggtttgatagccataagcactctatcaaagtgtaaaatcactgttttattatcaaattgtgtgtacagacagacatcccaacactaaccctaagccacttatctgatctcagagataagataggaacatctgttgtgcaaattccttagcaatattaaagagctccttaacaagttgaaagtgtaagagttttcttttagaccatgacagaatatccctgacagcaaaactgctgatcaaaacaacttcaataaaacacattgtacatcaactattagggctttgtgtcttctagccatccatgctctaaagggcaactggggtaggcactagaggactgttgggccagaagaaggacaatactttggtggctcctgatctgtaagcctcttggcacagggtattgcctagggcatttcatgatgggacctgatatgaggtttctcacacagggagtgcagtctgtgtataggcctgactttgggtcaagtctgcccagaattaaaaggctataatcatctgtgaaatacgatcattttaatttttaaaatccttttaaatctggccctatgtcattttgaaaacatagagataaccatttttttatctaaactaggaaatggtcttattctttggaatctcagggaagaagaaaatatacaaaatttttcatctgaagttatctgctacagcagattcaactctttttaaaaagaacctttctgagattttactagttgggccacaggtcaaggttcactgacttttctgtttcctttgctcatctcaaaagggtaggtatcctgtgggttgaaacaaaggtgaactgataaggatgaggagctctgattagaaacctggccgcaggcatttacgcctctttcaatttgtttgtctctagaaactttcatttgcacctctttcaatttccttgtctctagacacttgcctgtttttgtggcctctaaattatagaatgagtgtgtttgagcctagctgtaatcactgtggcataggtgctcctcctgaaagtttagttgtgaaagtactagaaggatctcattaaaatatggtttcatcagcagcagattctcatggtacagaaccatttgtgtggctacaaagggttttgaaattcttacatgatggcaaggagtgagagggggatggtttgactttcttgcagctgcttctgattctgccaataatgtcactgtgaatttggaaagatgtcccatattatgcagagcagcttctctcattaacatctcagagggaggaagtgaaaatgacggaatttatttccagtgtgtgaccttgttctgtctcagaattacttttcgttaaggatttaggactgagccaccaccaaagtcagtctgctatctagctaccaactgactacatgctgaggtgtcagtgtgtgagctcttcacaagggcctgggcccatccgtgggcaccaccacctggcaatggaccaacttgaagcttgccatgagttaggaggagaaagaaatggaatttcaaatctttttagagcaagacatgcttccaatgataaagtctttaagttgacctttgattttctcaagatccaggtgatgaaagggtcatgtactcttcttttttaatttaaaagaaaattattgatatgatttatataccataaaattcacccttctaaaatgtgtaattcagtggtttccagtacattcagagagttgtgtagcctttaccattattcaattccagaacattttcatcatgctatgaagaaactccatacctatttgtggtcacttcccatttttcccctccctcagctccaggcaaccacaagaatacctattctggatatttcatataaattgaaccgttaaatatttgtccttttatgtctagcttcttccacttaacataatgtaccatctattccttttatgtttttgtgaggtaagggatggaaaagaggacatatgccaattttggagctgttttctagtgacctggcatcatgagactctgactggcctgcactgtggtggctgcagccctttacttgttcttcatgctgttctcagcttcttttcatattcctggccagaaacatttgacattgaagaatggtctgcccttcctgctcctctttccttggtcttcttgctttagacatcagagcacactcctgactgtcactgacttctcaggtcttccaactccagcgaccctcatccaagactaccttcccccatgctctggctctgttccttgcccttatcacaacttacctgtcctgttttagggccctgttttcagctagcagtccctttgaaaagcaatctgataaatgaatccatatcaagggactcgtgaatgcttttagcttgatgagccattctaaaagaggttcatgttttcggaaatcttagagatgcaatatttcaattcaaaggaacatatttcttagagtgaaaattttgggcaccatggaaggccagtgaagatgtctttgggtgaggtggagggaatccttgagtaccactgctaatacatgagatcaaactggggaggtaaccacctatttcatctacacgtagtgtttctagtatttgtagctccaatgctgttgacaagaggatggttcatggccatttctgagatatttgtagagctctcaaagctccatttccatttgttccttcagcggagagctctacaagttctcctgcctctcagcattctaactgcccctaaatggctgctattccagttctactccattcccagtcaatgacaggaatcaagtccagagcacaatgtatgaaatattaagcagttgctggaaaagaaacaggaaaatctcaagagaaattttcatatcacattgacatttgttgaatccaaattactcaagataccaagaagcatttgccaggctcttattttcttatctctttcacttttaagggaaggacaaaataaatatctggagaataacaaaatcttgaacaacagcagcatgaggtttttataaagaataaatcatttccagtcatgcttaatgagttttctaatagagttgtgaaattagaagatgagaggggtacagggggatattacatatttgaattcttgcaaagcacttgatatggtgtctcctatttttacttacataattatccctgttggtttcagaaaacttaaaagtggtcctgaggctataacaatttaaaaagtcagctaagtcataattgatgggaaatagttgaaggacttgtagatgtttagactgaggaagataaagctcaggaacctatgacagctctcctcacacttgtgaaagttgtcaggtaaaagagggaagtgacttctgtactgttttagatgctaccatttgccactactgagtgaatttttcacaaacgcagattttggctgaatataaggaagaattttctaatggagcagtccaaagatgcaacggatcttgagaagtattgaagtttcccatgattgaaagagatcaatgtagagacaacaaaccatcaggcatggaatgggcacaattttggacctgataccctcatggatccttctaatactaagctcacaaatctgtgatgtcatttttgttctactgaaatctgtgtgtgggtctgcatacatggagcaaatccctagtgaaaccaactcctaaactatctcacatagaagtgaatctatcttaaaatttttttcaaggatgtatttttaaagtcgcagaggtttaattgtatgatcttataagctttccttctttattatcttacctcaatctcccactggaaggaagctttaagatgcatacatacgaatgaaatctgcaggaaacaggcaaaggggtactatatacttaaataataagaaataatattgtttctcttggcagatttctaatgatagtgatattgctgacttttccttttcctccttgttctatcaatggaaataaatgattggcaaccaatgaaaatgaagttatttttgaggtcagatgtttcaattggaaacgtttcggatcaatagggctgaggcagaaaatatctacagtcctccaatctttaaactgccaagggacatctggaattactcgatgtggccaaatatgaaacaaaaggatctagaagggcatccattaggggcaaactatatgtcctcccaaaatgtcatcaaactttgggctgagagctacacatctgtggatctctaaacaggttaaattgtatgtgtcatgtaagaggatgctcaagtataaacctgaagtcaattttatagataaggaagagaactactagagaacatagtacatcagttacataatgaataacctggcagaggatcaaaatctataaggctctctatcccattctacaataatctgttgacaatattgcttctccattcacaattttaaatacaaccaataacataatggctatattcgtctgtgtttccaaggaaacagatgactcaaccaagtaaagtgactaatttgcatggggcacagagcaattaaattaactgatcttaagaaaaatactggtatgaagtgaggtttttatctaactacagtagaatcaatgaacattatggttcttaagatagcacagccttattaaatcaacttatttctctccaggaagtttaaatttggaaaatttataaagcaaatatataaatccacaaattatatgtacaatgtacagtacacatataggcaactgatcaggatagatgcttttttttttttaaaagtgaatctaataagagctatattagcttctgagtaaacatgacagctaatgacagctaatgtgtgctgacataaactggtttgatggttttgaatatagtcaaacagttagggagttacctgtcaattagatcaaaatgatcatgtatattccattagcttatttctttgatggccaatcacaggagtgttggaatagagaagaaataattgccttttctccttgaacctaatgcaggggatattaaccatgagtctatcaaagggcttcatctacagggactggttgctggtggggcagtgggaggcagggaactctaaggaagggaaaaaaatgcgatcccttaaatcacatatgccattttgtgtgattttgttttctctagggagagggtccatagccttcagtagattctcaaaggagtctaacactaataaaaaaaaagttaagaagaactactctaaaggatctcaactcagaaaagccggctagcttgagaaaagctctcaagctaagtgagagagccttgatgtgtaaattcaaagtgtgtgcatgcctaagtgaagagctgagacaatgagagaaaatagtgtcatggaataagaatgaatagaggcattggatagtacttcaaactgtcaaaaactaatttttctttatactgtgaaaatcagtttgcaattagagtccaagttattctattttatacttcaaatggctttgtattgaaggtcataaggtactttggactaaaatgcaaatttgtaaactgttaaggatccttgaccaaaagagaatctcatcaataaatgacaattgctccactttaggtaaatttacgtttaaattacaaagaaaaggactaaatttagctggagtttaaaaaatattaatataattttttgttttgtttttgtagataattttactgtttttcctttgaggagttagctatataggggttagctatacaggctttatagggttaactatgtagactcagcaagaaaaggtctctgtctacctgacagtctggatgactggaaacattcagatgttgaatgaattgttcagcgctcccatctatatttggcattatatagatagagcatccctagggttttgaaaacaatgtggactgttgtataaatcatttccacatccaggcatacaagcaaccatcttggccttcctgttgactttccagtaagtaggtgcccaaagagatatgctgctggaaatgacaagtccccatgaggtgtaacattctgaggtacatgaacacttgattagggtagggtgctatgaattagtacctctctagactctctaaaagtgctttgtctttattataaagtcttaactttacagtctgttttttcattagctaaaggatttaacagctttcttccctatgacagcctttgctactataattaagaaatgtattaaaactggagtgaattaatgtgaaaaatggatgggggcttgggactagaagatttccccagctaggtgttagggaataacactcagtattagaaaatggaggtatattccatagcaagcatgagaatctgaaaaattttgagaaatgccctttggactttcacatgcttgtgtgaaagtaagtgttaaatgaaaatgacccaagacttttcatgtgttttaattggctttgatgatgccatgcacatacaagttgctctgtcaatgtctatgctcttctagtcactatatttgatcactatttgtcaggtcattgaggagatgcctgaagaaaaaattgttttatggaatagttcataggatagcatctagatcttctgaacatagagaaacttaaagccaaatgttccagaggcatgtgtcaggaatacagctgtcataactagaaagaaggctctaccagtttacccaggggaaaggaaacaggtttgtttattcttaaggagacaggagttgaagcttcccttttcttttatttatttatttatttattttttattattatactttaagttttagggtacatgtgcacattgtacaggttagttacatatgtatacatgtgccatgctggtgcgctgcacccactaactcgtcatctagcattaggtatatctcccaatgctatccctccccccttcccccaccccacaacagtccccagagtgtgatattccccttcctgtgtccatgtgatctcattgttcaattcccacctatgagtgagaatatgcggtgtttggttttctgctcttgcgatagtttactgagaatgatgatttccaatttcatccatgtccctacaaaggacatgaactcatcattttttatggctgcatagtattccatggtgtatatgtgccacattttcttaatccagtctatcattgttggacatttgggttggttccaagtctttgctatcgtgaataatgccgcaataaacatacgtgtgcatgtgtctttatagcagcatgatttatagtcctttgggtatatacccagtaatgggatggctgggtcaaatggtatttccagttctagatccctgaggaatcgccacactgacttccataatggttgaactagtttacagtcccaccaacagtgtaaaagtgttcctatttctccacatcctctccagcacctgttgtttcctgactttttaatgattgccattctaactggtgtgagatggtatctcattgtggttttgatttgcatttctctgatggccagtgatggtgagcattttttcatgtgttttttggctgcataaatgtcttcttttgagaggtgtctgttcatgtccttcacccactttttgatggggttgtttgtttttttcttgtaaatttgtttgagttcattgtagatcctggatattagccctttgtcagatgagtaggttgcgaaaattttctcccattttgtaggttgcctgttcactctgatggtagtttcttttgctgtgcagaagctctgtagtttaattagatcccatttgtcaattttgtcttttgttgccattgcttttggtgttttagacatgaagtccttgcccatgcctatgtcctgaatggtaatgcctaggttttcttctagggtttttatggtgctaggaatccaacttacaagggatgtgaaggacctcttcaaggagaactacaaaccactgctcaaggaaataaaagaggatacaaagaaatggaagaacattccatgctcatgggtaggaagaatcaatatcgtgaaaatggccatactgcccaaggtaatttacagattcaatgccatccccatcaagctaccaatgcctttcttcacagaattggaaaaaactattttaaagttcatatggaaccaaaaaagagcccgcatcgccaagtcaatcctaagccaaaagaacaaagctggaggcatcacactacctgacttcaaactatactacaaggctacagtaaccaaaacagcatggtactggtaccaaaacagagatatagatcaatggaacagaacagagccctcagaaataacaccgcatatctacaactatctgatctttgacaaaactgagaaaaacaagcattggggaaaggattccctatttaataaatgatgctgggaaaactggctagccatatgtagaaagctgaaactggatcccttccttacaccttacacaaaaatcaattcaagatggattaaagacttaaacgttagacctaacaccataaaaaccctagaagcttcccttttctataacaccagaagatacacatttgtgtcttataatctcagaaagggaagaaataagtgaattaagccacagtcaatttagtcataatctttgtggaacttcaggatatggaatactaaaagctacgaattccttacaaaaggtgtcaaaatactttgtactctcaagaaaattcctaaaccatgtgagaaaatttaaagataaatgctttaattatcatggggtagggctttcaagggtaaagaaccatttctccctcctttatcatgccatgaaaaccagatttccgttttcttgtttatgaaatgaccatttccaaagattggaaataaaaacttatgaagtttagccttttggatctgacaatacctctcccaactagaatggaatagttttgatgagtcttcacagtggctagcagtgaatgagtgacttacttgagtgcttggaagtattgagatccatgtcagtgtcagcactgtttacagggaaggacatacatacagggatgttaacacttcctgcttctccaaagtagtgctcaaaggatcaatccttcaagtaggaagagtgagcatgttgacctttgtccctattcctgcatcttaactcagtgctacaataggggcaactacattttctgcttctactggcagtgctttgtcttttcatattatcttgctttttgctttatctgctaagcaaatatatagagattagagaagacttaccttaattccaaaatactaacggagtttcccgagggaaatattctccttacaaaattgaagtcgccaacatacacactgccatcagggccagaagctaaggcgacaggagcaaagagtttgttgttgtgggctgggccattgcagttggtgcaggctacactcctttggtgtccattacccattatggttgatatgactgggggctgctgggaaatgaacatattttctccattccctttatgtatgattcctagattcaaggaaaacaaaaagagaatttaagaaaagcaattaccacaaaataatctcagcaatattttaatttattcttcatcatcccaagcaggaaggagctttggcctggcataagagaacctgagagtgaaacacacactttcctcggttttgtttaactgcataaccacaacaaatagtagcataatactttgcctcagtttgtccatctgtgaagtagggtaatacaaccagtccttgtaatgttgattctaaatgactcaataaagcatttgatgactaacttttaatgacctattcactctgggctctgtgaatcatctgtggctacattttcatatctggctggctcttttctgatgcctagcacatacccgtctgacttcaaattaccctcactatgaaaccagttcctgaaacgagaatatcggtcaattttaatattaaccttagcaaaacacaatcaggaaggtaatctacttctgtgaaaagaaaagaaatcctactgctagaatgcacttcaaagaaatatgaaagaaacttgaattttccactcttttggaccatatcgcactatcatcagtgcaggaaatagagatactgacttatgaaaatgctttgcagacattctgtgtgggcaatctcatccatacccacggctttaactcccatttctatatgctgaaactttctcccatccagagttcttaactgacatgccatttccttctagacctctttacttggatcccccgcaattacttcagactggaacatacaaaaactgaactcattatttttctgcaaccactcccaaaccctgctcttcctcttgtgttccctaatcatcttgtgagtggttgtaccatgcatacaattacctaaattggaaatctggacatcaccatggctcttctttccccccattcttgaaacctgattaatcattaactcccattgagtctatcccttaaaatgtgttgaaaccagttctttctcccctattcctacattagtttagtttttcttaacttcttggtctcctggtctccatgcatatccatttccagatcttcgtccccactcctgccatagagattatttcagtctgtggtttaatacctttcaatagctccatatccctttaggataaagggcacattccttactgttaaggcacaaaaagtccttcatgatttggcccttgactacttcttcagtctcccctctcatcatgctttcatctatatcctgagatctagccagaacaaactacttatggttactttcacctacttccattcctctatgtttttgtccatgctattgtctttatcttgaatgccttcctcatcttgtctgcttggggaggttctattcatcctttaaagctcagctccagttttcctcaatgctccatccaggcagagtcagttactccctcctctgtgtgcccatagtttgttttccatagctctgttataacatttaccacatgtgtgatacagtttttattacttctctgtctttcccattagaacatgaatgagctccttgaaggcagatcctctgtcttactcctttctgcattttagtgccaatccctgtggccaaatcattataagtgctcggtaaatgttgaaaataggctttgagtttctcgtagtttccttgtctaaattccaatgattttgcaaacctgctgagcctgggcagaaaatccgaggaacaagtactgctgtgctaaatagctcaagtcagcccagagtgagccagggcaggtgaaacatccatgttgtgggaaggcatgcccatgtgtcagactgaagtcactaatagcaaatgaatgaatgcagttatacagttaagccttatttttttctccctttccccctgctgtctatctccttgcattgcctgttattctccctaaacatttcctgaaatgtctctttagttttcttccaactttgggtaccacagtcctaccacagaaactattgatcactctgaggtaggaacattgctggcaaaaataaacaagagggtaaaacatgctataataccatggtggaatatatggttggaaagggccttccagcaaacagaaatcccatccatcatatagtattggatttcaaatttaagcatttttacttttccttccagggtgatttctggctacttttgcaacacatgatttgcaggagcagctgtgagtttatgccctaacaaattggtcttttattgcagaactatgagatatcttgaggatcactactttcttattattttattaataactttattaggtagtagggacctttcttaagatttagaatagttaattaagtaagatgaataggactgaatttcttttctcaaaaaacatttaattgcagtgtggtcaatattgtaattcaaataaattaggaggaggtgaatgagaactggaatgacagttgcacaacatcattgaagagaaatctcccgatgattgctaacagaatattctacaaatgagactatgatatgttctttaataaatgaggaaaccactgtttagcatgtcagtatttcagcaatgcactatagtgtatatcattcaaaaatctttccaattattggcttggaaataccagatttgctattaacatctattttcacaggtagatctccatttttttatatcaatataatggtatagttaacaattaccctcaaaatgacatgttattaccagcctcctggcaattttagaactaaagatggctattctaaaccattcttctaagcctgcaattctaaaactccccttttctattagaaagcccaacactccatcaaagaagaagaatgattaaaggaaataaaacataaggcaatgtactttctgattacatctcaacaattgatgtctggctttcatgcaaggtactaaagtgcccgtgtactgaaatgaccatttctgtttaaagctgaagcaatcaaaacaaaaatgggcaaaccccttttgtattgccctggaaaaatagatcattttgaagggtgtttttgttgtttcaagaatctgtttaaccttccattacacagaaccagggcataccatctagcaaccatgatttaacaccaattcttttgcaaaatgttgctttgaaaatattttgtttatgttcctagaaatcttgatcaattactgctgcctcctttccagtttcttctgccacacatgctcattttgaaaagggaatccaatgatcctaggacaacacacattatttatgtgaaggccaacttcctgctaaggattgggtatcttgtttacagttaacgaaaccccactgaatggggcttactgcacattttctcttcaaagttttccttttctttgccaaaaagccaagcccattgtataataaggtaagcacacttttaaacataccagtcataccctcttgctactttgttcagaacttcttttgatgcttataaatatgtctgaaataaaaaatctccttgaaagccagtgggtggtgctttatgctgatttcaaggaagaaaccatttttcagatttatgaacaacaaagagacacaacacatatttctcttagtacttgactgagaggatataaacacaaactgggaggtatgccagtgtgatcaatggacatttacttctcctcccagtaaaaccatttgtcggcaaactactggcctattttggaggataagttaaaagaaattctttaccaattttgagacagatgacaatacccacttagtgccctagattgttctttttaataattttaaacactcgactgccaggaaaccctaggggatatgtttggtaaaagatacaccaaacaaatagcttagttctgtaacagatatgcacaactttcttataattttaaagaactgagttttcttaaaatgaatgaatataccctctttataatcactaagaagatgaacttaaaaggaataatgttgaaaaccacaagtttctgatgtttttatctcagtgaaaatcagaaccatctttatatatcaggcctaatattgggaaacaattctccacaaccaatggttaactgtcaggtaaatataattgcagcaatggaaatgacaaatggtctgaaaacactgcctgctagaaactacccattgcataatgattttggagccaaagaaaactgaagaatagaatggcaacagacatccagtctaattacaggtgtctttttaaccagtgagaggaaactgggggaagatagattcttgtttttaatctgctatctgtctctgatcaaaaaagcaggatgcctaaagagttacgtttttttccagagagaagcagagtgggggaatttggagagatgttgctcttgccttaatcagcttaatcagtcagaaaagactgtctgacccgagggggaaagagcattgctttctaaattggtcttcccaaagctgctccatcacacttatcattcctgcctctaaaactgcctttgtgggtgggatttagacttcgaaaacatcccaagagaggttttcgtgtccaaggtcaggctgaaaggcagcagcagagctggcttcagatctgtttcccggcaagtgtgatgagttcttggttggaaatacacatctacaaatgagatgataaaatgaacaaatgttcctttttaaaagactatccaaaggaaggcttctttctcagaataaatttctcagaaaggtagaaacacaagcagatttagtggggctgtgaatgagcacacaaaatcttttgggggtgataaaaatattctaaaactgggttttggtgatggttgcacaactacaaatttactaaaaatcactgaagtgtacatttataatgggtaaattttatgatgtataaattatacttcaataaagctgttaaaaattctcagaaataatttgatgcctattacctaaaaactaattactggtgaattggagataacacatttgtgaaaatcagggggccccccccaaagccaactttctgaatgactcccttctgttctgaatgtttcaagtctgtgtgaagcaaatggtaagaggatacaagactgggagcacacagctgggggctggctcgattgaggtcatttcccactttgtgtttaatgtcaatgacaggcatttgaaagagacaatccatacaagccaatataagtgagtggaaaagaaacggctgcttaaaatgtcaaactctttcaaatcaaaacagaaaacctaataatttaataagtggcatctgccctttcatttttgtacttttaaaactgtggctttccttttgacaacagaaaaaagttgaccttttatatctcagcctgaatctttgctcttaaaaaaaaataaactgtttgatatggaattcagaatcttccttgaaggaggagaaagagttataatgggggcatacagcaatagactcattcaccttcagagtcccacactgggactatagtaggcggtctctttctatggttgaagtaaatctggttagctttgccattcaaagtttctcagcctgtggggctggttgacatagctgatttggctatagtacagatgaagtgatatcataggtgtgattataaaatggatcccttagtttggtcagttcatggccttataagatcgcctcgccttaaccacctgttccacaaagttaggatggatacaaggatggctggatggaagtgtgtaggggcttcagtacattctgatccccaattctggaaaaataacccaatgtacatgtcctactatagcttgttcagaatctgtctctttagatgaaaagggatatgatttcacagtagacgctcagaggaaagctgtatgaaaacaccagtgacgggtttcccactaagatgcaagagtaggtgaaggaacttggatgaaggagttataaccagggtagcaaactcagtttgtctgggaaaagcacaaactcaggggccacctctgcccccttctcctgatttgtttaacatttaaatcgcaaacaaggagaacagcagggagagtggtccaaagaagggatagattaagatgagagtgttccgattcttaccacactaagagtaattcaaaatagaattattatgtttaatgcggtcatctctaagtagtattctcacaagtaatttttatcttgtactttccaaattttctgcaataaatatgtattatacagcattaggaaagtagtattcatacaaatttaaaaagctacttaccactttgaggattcaaaatgtgatgcttattcaaagaccagcctcctaggttagaagcatccatctcaaaaccttgtaaaacgactgtcctttgctcccagagaataaagtcagggcacgtttcatattcatatcccacagatactgcaaacaaagagttaacagcacattagaaaactgtaaaatatttgcttcatgtttatactagttgataattctgtggatatcactttggctactgaattctgattagagttgaaatttgactgcaaatttctttcacctagcacagtacaacattgcatctagcatagcattggtcactcaaaagtgatcagggcatatcggataaatatatgaaggagtgagtaaataaatgctcttattaggttggtaccatatgtttatggacattaggctttattttgggcttttgggttggaggctgtgctgtaaaactgaagagagatgctttctgcaggattaagctgtggtagtatttctctctgcctttgtaggagaagtgcaggtagggctggttttttaccactatagtgaaaaatgcactcagcaagctgcctttggagtactaggtcacttatacagcaaccaactacatatgcaactaatacaaatggatttgcccaatttatgttttcctgtgctaactggcttttggtttgctgagactaagtttgcttagagtgttgcaagtgtaaattccactttgtgcacgttatgttttggtttctgcatataactaaccaatgggacatcacccaacatttgtcctcaactgctatgcagcacagatgttgtacattaaacgtggaacctcggtatgccactgaaatgtgaaatgcagaatgtggtagcttgagagtctttgctctactgaactatgtatagcttaagtataccaagtcctagccattttccctcttggaaacctgctcacctgttggaaccccagatttctgattcttaaatttacaatgctttctatcctcataatgttctaagcctgagaacactggctcattatactgcatatcctgaagcggctttccctctttctggcagcttaaaatagcccctgttggtctgtggtctgccatagctttcgagtacctgcctctgcctgactctttagatgcccctgaagagctcagtccttcctttgtcatttggttatgaaaactggaagtgaaaatgcgtgcttaaacaatgccagaacaataggtccgaaagtgaaaaaataaagccaactggttttggtttttggcattaggtgaagggaaaagatggtaattttagtcaaactgatttgtgtgtgcatgtgcatgtgcatgtgtatgtgagcacattcacagagaagccaaaaagtccctgtaatcacaaatatccaactctctgactttgtggatcatttgtggccaattttaaattgcaggctggcttctctttgtcctccactctaccaaagcttataacagggatcagggccatcttcatggatacgacccatgcttaggagggccccacacttgatttaatgctctgcagtcactgtcttgaagtttgtaatactttttaaacaagaggctctgtatttccgttttcatttcactgggccctgcaaattatgtagccattcctggcggggatgcccttctatcagccatcagctggtaaagactcatgaaatgcagactcattttaatataatcctcaaccaagcgttattagcaacagaggccaacggactgggggcgggggaggaaactaatcgtctctgtcaatgctgttctctattaacagtggaaatagactctcagaggggaaagggatctcaaaggtaatctagttcgttacacttatggtacaaatcaatactgtctacagtctccctggtatctcctacagcccctctacttgctaaaacaactctggtaaagtgcaaagagttggttttggaccaagagttagaaaagacttcaactctcagatctatcattaactagctgtgtgggctcaggcaagttattctccatttctggagttgggcttttcactggtagcgtagtgggagggagtgactagaactggtggttcttagacgcttttgggtcagggagcactttgttgtgagtctaattaaagttatggacattcttcctggaaaaatgcatatgcgtacaaaattttctatataactctagggagttcactgactttctgaagtccaaataaagatctcagatcaaagacaactgtagtagacaatccttttaatccttctttagcactaacactctaaattgcattctttctagattacatttggtaacttctggttgaggatcaaacccaaaagccaaatagaacactgaatcttatgctggaaaaatcaggtggttagagagcacactgagggccatgttggtgtgtaggataacacagtttctgcttctcctgccaacatttaaaagtcttgattaataaataatcacaacgacaataattacaagttcccttaaagccatcatctccttccccacagtactcctggcaattactggatttgccttctgtacattgtaagtctggtgagctctcctaagaatcccttctccggaaggtgattgcgcagttttgcaaataagtagtgtgccctggtgacctgtgatggtggtttggagcctgctttttctctctcagtaacagttaaagatcctcccaactctgcagcaggaaatgcttacataaagcatcaattaaggagttctcaatgcagtggtaatgagacatacatactcttttcacctcctcctatctgctctctgaattgctctccagttcacaacaaaaaagtgcattggctgcaaaccccacaattatattactttttttccccagccacagcaaatagcaacaaggcaaccacttactaagttccctctaatttttattagatttactttctcccaagaaagctctatgagctaatgaagttataatttatatttaagacttgtccaaaatttccagctgactttaatgaggatagctgtgtgtcggggtattttcgtatgtggctccttgctcagggtaacaaggcaaagtttctttctcacagcagcccactttaacataatcctggaacttgcaatcagcttatgagaaggcaaatgtttcaccccatggagttgagcttctctccaagctcacaagaactagcaaatacagtagcaactaatcctagactttgtcatggaagcagactattatgcactaaatgcctacttttttcacataattaaatatagggaaaaaaggttacactgcagctggcactgaaaaccctgtcttgacaccatgctctgcctgacactatgacagctgagcctcagctaaataagcacagtggaccactaccatttcccaggcggcctgttgtctatcacgtctgatcatcaacatagcatggtacagggcacggattcagtctctagcactctggagtagggactagggagaatagtgtaatagaaaggaaaaaaaaattcattaacatctcagagaagctgtagaaagtagactagactggcagtgagcaggaataagtggataaggggtcctggactacacttcccaggggttagcataatgggttcgtgctggtgtgcatatattgagaaggcagttgagagtgagtaattattatggaataatactttctctgagccatgtgatcacctcccttgtgactcttctaatttcatctggatttctgccttcctgtattctctccttcacctccacacagagatattaacggaatgctccttaaccaagagtcactaattgtctagatagtcgtgttacttttgcagaggattctatcctctggtcacaggattgcacctctgacttcactgttagtcatcttgcaaatattacactggcttgtaaagaagactgagtaaaagattgtagcttgctcctccaaagccatttgacattggaaaaataactgaatgttcattctacttatcagagcagcagcatttgtatgacatggggatggcaagaaggctgagggtcacggcgtccctgataacttagtttagttactgtgacattcatctataagggctaggataggagattgacattaagtagccaaggtaaaggtgccatgcaatgaagctgacgtgtgaaatatgacaagattaagcagatgactttcaacagcttcaggctaaggcctcagaatttataatggttgcatttatgaaggcaatatataattacaagtcgtctgatagtcaatgtgagaaatttacatgttaccttcatgaactcagggaacatctaaaaataatttcatgatatttaaaaggtacctaattacaagatgaaaatcttcttctccgaaaggaattattgaatatagcaataaatattttccattcttttaaaatacaagattaatgcaaaaacaaaaacaacaacaaaagacaaaaaaccgaaagaaccaaatgaaggccatggcaaaatagaccaatactatgtagacaaaatactatctatgtaaaacaagtacctgctctcagagattcttctatctttccctattctctagtgatttatcgtaggataggatgagcccagaggtttctcaatttgacacactgcccagtggcctgaaatactttgtttatctattattcctagcttactaagagtgtcagaatcaggtgttgaattttcatcaagtgtctttttgacacttacggacaaattcacatagttttcccctttaatctgttaagacagtgaattatagcaatagatttcctaacgttgaaccatctttcttgccctaaaataaactttacctggacatgatgtattatcctttcagtgaatcactggatttgatttggcaatccctgacttaagatctttaccctatctatttacaaaaataagggttaaatatgatagtgttagagtgaggcagttgaatgaagagaaagtacaggtaggaaattaaaagaatccaggagtgagacagctatgcaacacttttgccaagaggttccgtacagtaaaacctgatattatgagatttttttctggctgctttgtccaagcctagctgcataaaagccaacatggataacctatattgccatcaaaggcagagtgatatactggctcatgtataacatttgtgagtgcctttgtgtacctgggcactgccctcctctctctgggcagacccaccattccattatataggcaaggctaagggatcaccctgatcctctgttggtattcatttctttgttcggtcattcaacaaatatgcaatatttcatgggtacctcttgttgacaggcagtttgtggggcactggggatatgaggttgaacaagacagcatccctccccccagtggaggttatattcaagtgggaagaacaaatataaaagtaaaacaaataacacacacacacacacaaacacacacacacacacacaaacacaaattgtaataaaggttatgatgggagaatgctgagcattatgagagagtgtaaccaggaaatttatgttggactgtggaggcaaggaaaagcctctttaccaagaaagggtttacctttataggggagggcattctaggcagagagagtggcatgtgtggaaggccttgagacttggtagctattgagagatttaaagaaggtcagggtggctagagagtcagtttctctccagtgcatcaaaaacaagtgaagaacaacaaccctccctgtccctacccagtaaaaaattgtaagattactatcccctagcagtatttaggcatattttgaggggaggcaggggttttggaaacagactcaccttgaaaatggactggctatcctttgaaacaatgtgaccgactaaaagggattcaatattgtaatggaaagtgaggtgctgttatttaatgacacagcaaaccttcgccaagctgctctacgtgccaggcaggtgatctgtgaagcactggagatatactgaatattatacagggaaggataatttttcatgtgagagaagccataccttgaaggattacctactttctggaatttttttttttttttttttttttttagacagagtttcactcttgttgcccaggctggagtgcagtggtgtgatcacggctcattgtagcctccacctcccaggttcaagtgattctcctgcctcagcctcccgagtagttgggattacaggcatgtgccaccacgcctggctaattttttttttatttttagtagagacggtgtttcactatgttggcaaggctggtcttgaactcctggccttaggtcatccacccgccttggcctcccagagtgctgggattacaggcgtgagccaccatgcccagcctactttctggaatttttatcaatgatctccctaataattaccacaaaataatatgccttacatttgtataatacataacaattagatatgtttttgtgcatatgacctaatttgaagactcaaactcatgaggaaactatatttactccagtttgatagatatcatagagactcaaagaaatgaagttattaagtccaaggtcacatggttagtaaatggcaaagccagagctcaaacccagtaattcataggcaaatgctttcatctactatgctagataacagctactaagggggaagacccgcaattcagtagtgctaaataaataactttttatttgttcagaatttaagagacaaggactggaagctagggatagccttgaagtagaggtgccatgtaacccaaatggccaaaaatggtgcttggttatgttgttttcttgatgtaattattaacagtatctccttttactctcaaaagtatctggtttgaatgataaattatgtggtcactcaatgttgaaggcatacctccgtagtcccctctgatatgggttggtagaggggaccagaagacaagaacagtcataaatgctgatttggaaaataagtcacatggtttgataagtcatttaatttttctgtttctgggcttatcatcttaccaatggcttttaaactttcatgtctgaaagtcatgatgagaaacacaactcgttaattgtgacccagcatccacatggggagatacacacacacacacacacttgaagtttttctgagacaatactgtctttgtagcatcacattctggtatgttctatttaattctgttcacttcggttctattatattccatcacattctattcaatttttcaaaacgaaaacgctggttgactcaccaaatagatttcacagtctactaatgggtgtgaccagcagtttgaaatgggcacaagaccacttgcttatgaaagtattagtgaaggccatttgaaaaccttggtaggaactcttacttttggatatcctatatcttataacccatattaaaatgtatacaactcatatcctacattaaacatatttcatatgtaaggatgaaaattgagttgtagttcacaagctgacatggtgctccatttttcagacacttatttaaacatttattaacgttgattttcagatttccttttcatcttctggtgacaataaactggttttttaggtagcaaacattttgtaggtccgtgaaaatctcatatccttggcactgtgcctatgaagttgaatggataaaacagccctgctttcagttaacgattatgaattcatgagtggagagaaatgatgaaagattattatctctgctagcttctctgatagaaaaccactggggcattgaattgggtactcagtaaggtgggttggttactttagtgaggagaggcagcattgaaaggcatacacaactcaggactgggagacctgagtttgaatccctgctctgtacaggactctaggccagttactttttctttctgaccctcagtttccccctctgcaacatgaagatcatgctaattctgccatgcctaccaggcaggaatgttataaggattaaaatgagataatatatgtgaaagtagtttgcaaattgtaaagcactactcatttattattaaaatattcagtggatgctatttttgtggctgcccaacctgcttaggttttactgaagggaaatttatgaacgctaaagcatcgttctcaggaatgttttgtgtgcacaaagcaaccatagcttagcacctattactattaatgttcccctgtttctctctaacacaatttagacagactcctatgtgtcgtgaacctttaggaagtctagttttcccagaaacaccattcttcgttgccaaactactatactaaataattatgcaattgttgttgccaataaccttgaagaaaaatagaattgtttatagcagagctactaacagcggatggctgatttcctgaacttccaggactccaaactgctgcaatttaatttaattaaaataaagacgaggcagaatgcattattacatattgataatgtatgcagacacaggcggacatcgggaattattttgacaaaattcacataatggatgcagatcagagcccctgaacaagccagtttgtcaaattaaataagccatctctagaattttaacagccctgtgaacttaacagtaatgatttttttttttacattgttttgcaagcagcagagttgggaaagaaactaaataaaatacaatgatttccagacatcgtactttatttagagtcaaagaataaagcactaagtccaaattatttaaaacgctcacatggagtttttagcaggggaggcttgtctgtgtatcagacaacaaaatctttaagccggatgaactagtgactgtgacttttgtactggaaccctggggatgattttactcttcttccacttgatcaatattgtacttggattaatcaatcttatcagttaccactgatacttctccaaggaaggagttcatacaacccctgtttgtaatttattcactctggtattatcccttcagttgcaaagtctgtttccttacaaaaaaatggtggtatatcctaggatctcaagcacttcttttctcattttcattgtctctcaacactctattcttctcttgtgatattctagcccttagagattataccaattccctacagccgagctacatggaaaacaagagtcccacaactatcaaactaatttagatattcaccatcactttaaattcagcttgtttaaacctgaacccttctttctccatcacccagaagtgagtgggccagagattcatatttaactggcatgggaggagaaagagtgggagatctttctagtcacagttttaaccaaaatcattgctctaactggactgcatgaatgctggtcatgtcttatattagtttccaatgtctgctgtaacaaattaccaaaaacttaaaggctttaaacaagaaaaatttctcatcttacagttatggaggccagaattctcaaatgggtctcactgagcaaaaatcaagtgtccatagggctgagttcctttccagaggctctaagggaaaatccatttctttgccttttccagcttctagtaggtgcttgcacgccttagtttgtggctctcttccctcatcttcaaagccagcaatgttgcatctctctgtgcctttcttccatagttatatcctcatgtaactctgacctccccttccactcccttctctgtttataaggacccttatgacaaattgagcctacccagatagaccaggataatctccaatctcaaatcagaagctaacaatctcaatttcatctgtaaccttaattctcttttggcatgcaacataacatattcatggtttccaaggatggacatctttgtgggggtggctattattctgcctaccaaatagctatactagtatttctgaatttgaagcaaatctgaaaagtgtcagatgcagcactgttgctggtgcaaaattcagtctatttcctcccatatcagttaagtgattacaaaatatcaccaggagtacaaatagacatttccttctttgtttatttagatttaatcataaatattaaggtatcagctcaatggttgtatatttgatcctatgtgtttccactcatttatcatctgaactatttatcatctactgtgttcttatggagctcacaatccatcttcagagtagtagattctccagcttcattctaccaactgttcagatgctttaccatggtcagaaaatggatcttttggaaacattatgccatgaaaaacaagccaatagataaatccatatagacaaaatggagatgagtggattctaggacttgggggagggaggagtggggagtgactgctaatatgtacagggttactttgtggagtgatgatgaaaatgttctggaattagatattggtggtagttgtacaaccttgtgaaaatactaaaagccaatgaattgtacactttaagtgagtgaactttatggtctatgaaatatacctcaataagcctgttattaaaaaaatgcagctgagctgcatttatgtgaaccctagcaagaaatgactactagatgctgtactggtcagctcttcatgagaggactgagaaaatttctaagtgtcacaatttaagaaaaaaagcaaaaaacaaaaacaaaaacaacccccatcgaaacccaactggggtctaaggaagatcataaagaattagaaaatatgaaaaactatttaaaagatcaaaaaattcaggtgttggttttttgaaaaattagtaagatatataggccactagctagactaataaagaaaaaaagagagaaggtccaaataaatacaactagaaacaacaaaggggatgctaccactgactccacagaaatgtaaataaccatcagaaaatactatgaacacctagaagagattaataaattcatggacatatacaccatcccaagattgaaccaggaagaaattggttccctgaacagaccaataatgagctctgaaacggaatcagtaataaatagcctaccaaccaaccaaccaaccaaccaacaaacaaacaaaaaccccaggaccaggtggattcacagcgaaattctagcagatgtacaaagaacagctggtaccattcccaccagaattattccaaaaaattgaggagggaatcctccccaactcattctatgaggccagcatcatcctgatgccaaaacctggcagagacacaacagaaaagaaaacttcaggccaatatccctgatgaatattgatgcaaaaatccttaaaaaaaaaatttgcaaactgaatccagcagcacttcaaaaagctaatccactatgttcaagtatgcttcatccctgggatgtaaagttggttcaacatactcaaattaataaatgtgattcatcacataaatggaactaaagaaaaaaaccacttgatctcaacagatgcataaatggctttgataaaattcaacacccattcatgttaaaaactctctataataaactaggtattgaaggaacatagctcaaaataataagagccatctatgacaaccccacagccaacatcatactgaatgggcaaaacctggaagcattccccttgaaaactggcacaagacaaggatgccctctctcatcagtcctattcaacatagtattggaagtcctggccagagcaatacagcaagaaaaagaaataaaaggcatccaaataggaagacaggaagtcaaactatcctgttggcaaataacatgattctatatctggaaatccccatagatttggtcccaaagctcctttagctgataacttcagcaaagtttcaggatacaaaatcaatgtacaaaaatcactagcattcctatacaccaccaacagccaagctgaaagccaaatcaggaacacacttccattcacaatattcacaagaagaataaaatacctaggaatacagttaaccagggaggtgaaaaatctctcaaagagaattacaaaaccactgctcagataaatctgagataacataaacaaacagaaaagcattccatgctcatggataagaagcatcaatatcgtaaaaatggccataccaccgaaagcaatttacagattcaatgctatttctatcaaactaccaatgacattcttcccagaattagaaaaaaaaaaacctctaaaattcatatggaaccccccaaaaaagcctaaatagccaaggcaatcctaaacaacaacaaaaaaagctggaggcatcacattactcaacttcaaactatactacagggttacagtaaccaaaacagcatggtactggtataaaaacagacacacagatgaatggaacagaatagagaggccagaaataaggtcacacatctacaaccacctgatcctcaacaaagctgacaaaaacaagcaatggggaaaggactccctattcaaaaaacagtgctgcagtaactggctagccacatacaggagattgaaactggaccccttacttacaccatatacacaaatcaactcaagatggatgaaagacttaaatgtaaaacccaaaactataaaaaccctggaagacaatctaggtaataccattttggacacagcaacaggcaaaaatttcatgaggaagacaccaaaagcaatcacaacaaaagcaaaaattgacaaatgggatctaacaaaatttaagagcttatgcacagcaaaagaaactatcaagagagtaaacagataacctaaagaataggagaaaatatttgcaaactatgcatctgacaaatgtctaatatccagcatctataaggaacttaaacaaattaataagaaaaaaattagcaaccctattaaaaagtaggcaaagggcatgaacagatgcttttcaaaagaagacatatatgtggccaatagcatatttaaaaaagctcaatatcacccatcatcagagaaatgcaaattttaaaaaagtcaaaaaataatagatgctggcaaggttgtggagaaaagggaacaattaaacactgttggtgggagcataaatttagttcagccattgtggaaagcagtgtgtcaattcttcaaagacctaaaaacaaaatttccattcgacccagaaatcccattctttgggtaggaatataaaccattctactataaagacatatgtacacaaatgttcattgcagcactattcacaatagcaaagacgtggaatcaccctaaatgcccatcgatgacagattggataaaaaagatgtggtacttatataccatggaataccgtacagccataaaaaagaatgacattgtgtcttttgcgggaacatggatggagctggaggttattatccttagcaaactaacgcagaaacagaaaaccaaataccgcatgttctctcttataagtgggagctaaatgatgataactcatggacacaaagaggggaacaacacacactggggcctatttgagggtggaggctgggaggagggaaaggagcagcaaaaataactattgggtactaggcttagtaaatgggtgccaaaacaatctgtacaacaaaccctgtgacacgaatttacctatataacaagcctacacacatacccctgaacttaaaataaaagtttaaaaataaataaattaggattataaatcatgctgctataaagacacatgcacacgtatgtttatcgcggcactattcacaatagcaaagacttggaaccaacccaaatgtccaacaatgatagactggattaagaaaatgtggcacacatacaccatggaatactatgcagccataaaaaaggatgagttcatgtcctttgtagggacacggatgaagctggaaaccgtcattctcagcaaactatcgcaaggacaaaaaaaccgaacactgcatgttctcactcataggtgggaattgaataatgagaacacttggacacaggaaggggaacatcacacaccggggcctgttgtggggtggggggaggggggagggatagcattaggagataaacctaatgcatatgacgagttaatgggtgcagcacaccaacatggtgcatgtatacatatgtaacaaacctggacgttgtgcacatgtaccctacaacttaaagtataataaaaataaataaataaataataaattaaaaggaattggaaaataaggacctatagagaaaaattggaggaattttggattatctgcctagtgaaggaaatgctgtaggataatatcatggagaagagaattagaggctttgagtatgattcagtgagggtctcagcaggaatgagatgtcgcacttgtaaatgttcaccgcagagagttcgaattaaggcatgggcagagttaagagaattatcaaggaagggagagccacctaagcactggcataactggtaagccttctgggcttgtagggggaagaggatggagtgatgatacagaaggcaagagagagcatggggatttggaggaggggctactagacaggggctgctattgtctaatgtagtctgcagtaaagcggggagagggataaataccctgagtttgttctctttctacagtctctagatggtgccactcattgaccaaatcaagtgggaagttaaagagcaaggtgttcagggaatgcagtccatggaagccagcctctcagagcacagagaaggacagaaaagagattatgcgtgtgtgtgtgtttgttgggggcggaggggtggggcgggcagggagggcaaatggagagtaagtagcacaaagtgcttgcctgttatactcacaacacccttcttagagaagctaaggcaacaaatacctgcatagactccatgctttatactatgtgatcacagtaccctggccacaacaaaatgaaaaaaagcaataccagcaactgacatttgttgaattcttacaatgtgccaagcattttatgttactcacctcatttaatcattatatcataacaaacctatgagtaacataatctttatgatattcactttatagatggagaaactgtggcatttggagattaatttatccagcgtcacacagctcgtaagtagagaaggaattatttgaacccggggaaggagtctggctccagagttgttctcataaccactacactcaatagaatagggattaagcaggactctgtaggctggtcagcaactttcacggcagcctaatgctaaagttctgccttacaagggtgttctggactgcacagtaaatggctgacacaatacaatattttctctaagaggaacctgaatatgagatacacagcaagttagcagaccacatagaatgtgaagagctgagagagagaaggagggtagttagtatggcaggaggagagatgaagtcagtcttaagtatggctgagtcaccactgtgggaagcagtggacttggaaaaacttgagctggttttaagttgacagagcagatgcagaccttctagaaatgcaatgtgtcctgaacaaggctataggttttgagtcctgcttgtgaggctaccgatggtatttcttgtactttcttatttttttgtgtgtctttacaataatttcccatttactgaggtaatatgaacctgtccatgttccttgcattccagtaaagtccaacacaaatgagttaattatttaaatatatgagggtctcttgggcagagaagagtcattagtctctctctctctctctctttctctttccctctgggaaaagaaaattgacatactatagtctaagaaatataggtcagctctgtaggaattataccatgctagacacttccaagggaggatgtctaaatgtctcttttggagagctttaaaataatcttctcatctgtccaagggtgatctacatgagctgcttcctgaaggtacaaggattaatggctcccaaactgcaggtctacagacctgtatcagagatacagaaaccttaggaaggtttctctgttttctacagagtgagagagataaagactttggtgttagtttatctctctctgagtgtcagggttcgattgcttgccatcatttcttaaaacagactattttttttcttttctgctattaaggtatccctcatatatgaaattatggtagtggtaggaatagtatagtatagtgagttcttttaaaaatattcttacttgacaaaataaaacattggcaaatctatctctgcctcattttaaaaaaatgccttttgtctgggagaattaaatacctgaaaaccataggcccaaaggacctcttaaggtccctgctatctataagattctaggttttaaagtcttgagattagagaaaatcaaaaggaataggaaggcaggatgattttttatttaacctgaagaagtaacaagttaatgaagtctaaccatcttagacataaaagatagtaagtggagatggccataagttagaattttgtagtctctaagtagaaatgacagtctaaatgtcaaatccaaaaacatggccttatagaacgccacaccaaaggtcacatttagaaggcagcatttggctctggtgacagttacaagtcagatattgcatgagtccattggtacgcagccatcatgaaaggagaactaaaatctttttgaagcaaaaatgtgtcaaaagggaactctaaactggcctcaaggtagtgtttaaattaaaaatgccttaggtcctttaaacagaagaaaatcagtaattattccaaatacaaattaacatgtaacaagtattttctgttctgtgcatgtaatactgctatttacatataattagttcaacatacccaaagcctctgccaggccccaaaccttctgtccatagatgtcggtcttgttccaagcaaatgtgtagacaagattaattgcggcgggaaaccacttctgtgtgagtcgcccttccacagctactgtgaggtgtacttttatcatgcctacaggaatcgttgaatgtgtcagaaggatccgtagcagggttttatacccaggggtgcggctgctcaggtaactcagcctcacaaagctggagggaatgggaatttcctcctgtacaacctgaaataaaaaaaaaaaaaaaaagccaaataggctcttgtcagtggtcgcaggtagatgaggatattgcatgctttgttgtctttgaaacatgccaaaggagagagcttaaacaggtctaaggacgtcaaggcatttgttcttgaatctttgtgagactgtatgataataggttttgaattttgcaccaaacctgaatggagacaagacccaaccttaaggattgcatttattttttccccatgccaggaaagattgtgtaaggaacaatttcagcttttcaatagtgttccaaaaactgcttagtaggagttgaaaaagatcataccgctgaatgtcaagcaattcagcactatgggctccattaaggggtctttttcttatacagacatacacaaaatcttgtttggtgttaagtcatatatcataaaaccattggtgtaatccttattcaggctaagctctctaagaggaagaactcaagaagcaggcccagcaagtgatattttatgacaaagattatagtttccctagaattaatctttaccgatgccatcaaattcgttttccttggagctttgaaatgaccctgaggccaaatttttaatcaaatttttcttacatatttctctgtgcctggatgtagcaatggctgggaacaagtttctccaagttggcacttgtgactgagaagcaaataactctcaccaattcctctgcaaattttacactaaacgttggtctcagagtaaaaataccatgtggctttaattaattgttattacttgtttgcttatcaccacagataaagttaaataaccaaaggtggtaactaaaattgaatcatgtgttctttgactttcatctttcaaaagacctctgaagaaaaagcccatcctattcaatacacttaaggtgacatgaatagcgtagatattttcatgctcttattcatttttacctcagaaccttgttctctcttacttttccaaacttgtgcacatagaagaactgattgttaaacatatggcatctcatattgtccagcatttttggtctttctcctgtttctgaggacacgataccttttgtgtacactttgccagtttttcttcctctaccttagccatttgataccagagttgtccaccagctgtcttctcagttggtgacagaagtacaatagagaaggatagcctgacactcaccaacttagtagttcattttcctaagaaaacatgcaatcctaaataagcctggaaactttcgtgctgaaagaagacccgtacttcctaatgacatctgtgaagggattggcataccaatcaaatgtactcattaaacactgtcttgttttttctccctttgtaagcaaagggcaatggaaaagataaggggtagctctttggactgcttttcctgaagggcagtatttttgtgtgagccttatctaagtggtattctctaggcactgctaagagctggtgggtggtgttatgatgaaagaacaatcaattctatcttggagcatgcatttccttctggatttctggatctgttaagacctatgagtccattttggtggtttccacatttaattatcattaaaatgtttctataatgtggtgagggaattgtactatggttgaatagtttaatattgaaatgacaatattgaatgttcaataaagaataattctcaggaatgttaaaatatcgaggttcaaaaatgtcttctcctgactataaagcttgaacactcagaagcaaagcttttttaaaaaaaaaaactgcacaggcttgaaaactacatttactttacacagctagatgagagaacttgtcatgtcttctaagaacaatgacaatgatacaaactagacaacaggaagaaaagtagatttctttttttttttttttggagacagagtttcactcttgttgcccaggctggagggcaatggtgcagtctcagctcactgcaacctccgtctcacgggttcaagcaattctcctgcctcagcctcctgagtagctgggattacaggcatgtgccaccatgcctgactaattttgtatttttagtagagacagggtttctccatgttggtcaggctggtcttgaactctcaaccttaggtgatctgcccaccttggcctcccaaagtgctgggattacaggcatgagccgccacgcccagctcaaaaactaaatttcttaaggagctttaatttcagaaccacaaacagtccaagctcatggattatactgttattactaataagccagctagctttgttcttagagcacagtgtttattaggtcaaagattggagtttaattcttatgaaagctacttaatcttgttctattccatggccacagacagcattctaatgccctgaccaattgtcttaaaaatgtatgccagaaaaacatttgaagacttctcttgacaaataaagggcagcacattataaggatggtaacaagaataggaaaaggaatttagctattatacactgttgaccactccatgatattattattttatacattcaaaggccaatatactcacctgcagctcaggaacaatagttcccctctctggacaggaccctccaaatgatgtgagcggtgaaggaagcacaatagggtttgggctgataaagttggagatatcgcaggatggcgggtctgatacaactctctgcatggtgactttctctaccacaataaactgattccaaggcaaccagagtgttctcttctcaggcaggaaaggggatcggtcgaagattaagatgacagagatgccaccgatggccacgaggtcaaagctaagaaggaaaaacataagacagttgcaatcaaatgaaaaattaaaaaattacagttaaaaaataggttaatttcagtgccctttcctttttggggggactcaactatatccacttgtattgtctattttataaattctctctagcaatgtattcattccgtagatgacttcttttcactatctagtggtcttctaggaagacattccatgtcaccagttgatattcccttgaaatttgtaaaccaattttttttttttttttttgagatggagtcttgctctgtcaccccaggctggagtgcagtggtgtgatctcggctcactgcaacctccgcctcctgggttcaagcgattctcctgtctcagcctcccgagtagctgggactacagctgcataccaccatgcaaggctaatttttgtattctttagtaggcatgggatttcaccatattcgtcaggttgttcttgaactcctgaccttagatgattcacccgccttggcctcccaaagtgctgggattacaggtgtgagccactgcgcccagcctgtaaaccagttaattttaacactatcttaaacaaaaatcactgcatgcatttctgcaaagccaaatctgacacagctgctccccttatgctaaagataacagaaagatgactatctaacatttagcagcatctttgagaatgatgcattattcattttccaaaaaatcctataatgtaacataagaaaagtaaggagccaaaaggttaaatatcttgttcagggtcacaaacatcgtgtcagaaagcagacagtgtctttgagatggcatttggagaaagatatcagcagaggacaattgttagggaaaatttctttgaactcagctatgcccgaccaagccttctacatttgactaccctctttggcctcctagtctacttgcacctcagatttaagatctctggtttgcttcacaatggtttttggtttctttttgtaagacagcctgtaatgaaccctgcacaacttcaccaacaactccttctctatccatgacaaagcaagactacctctgctgtaagccagctctgtctatctctagatgtggtctatgacaagactattgcattggagctgaacagattcagatttcatttcattctgcactagattacttctcttttaagtataatgacgtctttgagatgacgtacttgagagcatctgaaaagcataaactcctatataaaaaagtaagataatgataaattattatcatttttatgttaaaaatggataaagggcaatatgatgttacttaatattcaaggcaacttaaatccacaggagagagatgtaagcaattgcctgcattaaaaaagatctttcagcaaaacactttttcaacgataaaaagccctgatagggaatcagacttaattatggacatctcatcactctcttcctatgacatttattatatttattatagtattaccaatcgtgttttgttgcagaaatcttgcagataaagataaatgaacagtaacaaaggatggataataccgtgttttttattgctgctttttcagtaaagtagcttaatattaaggcagtttccaaaaagaggatttgaagaactgcattagctacagaaaataatttaggtttgaaccaaaagaaaaaagaaaacacaaacggtttatggtttaagacagagggtctgaattcataatactacaggaacagtttaaggcaagtgtagtggggagaatctgacactacttgtcaagaaacctttcctctagttcaccttctatgtggatttaagtatgtgttcttggggaagtttatctgcctcacccaaaccttgactcttgactcaaaattgaagtgcttatttatttaaaaacaaaaaacaaacacaaacatgaaaactaaataaactatccagataaaaacataggtgcctggaaattattctctctctttttaaaaaaaaacttttattctgtacttctggaaagattacacagacaggccaggcatcttgttttgtagaaagaatgtgggtttggtttcatatatatctgggtttgaatcccagctctgccctgttagctttgtgtctttgggctagttatttaaccttcctgagatgcagttttctcgttagtaaaatgaagcctctataatctatctcttagctgctattgtaaatgaatgagataaagacttaagggtcaagcatatagtaggaactcaacaactgttacatttcttctcaaatcagattcattgccctactacatttgccatatgttttcttttttttgtagttcaagtgaactataggtcagcttttgattatctccatgagcagatactgatttttaaggtctccttgggacttcccttaggcttcttatgatcgttcattttatatctctattgcctaggttatagttctaagttatttaatgaaacaccaatctaggtattgctgtggaggtctttcggagatgtggctattatctataatcagttgaatttaagtaaaggagatgatccttgataatgtgggtgggcaaaactgtttctgtgaggaagaagaaattcggccttaagaccactgcatctctttcctgagagtttccagtcttctagcctgcccgacagatttcagacttgccaatccccacaatcttataagcaaattccttggaataaatccctctctcaagacaataatatcaatatctatatctatgtcatatgttgtttccctggaaagccctgactgatacacttctcatctttccacctcgcagttatacacagtaaacactgcctggctgactcattaattgacatggagacggaaggtggaactgtggccagagatccatctaaaccatttccaatgccaaatagaatgctgaatgattacttctttgggatttctcccaccacaaaacacctccatttgcacgggccattaataacaggttattaagtcatatgagagtggatataaaagacccaagggagaggatttatttgtttggagattgttgtcaacacataagtccaaccagtcctatctacagatggaaggctattgacacctatgcaaattgcttatctctctctgcctcatggtatccataaatgaataaacttttgccttgaggagaatcaaagggaaccctctcttcatcttctagtcttcagaacaaagttcttgagacctttaatacttctcaagaaacttctaagaatgtcgtcacttcacctgttttgcttatcattagctgaactatttacaaatagttctctttcaacacttgactgaggactggttatatacctaagttgaaggtggtaaatcatagaagaaaagagcaagattacttgggtttaaatcttgaactctatccttattatctggataaattttctcatacaacaaatggggaggatgataataatgatatttatctcagatagttgtgaggatgaaaacagagacattcatgaaagtgtctaacatacagtagacactcataaacattcacctttcctttagaataggcttttttcttttctgctaagtagtcccttctctatgtgagtatctaatctcttcatacttttaaagggctcagtctttcaacaccatccttccttctgctttgaataaattactttggtcccatgatctagaccttttctggttctttagggaaacttgtcagtttacttttgcaagtagttgataatgggggtaaatatttctacatcccacatgacatatttgcattcaacggggactttgagagagctgacagcttcacccaaagcagtgataccattggtgaaaagtataagcactgtggccgactggagggattgagatttggacatggaggatcctatcagcaactctcatatcacactctctactaggtatctagatgctaatctcagcctttctatactcttttgacctcaggtatatttttcttttttcttttttttttttttttgagacagagtctcgctttgttgcccaggctggagtaacgtggcgcgatctcggctcactgcaacctctgtctcccaggttcaagcaattctcctgcctcagccacccgagtagctgggactacaggcgcccgccaccacgcccagctatttttttttttttttgtatttttagtagagacggggtttcaccgtgttagccaggacagtctcgatctcctgacctcatgatccgcccgcctcagcctcccaaagtgctgggattacaggcttgagccaccgtgcccggccgacctcaggtatatttttcttatgattttctacttttgaaatgtacttactcaaactgaggtagcaacaagcagagacatataaatggaaactctcatcacactgtcactttatgtccaggaaatgacagtggaacagtctggttggcatttggggcccatattttgaatgtttacacctttatggagcctgaggggagttattgctagaggggattctgactagtatctgtcatctacataaactcagttgtcactgtgagttcagcagaggaggggcttggggcatttcacttaaaactaaagacacaaaaataacaacaaagattaccctctttaatgttccctgtaaactgtacacaaacatttttagactttttaggtatcaagattcttttaggttcttgtgtgaatatcaaataattcaccgaaacctttgtatgtaagctaaaaaaatgaggtcttaccaggcctccacgagaagtcaaagtcaaatgtctcagaagacatattctatttagagaaataacccatttctcaatttgtggcatatggttgaagatgtttgcaagggtgaggctagttttaagcaccagttactggtgagtgcactaccaaaattccgttattcaatctaattgggagaaagacccatttgaattaatagagaactctgattatagaatatttgaaaggaaatgaagttttatatatatatatatacacacacatatatatgtgcatatatatgtacatatatgtgtgtgctaccaaaatagttctgctgagcttgttataatgaagagatggttagttagtaataagcaatataatttatacataaataatttatataatttactaaagtccttaagaacagtttattttcttaagtaggctaaaactctttcttattatctttttaaactaattttttataagtactttcttgacaggctcttggaaaaataaatccggcacagcccaagttgaacaattaacatttctaaagtgtctaggactaataaggtttgattgtaggttcttgaaatgagatagtttctcacagtgtgataaagctcgaagccaacaggtctttttttgcgtatgattattgaagtggcttgttatgagtaggacattttaagggtagtcacctggagactagggcacctcaaagccattattacagtgtccctgagagtcataaataggtacctttaagctggacacatgggcctattgacccaaatattctgaatcaatgtctgtctaaatgacggcaacaaaaatgttgttgtgagcaaatccttttccaggatgagaaggttttacttcaaggtcttgcttctcagatcttagagaacccccttagagagcagcctggtggttggtgcttcaggataaatcactataattaagtaggctggccaagcttgtctatcagttgcagccaatagtcaaataggcagcctagggaggacacatttttaaagcttctccattaatgtggtggaattctgtacttttggaagaaatatttttgatgcattcatttctgaaatatttgggggttactatggaaaaatagcctatgtgttccatagctccttatttatcatttgcataatgtcactgatctttgaagttggatttatagatggaattagataaaggatagaaaacttttcacatggcctgggtttcaagaagactcgagaaggattagaagaggaatccagtttgaattaattaggaaatagaggaaataaatatcaccaatgactttttgagatataacttgaagaaagatgggtttaccatcactgtatcatctgagccctggttttacccctggctagaagtcagtaattggcccccacaatgatcagaaacaacattgacataccttccatcttgccggctgatggtaaacccataatcactgtggtgcaagaaactgacattcactcccactagaggagttccatctatggccaccacttggcctcgaatcacacaggcacgcctgcaacacaagaccaaaggcaaacagaaaagcatgttgagactagattctagaagtcaagttgtagaaactttggaaaacagtcaagtataacaaagaaaacaataatttcaccaaccagtagaaaactactaataacattctggggaggagtttttttttttccccatcaaaattagaatcatactaagtatggttctgaatctagatattttaaggttaaaagcatattattaatattgtccaatgtatttagaaattccttaatatatcatttttgttattatataatacacccttaaattagtatcctataacttgcttaacctacccctgattttcggacattttgttgtttcttaatttttttctgccttaaatttcttattatttccttgagagagagtcctagttgtggaatgatacttttctcttatcaaaattaaagttaattacattagttaatacataaatatattgtaagataagactaaagtccctactgaccgcctttttcctgcttcttggtgttctcatcagaggtactcagcactattagtttgttgtgtgcattttctatgcatttacatatatagtatgaatatttttaagcctcctgatatacactgctaaagtgcctttttctggtaaaacaaccagccaaccaaacaaacaaatttagttgagcacactttaagttaaagtctgcaaaagagacatgatccctgacaatggtatactgcttttcttgcctaatttaaataaaatatttcaagacactttccctttaaacaaatgagtcccatccttactaaaaaatggaattccattaaactagtccctaaatagggctctctttcagggacatagtccactaaaacatacaagactttcagcgctagcctggctgacaagctgtaacaaatttcaggaggctggcagttaagaagagtgccctgggacaaatcccaagcaaggatttttttcactggtctgctgggaggaagggacagttttttcaccagagtttaatcctagtcttggcagccctgagctcttggacatgaattttatagctggagctggcagggttgaggaaggttgagcaaggtcagtgatttttcctagggcatcaataccacctttttttttttttttttttttttttaaccaagtgggattctgggtatccagggcagctcaatcttggattaaaggggaccatgttattcagacaaacatggcttttcagattaatcctaatcatttcatcctggaattatacattcttttaacagaatcagaaagtaaagggaggaatgtaaaggctcatggccacaaacatcatttgagagaaagtaaaacacctttgaataagctacagatggtagcttataataagccagagttggttgtatatgttttagccaataaacctcactactaaattctgttgcaatcagaggaattggttataagttatgctaataggatttatcctcttctacgtaagggctttcccaacaaaagttacaagccattaagtattacgcaaagtaagcgagtgtaattgttgctattagtgtttgtgtattttctgaactctcagaccaacattcatagctctgtgacatagatcagtggcttttttccagtgagctgtccattttatgaattatgtaaatcatggttctgagtggcatgcaaatggcatactggcacttgcttcgccatgtttgattgtcccaatttctgtatcattttgaaatcccatttgttctaatagagaagacatttgaagtcattgagttctggattttgaactaattctggcagatctggtcccaggttctaagtccaatgtaacaagaaatgaaaataaaaggacatctctgattttatacagtaaccttttagatgtctttacagagcaacttttgacaaggtgggtgtagattgaatggaaacaagctgagaaaatctcctgcaaatgacatatggattggttccaggggggctgtgaagagactgtagtgatgccaaacaatttagaaattagttaagcattgtttcctgagctctcaatgctgttagctgctttgggagtatggtgggggttagttattaccttgccaagcctccaccagttaacaaggtggcctttacaacaataacacctacctaggtgcttgctgattccctattcgcaagacaattccaaagtcactctttttatttgctcacattaatctagacattgtgtctttccacagctgtactaggctcaattatttttgtttttattttgtcaagcctagttggcattattttctcatattttatgacacacacagacctgtctctcctctctgctgttcttttattttctatatggcttatatttatgaaggtccaagctggtgagtgaaagtctcataaaagttatcattattctgtgcatttcccttgtattcctctcttccttcattctgtatctcgttctgagtagacttgtcttttgactcttctgcttcttaatattcctcatgttttatgaagcacacatatttgtgtgataatgactcatcaaagtcatcattattcaagacactgtctacctgttcttcttttcattcatttcactcttcatcactcataaataatgctcacagacttgtctttcaactccccttctttcttattcctcatattttatgatccacacaaacttacagcatatgataaaaccccataaaacttatattctacatttatcagtattgaactccctttgtaatgtattagactttaaatgttccaagattccctgtatcttgctgcatttgctcccattatttatacactccatgtcatccatttttcacgagaataactcttaggtctttttattcctggattactagtacttactgtaatctttgaacaatatcagtcatccagtgtcagtttaaattgtctaaatttcaggacagtattaaagtattctttttaatttgcagtaatcttgactgacactgcatgcagaaatttaggaaaaatctacctcttaggcaaactctccatttcaaaaagaaagctcttgagtgtacttgctttcccaggcaggctacatcagctccaaatggccattagggagccttcatatatattctttggaagtatggcatattgtgccacttcgttcagctcaactgccattttgtgcactcccagattctaaattctattttcttaataattgtggatggtagccttgtatctggtttgtttttcctgattccccacagccactaaaatatagttccttccctcccatttatataaactattttgattatgcttcttatatctaaggcagcctgtatagttcatttttttccaaagttagatcctagctgagtagtgaggtatgtacggtgagggtctgcctttgatattaccacagtcctgctttctgtgtttttcctattcccattatggtgcctccctgtttcctcttccagagagtccctggcttcctcaaatcaccattgaaattagtcagccctacttggcctgtacttggtctgcctcgaggaagcatcttgagttcttgaatttttgccacatcaaaactaccttcaacctgagttttggtccttaaaaatttgtctttttctgaaacattttcaattcaataatatatagaactcttctaaatctttcaagtaagatgatagaagctactgtctggactgtcatgcggctggccctgcacatgtgtacagcagctatgtgcccagcataactgtcgtttgtgttggttttgtgtgtctatatgtgtggtcttgtgtacgctcaacggcaggcattgcatactttctgtctttgcttgggctctcctttgattcacagacatgaatgagatggatgctttgcttggttgaacctttgaaaacaagaacttctccctgctgttgttggttagagcaagataacttgaacttagatgggcatgtccaatgtgactctagaaacatgcatggggaatatcacccctcacaagtgtcttttttcctgttctctagagaatacaggctgctgccaagctgtctacctgctgtcactatgctaaagcagcaaccccaaaggaattgcttctccactttaactaaatgctgaatcctctaggtgtttggagcttggtctgaagaacagagcatcttgggaaatgcaggtcagaatacactttactgggagccttatttaactaacaagctgcttgttagacagttctgatgcaaaaggtctaattcattctgtatttgttattttcatggaatagtcaaattatccctagccttcaatcaactcttggttccattctcctcttcccttatttgttgtcttttgtcttcggtgtcaaatctccgatattcgtttaacacctcaggcaacaacattaacctcaagcacaatagttggtttgaaaaacaaggctgaaaactaaattgctgaaagaagatgcaatttactacattgcatttctgattaatgtctttcgaaagaaaacagactcagggctagaaaagttacagcgatttccttttgttgctaacaggagcataagcagcctttgaagggtaacattcaaaatcaaggacctagccagcaggggatctagcagcaggtgggcaggttaggttgttttttttccacaggaacagatgaaatcctttctacagctgacagctctggtcaaaaggtagcactgagaaggactgggctgagagaggctatatgaatcctctgctcactagtgtttgaatcctgccccgtaaattcctctttgaattgtcagttggttcaagtctccaagggatagaaatttgtcacatatgaggtgtgactggaggattcccctaacaactgtagctactggggtctctgttggaatgcaaatatctctgaatagttaggacaaagggtttgtgatgttcctgttaccactgccatcacatagtgaataaaggggcttctctttagaaagtaattttgggattgtggtgttggtcctcagtcctgtatgataatctctctctcttatagatcagtgattctcaaacttgattgtccacgagaatcactggaaagccttattgaaacacagattgctgggtcgtatcctcagagtttctgatttagtaggtctggtgttggatcatagaatttacatttctaacaagacaaacctttgagaactgctgctttaggaaaagcaaggccataacatactcagccaattaaggcatatgaactcctggagagggaggcagaaggtataaaccataaaaaggcaggcaaatcgaccactggttcacaatcttacccttatgaaatctgtcaggcatgaattttaactcttccatataaacttctggaaaagggtttgcaacaactgtagtttggggagtcatgttgaaactgtcatgacaaaaggggtggctgtactacaagatgaactacagggtcttcaaattcagagattataaaatggaaatatgttttagtccaatttatttgtcccaaataagtgtccatttctcctccatcctcattattcttattatacaatgctcatacttgtgttattgcacttatcataaccggtcttggatgacagttttagatctgtctgtctttttattagatagccagggcaaaaactgtgtgattttcttccctgtgtccttctcagagcctgatgtacacagcacatgctcaagacaggttcatagaatttcaactcaaatatttaaaaatatagttgtaagatccttgcaacctatgctcatggcactgcttcaagcaagggcttcagtgactacgttgagattcctgtgtaacagatgccttacactttatttattagaagccaacactctggattgagcattaggacattctcatcaggagtgttttgtttgatacttgactattttagggaattaaacagtacctattgtgatcgggaagatgaaatgattagtcttcaaatgcttaatttatgcacgctagccccattcttcctttatatattattatataattactatttgctattttataatttaaatgcatttgggacttctaatatccagatattttgggggtttccttacaacacgtgctacttttgatatatgttatctaacctggtacagcactatgaaaacacttaatgttatagcataaacctatttccatgttctgaaaattcaaatgcagtgaatgctcatatgcaaacccaatacaatgtcctcgttagtttttattttaatatggtgggttgatttaatcctactcagttggtcactgccccaaataaacaatgcctaccaagtgggtagcattaaaagcagctgggagcattagccatcaacattctaggactctgggaaaggtggtgctattgaaaatgcagatagatttttaagcagaattattttcctcatggctagtgatgtttcaagtaaaacaaaatgggggcactcaccctgaggtagggtggctattttcccatctgccttggtaattgcttgtcaaaagtacgcttgctttggaggtctgagatccccaaagtaatgggaaaaagatcaagtgttttgaagcaataagaaaactgacgacacagtcacattttcaggactgcgtaagtgccagtttgcttcatttagacacatgattattttcgtccagaatttgaatcctgaaatatttgtcctgtaagcccttgcaactcttgaatagtctgaagttagtttttcccttaaaatttttggtttgttttttgcttgttctacacatgactcaaatgttttctctttgcaatcagccttatagggttttgttaacctcattaacctctcttgtcacttctctgaatctgcctttcgactaatggatagtcattaaatataggacagatccttcttgttggccatctcctgggcatatattactcttccctccacagacgaagaagtgtgtctttgctctagccacagctgtgttctagctctggcttgctagtaaccaccattgttgacttttcctaagaaacagaattaactcttagctctgtttgctctttatgtagggtgggaatgttctttcttccctgacctctccccggttacctcacaaagatgtcatcatagtaaaattacccagtaaaatgatcacttttgaactaggcctttcaaattctattgctatgtaccctgataattattagatatatatgttgtataaataaaatatttattatactatgaatcaggtactatgccagatactttccttaccttatttcatttaatgtccacataaccctgagtaggtaaagctattaggcccatttaaaaaatgaagaaacagactcagagaagttaaaagttttgcacttaacacagctcataagtggtggaggggtggagatctcttgacctggcccccaaagagcctgagctgtattgcagatctttctgagtcaagatataaacaatatggctacaaatgaaaagaaagtgatcgcctacaaagatggtgctatctacagaattatggctacctggagaaatttaccaactgctgagcacttcctatgtggagtgtgtgtagtggagatgagctatagcatgtcatttgttctttcttcccaaacttgcattcactttgtcctctccagggacaaaatgagatgacagaaccagctagagagtcattacaagcaaatagtatgactgagtagtaggtaataaggatttgagccttttaactttacatcctaatggagcagcaagtaggatagataaaatattagaaaatacctattcatgctgagataagttgtaggtagctactggtatcattaattataactgttaagcatctcagaacaactgagtttcaaagtatcataaatcatcagttgaaacagccttttgaagatctgtgttctgatttttcattcttctttgcccaagagcatttgcaaagaagtgaaagtctcacattgtttctttttggtacctttaggtgttgactgctgatttcaggagacagtcagcactataaatctgggaaccttctgcactttgtaattttttaaatgtgttttgaacatgtgttttctgaattttagcattagacagtatagtctgaaaatcaagagatcccatcttcagtaacacctttcacatgaagatcaaagtgctttattaggaagcagcaacaaccgtacttcccaattaggacaacaacttcagaggtgataagcaagggagattgctcaggaaaagcaacggggacagacaaacagaataacaagtaaccacggccaatccaaaacacactggaattctttttccaaacgtgagcaggtcatctgcagtgccttcctttagaaaggaaggtgaacagaaggtatatttgaggatgttgatgctctataaagagcttacccgattcttagtctattcaatttattcagcaattgtcgcactgtgtatttatcaacccctagttgtgtacttggtgtaatgtttttcatgttcctagattaaaaatacccaaaaatctgccattagcaagtagacttagaggtctttaacaaatagattcatgaaaaagctaaacgcaaggcatatggattcaaatttgtacctcagtgaaattacaaatgtttatgttgtcgaccttctggggttactcgtagatagacaaaactgcaacatgttaattctgtgaatgcttgaatactgtaatagcactatatttccttttaaatattttaaaatataggcttatcttttaaaaataattccaaatcagtaagtggtttctcaatatttgatttattctaggattaacactaattgatgaagatctgctatttttttctgtcatgcatgagttaagtggtctaaggctgttactgatttctctttccaggtcctagtcagttggtctgaggtattcaaattttctcaatgtcctcctggagggcaggcacctcatccatttatcggtaaaacccagtaaccaatatgcagtaattccttgacaaaggtttgttttacttttccattgcacattatgtcacagaattttgattcaacaggcccctaaaagtcaacagcaggctccagtttctgttaaaatctattgcataggggtccaggtggcaagaaacatttataccaagatcatctaatatacagatgaatgctattcagggttctgctctagtgtcacctcctcagagaggtgtccctgggccactctgtgtaaaatggtccttctctgtccctaacttttatctcaccttacagtatttataccttcctgacatttacttttttcattgtttgcctccctcactagactgtatggggaagagattttgtccactataacccagagcttagaagagtacctatcactaaatgaagaaatgaaccaagtaaacattataatgttcatacatttaaagagtgaaatgattaatcttcccccaatagggattgtcttgaaagaaactgtaggatctattgttttaaatgactccaaagtgtggttaatggggatttttttttcattgtgctaaatgggatttcttttggatgattgttttttttttcctggaatttatgtttggtacacacatttcaaattgtagagaaaattatttatagccccaaatgtcaaaggatgatgaaactgtttgcatatagttaagctgttcactgtccaaataagctttgtatttttcttgcaagtcatcaatagtctccagtgtgtgtcaattttagcagctcttcatgctcacccgagccaattagtcccatctctggattattgctgaaaacttccaggtcagtttcacttctatagttgtttaatgactttgtctaatttgccagaatacttcttgtcttacagggctacctgtcttccccatcaaaacagttgaatttggactcctgagctgatgaactccaagctcccttagaaatctgatgttccatgatccatagacttactgcaattcataattattttaattatttatgtatttacttgatgttttgactgcttctgccactacaatgtaaactctgaataaggggactgtgtttcttttgtgtatctccatctgcacagttcctggcataaagtgagtactcaataaatgttgttgtatgaatgagtgaatgcatatccttcatcactcttgaaaaatgaattgatattagggtattatattacattaagaatggcagaagaatctggtatctcttctatctctttctgaggtagtaaagtcctcagtttctctggaaataccaatattgtaataaaatatatacttaaaacagtaattagtatctgtcaattatggttattcttaagtctcagtctttattcaagatcagcagcttctgcagcgatgaccatcttcctgcaaccttccctcgatctcagtcttgggtcaataatttgttttgccattcacagaatctcaaatggtatacattcccagctcaactgagggcagaacgcatgttacattaaacaagttatgatgagtaattatggctgtcaccaggtatcatgactaatcgggaacaagaatcaagaatgtattattgagtagggtatagtaaaggaggatgaaggcttaggtaaataaaaagtttgccaaaattccatgttcaaggcatttgaagtacttcagtttgttttagggcacttctctttggttttcttgcgagacagaataatgatgcacaccaaagtgagccagttagcagcagtcttcctgctgacctcctgatattgctccttatattccacttttctcttagcactaaattttgattatctaacccattgaaaacagaattattgatgcatacacaaaatcataaatgatgtcaattattggcaggttgtgacagtgatggaatatatcacaagttttaaaaaagaataattattttgctattgttatattatcactatatctttcatgaattttgtttctctgctatttggagaactgtaatcttacctttaggctggttctacatttgagaattggattatttaaggtcctaatatcatttgtgtgttctaggcaaccaaaatgagtttttcattagcaaatatgagaagagcatgatatagtttgtatgtttgtccccgtccaaatttcatgttgaattataatccccagtattggagatggggcctggttagaggtgactggatcatggggatggatttctcgtgaatggtttagcaccacctcttggtgctgtcatcacaagagtgagtgagttctcatgaggtctggctgtttaaaagtgtttgtcacctccttctctctttctcgctcttgctttcaccatgtgacatgcctattgccctatcaccttcaaccatgattgaaagcttcccgaggcatcaccagaagctgagcagatgccagcatcatgcttcctgtaaagcctgcaggactgtgagccaattaaacctcttttctttataaattacccagtctccagtatttctttatagcaatgtgagaatgacctaatacagagcactcacacttcaaaatcataactaagctactcactcacttgtttttcacctacttcatgccaaatactgtgttaggatctggggatacagtggtatcatagattaaaggtggccaaaaattatttgatactgctctcatcaagaggtgggatctatgtccttccccttgaatctaggcaagctctgtgactgctttgaccaactgtgtatgacacaagtgacactgtgacaatttctggacccaggtcttaagagactggcattttccatttcctgtctcttggaacactcactcttggagccctaggctaccatataagagctctgacaaacctaaggctagctaccatgccagtaggaggcccaagtagtcaaatagagaggctacctgtagagagaaggatttccatctgctgtccagctgttccagcccccagttatttgagtcatcccagctgaggcttccaacatcatggagcagagataagccatgctagccatgccttatctgaatgtctgacccatggacacatgaaataggatgatactgaattgttttaatccattacttggaacaatttgctacatagcagtagatattcaaaacaagaagagaacaaatcggacttggtctttgtccttacagaacttaagatttagaaatgatgacaattcagagctaacattgtacatcctagggtgaaccaagaaactgaaatgcagcaattccaaagaaagctagaagaaacccatcatcttgtttcatttttttttttttttgcttgttaatattgctattatgtgcctagtgctgtactaaatttggtcctaattctagaaattttcaattaagggtaggcattccaccagagtgggcagaagaggtcaacacaattgattcagcaggactgttgcaagattttagatctttaagctgttcttaaaatttactctaagttatagacataataatcaaattcctgcgaacatacacattcttctcataaaatgtggacttttttcctactttggtgggaccgggattatctgatataatgggtgggatgttaagacatcataggttaagatccactggcctagaggagtttattagcctaaggtgtgaggcagagtgtataccaacttattcatgagatatgcaaaggtactccagcgaactaaggggagaaatattgttccattaatgtgatttctagatcatgttcagtcatctttttcctctttttaaaccactataataaaagttcaaaaattaagtgaaatgataatgttgggtatttaaaggctctcagggaaaaagatcagaaagaaaaacaaacacttaagatctttccttggaaagctgcagaaactgtatagaccagaaatcacaaactcaaatgccagcaaggccaggcatgacattgaaagtgaaggacgtgagtcaagtgagtggtgagctagaaaggcatgccatgtcccatccagaggggcagctggcccttaagcgtcagaccacctatgccgtgcccatgcatcctaggttgcccatgcatcccaagctgtgtaaattttctggagaaggaagatattctgatttttatgttggatctcctaatttctaaatgtcaggacaaacaaaatacatctgtgggctgattttaagcaacctctgatatggacatctgacacggattgacgtgaggatcagcctctcatggttacaaaacagacagatgagtttggttagaccttgctgtcagccgctgcactaaccctggtaagattttgtttttttaaatgcacttctccactagtgatggcgagtgaaatgtctggctttgcaaattactgctgtcatttagtttaatgtactcctgcttttacatatttataaaaaccttttacattattaatagtgattaaatgcttagacactaaagatcaataatgcttctgttcacctatttacatttttaaaaagtaataagtcgtacagggctcgtagaatatgtggtttactttgcagtcatgtttggagtagttgaagaaaacaaactcgagctacaggatataaattgcatttaggaaaaaaatggcaactcagttgagtttgcccaagatcttcaccatgggcagggtgcacgttcacattgttgttacaccatcacacggcacagaacatacatattccatgggctttcacatgtgggtgcagctaactcaaaacaagaaggtctggtctctcttggttgcacaaggataaacaattttttagcttttgtgtgtccttgcaacacttagtcacctgtgtgccaccatctttagctccaaaggtttctgatggtggcaacattcagcagcaaatcagctgtgtgggtcgcattttgccggtaggcaaacaagccccttcaaaatgctttcttcacccgcctacccagctctctctctcaattatgcagcaaaaactaaaaagcaaagtggtttgttcacctgattatggcacataagtgtcctagatctgcctgaggagagcaatcctacagtccgagatgtataagagccataagtatttcacattcagctagcccagctttctaagtagccaaaatggcccagcatagtggtttagagactaggctgtcagcaccagttcaaattctgggttcgaaatctgactgacactcattaattgtgaccctgaacaagtcatttactgggcatctctgttcttatttcctcactgacaaatggagatagtaatagtacctaccatatagagtttttgtgaggattaaataacacatgtaaaagtttagcatgagatctttgacataacaaatgcccaaggacaatttacatgtatcaaaaggtccatttcatgagtcactcaattgtgatctacaaagaaaaaattcattagcactgatttgaagtttgtaaatgatgtcactgaaatgtattaaattgaactggatttttaaaatgtcatttggtttctaagtttcttgtgttgacccaaataccatttacctagtataaatttggttcacgtcaccaggcttatttaaggacccattgaaatggggcagctgtggcgtaatggaaaggttacaagagttgctacaatgcaagctttctgcatgtgtgatttggggcaagttatttaatctctctgaacctcagtttccttatatataaaatgcacctaatacaagtatctactttacagggataatgtgaggataaaaggacataatgtatgtttgtttgctttgtaaactaaaaagtactatatagatgtaagagactgtagctattatgatttatatatatgatcagagttggacttattttgcccaaagatatcccaaataaaaatgcatgtgttgattttttagaggaaatagaattagattgtttgtcctcagctactttcctcacgaaaagcctttgccttttctgatagaatggatatatttgtaagagctgagacccctggatgaaggagacccatcgttctgaatttaaatgtgacttgcagagccaaatgataacttggagcattttacaaaagaatgagggaaactcaatcaaaccaggaggaggagaagggcattaaccaccacaagaaataggtttattcactctgagcggctggcaagtgctgctgatgcatgaagctaaaccgcagggatttaagtttgtcctcacttttctaagtttattgctcacatgctctgctctgggtcacaatgacttgtctcttgtctctcttaggtcttgactttctccccttacttgagtttagtgagtcatttaacacttctccatgtcatggaggttgttatttctttcacttcatttcttttttttggatcaacttttctctatgagtgaagaaagctacagagttgatgtcttacctctaccttaaataggaaaacagggataatggttgctttttgttctttttgttcctctggtgtataataaataagtctcgactatctaaataatcactttgactataccacatctgaaagtcactgcagagttgttattgaagctggaagaaatacttcaaaatggagatgactgaatctcttggaagaaggaaaactttgactagatcccctggcagaaaagccctttcttgtgattcactggcagttggattttgggttctgccagagacctagagagtcagaactacacaataaaaaaaaaattttaaacttttaagtttcaataacagttctagtatacaactgaagggaagggagttgagagtttgaaatttccatgcacatcttatttttccccttttctactatgtataggtcaagatggagttgtaattttcttagattgtcactgatatcaatataaactcttgaccaagttattcttggggaatgataactcccaccaggctgcaactgagggagtgggatgtagacaggagttcctggacaaatactttccatgtttcttaaaaattcctgtttgcaacagtctacaaagccagtgaaatattgacttgtggaatgcatacaggagaacatttttgtgtctggaaatgttgactttagtgacttacctctaatgctaattagtaaaatatatcatcgctgaagatgaattaaagaataacagtgagcaaattcatgttattacacttcatataagtaagcttattttaaaaaaattatttgccttatgggttgggctttggtctgaggtcttaagtgacaattcatgcatttgagctttcccggaagacagatttttcacgagtcttgcatttcacactaggatgtcaaacttattcaaccctttcctatggaaacatttttcatcatgaaataaaacttaaaatttagtttttgaaattcaagattttttcaatgaatcaatccagaagctaaacaataaatttgcaaattatatttccctcctgtttttgttattaaaagccatattatatatatacatacacaaacatacacacataattttatgatacagaatctctagaaatgagttttttccttaatcagtaagggttttggctttccagagaagtcctaaaaagaaatgaacgtggattatgtggaatgggaagtaacctgatccttagaagatatcttcctttcgtagttcaggaaaaacatgaccattgttcactaaggaataaaataaatacatatgtacctgctgtcaaatgacacctcaggaggaatgacatgagtactgtccttgccaatgaggaatttgattcgatcataaaaaagtcttgaagtgtgctgagagaagagagtttggctttgctgaatgaggtcaagaggatctggtgagccctggcagagaggacttatataacagttgctttgttgacaacagtcaggatccacacagtcggttaaaccatctggaaataaaacccaaaaccaatattgattatttagcttcaagagaaaaatatagtttaaaatatacataaatggagaaaattctaaaatatagccaaagataatcaaccttgttttgagttcagaatttgttaaattcacatttttcatgaattatcactcactctgagttcacatggcacctcagagaaattcaaagtattttgttcataaatttttctttcctgaattatccagcatttatcagctggagaatatagtttatatagttattgtttagagtttgggtaaacaattctattacatatcactgtttagaaatttcttcttcctcagtgagaccattctttccgaatgcgatgatttcttgtaagtacacctagtacatctatgagcacacaattaacaagtacttgctacctgaatttgtatttttttaaaaaatcctcccaatattgttgtctactggtaatgctcaaaatagaggttgggattctcatggtgaaaaaagatatttcgagcaatgattttcaaatctgttgtcaattacctagggagcttataaaatatgcatattcttgagctccacctactgactcagaatttttacagagcccaggattatgcatacttaatctgggtgattctgaagcatactaaagttgcagaaccagttttttaaggaatttatagaaggaactagagttaacatgcctaacagcagttttttgatgcaattactattctattttatttattttttgagacggagtctctctctgtcgcccaggctggagtgcagtggcacaatctcggctcactgcaagttctgcctcccgggttcacgccattctcctgcctcagcctcccaagtagctgggaccacaggcgcccgccaacacacccggctaattttttgtatttttagtagagacggggtttcaccgtgttagccaggatggtgtccatctcctgacctcttgatccgcccacctcggcctcccaaagtgctgggattacaggcgtgagcaaccgcacccagccgatgcaattactaccaaatctgacatacatgaatgcgatgactttctctgtttcattttctggcccttcaccatttgctgtagactgctgaatccactgttgtaccacaaataaaactcatacaaaggctttgttctttggtagagaaatgatatagggaacagggattgtgaggcagggagaccactgagaatctaacaggtgcaaaatactgttaggtgcttgcagaggtgaagagataaaaatacccttttcctgttttcaagagctctgggcttagtaggagaaagagatatgtaaacagctaactcttatactagcaaaaatgtaagaagtgctttaagagagttacatgcaaagagaaggggttggagtgattaactgagcatatggacacttcattccatgccccataagcaaaaaaattaaagttcttcccaggtccttaaagaaggcaagtggctctaattcagttgtttaacaagggtaaatataaagacactaatcttcttggcttgccttggaataggaaggttcggatggatcaccgtctccttaaggctgctgctgcagcaagttactagcactgatttcctgcagctcttttgcttgctctctctcccccacttgtctgctcccgtggagttagaggcgggtgtaccacagctgggggcaatgaaagcgaggaacaccaagagagtagacgtttggaacagcagccctagggcacccaggaaatatttttccccacatgtggtcctttcaaattccctgtactatagacactactttgatttaaaatgcagtttgctttttttcttgccttccctgtttgttcaatgtgtttttgcccctgatttctatttctctgtatacatatttttttcattgatgactttttagtgtgaatttgtttcaataagaagtttctttctgcttccccttttcccatcattcagcaaattatattaacagattttttagggattttagataccactaccacctctccctccaatacgctgttctcagcctcttattagcacattatctctttactctgctaattaaacatctggatgcgctgaaaagctggcaaaaatatcaggctgattaagagagttctctgatgtctggaattggtgcataatgcactaaacaatgaaaaactgcttttcaaatgggcagtcacttttacatttttattgaatactgaatttgttattgagctaatatatgtggaagtatccagtgtcatgcctggcaaatattaacaaatacactagtaataatcacattgggcagtcacaggtttcaacctgtcaaccacaaaattccgacttatttttgaaaataaatagattttaaataaatattaatgccaaaaacgatcttaaaaaaaaactaaaaaaatctaaacatagaaccaattcataattgggactcacattctcatctagtaatgttctatacattccaagctaatgtttcatatttaatcattgcctattatgtagggctgaccctttaagacctctgttttctgagacatcagcaaggctcctgttgagtctagaaagacctcaggcaagccgatcaataatggcatgcaaaccccgtattataatttgtaggtaagtccagcacacgggcaaagatgaacttaccaattatcacattgactaacaccccatatagtacgtctagactgttgcaaagaagtgcaaatgacaatcacactgaatatgtgccttgttttttggctattaacagtttttttttttttttctaattgttcagaattggaagctgtggcaccctactgacagccaagctcagcgtcgtcagatatgggcatgtcaaatattaactgatttttacttttagggcctgttctcttcaaaggaataaaaatactaggtagctaaaaaagagggaggttacactgacttgaaggactatctatggcattcattgatcctagctttgccaaccagtttgggactttgccagttggctcaattggtgttgatgaagcactggtttctttgctgcgtgatcaagtcatcactagtaaacttatgcctactaattgtatgcccttggctgaaaggggaaatggatgaaggaatatgagtgatacagaggaaacccatactttctaatcctgaaaatgaatttacaaatatatatcctttagagacagcacttgtattatcaccttgataataatgggtggttaattcatggtaggttatacaaaaggatttgaaaacacgtacagattagttaatatttgccaggcactaggtacatccacgtatattatctcaacaaatcccttcaacaagcctgttaggttgatattctcatccctatattacaaacaaagaaggggaggctaaatgtagttgcagtgggaagtaacctgggagtcatatgaacacctagtgttatgcatgcaaatcacacattcacatcatcatctaaacagtgtgtattactagtactgatctaggctgtaggacttccaagtgcatgactatacataggtatttagagcacatgaagtggttaaggtaaaaaacaaaacaaaagaaaacaaaaacagactactttggctctatttttttttttttttgagacggacttttgctctgtcgcccaggctggagtgcagtggcgtgatctctgctcactgcaacctctgtgtcctgggttcaagtgattctcctgcctcagcctcccgagtacctgggattacaggcacctgccaccatgcccagctaactttttgtatttttagtagagatggggcttcaccatgttggccaggctggtctcaaactcctggcctcaggtgatcaaactgccttggcctcccaaactgttgggattacaggcgtaagccaccgggccagccctgctttggctctaagcttaacgttgccacttacaatctgtagaatcctagacaagtcagttcctcatttgtaagatgtaaataacaataatactcactctataagttgttgtaagtatcacatgctataataaagatgagattgggtgcactcagggtggtatagccatagactggagaacattaggctaagtgaaataagtcagtcatagaagggaaaatactccatgattgctcttatatgaggcatctaagatagtcaaacatatagaagtagacaaccgcatggtggttacttggggattggttatggggatatgaggagttgtttaatgggtataaagtcacagttataagatgagcaagttctcgtacaacatagtacttatagttaataatgaggtattgtgcagttaacaattttttaagagggtagacctcatgttaagtgttcttaacacacacacacccacacacacacacacacacacacacatacacacacactccaccccagaacaaagggacaagaagaaaaccgttggatgtaatggatatgtttattaccttgtttgtggtgatggtaacatgagtttatacatatgtgtaaactgaccaaattatttacatttattatgttcaggttttgtacaccatttatacctcaataaagctggaaaggtaatcataataagcttactatctagtacataaccagcacttgataaatgttagctgttgttattatatcaaattctaaaacatacagactgcaaagaatctaaggatagagtcttaggggtagatgtcaatggtttgcaatggcagcttaaagcattcaaccccttttattgaagttgccttatcactggccagagggtaattgatttctgtgtagcacgttccagttgttggaatgtgttcattttatgaactatgcttggttaggttgtcaggtaggtaggatcttatgtgactctgagtagacaaacactaatactacagaaacttttcattcattggatttgattgattcagaatttgtcaccatttggacaggggttggatttaagcttaagcttttcagcatctgtagaacagtgggtctgctgagcaaattaatagtgaaaataaaatggaagggctgatcattccaatgactcagtaaagcaaagtcttcttaggcattttagaaagccataagcaatgaactaactataaatcattcataactctttactaaagcaggcctcctactaggcactcctgttagcttagttgttgcccttacatgtattgaaggtaataggactgtatttcctctggaaatagtctataattcatattcttcatttcttcaggctgattttcacccctggatttactgtattagaaaaaagaaagtgagagagactcaagtgcactcaggattggcctgcccaaatcattattgttgctataaccacataccattaaacttttctgggttgggaaaatacgttgtttgtatgccactaatgttcatgtcctcctggtgcctacctgccattgatggcttttcatatcacttagaataaaagcctaagtctgaacaatgacttattacctcacagtctgattctttgccatctccctcttacctctcagatcttacctcttctgatccacccaatctccttcccactcctctggctgttccttaatttcccaggcaatgttatcaggacgtttgcacacactattcctatgcctggaatgttcttctccctggtatcaacatggcttaaccttcacctcctttgggtctttattcaaatgtcatcttcttagtgagattttctctggctaccttatttaaaatttccccgtcctacactccctgtccttccttttcctgccttattttaatcttaatttttttaattttaaatttttgtgggtacatagtaggtgtatatatttatggggtacttgagatattttgatacaggcatgcaatgtataataatctcatcatgaaagatggggtatctatcccctcaagcatttatcctttgtgttacaaacaatccaattatactattttaggtattttaaaatgcacaattaaattattgactgtagtcaccctgttgtgctatcaaatagtatgtcttggccaggtgtggtggctcacgcctgtaatctcagcactttgggagactgagggggggggtggatcacctgaggtcaggagttcgagaccagcctggcctatatgatgaaaccctgtctctactaaaaatacaataattagccgggcgtggtggtgggcatctgtaatcccagctactcgggagactgaggcaggagaatcacttgaacccaggaggcagaggttgcagtgagctgagatagcaccattgcactccagcctgggcaacaagagtgaaactccatctcaaaaaaaaaaaaaaagtaggtcttattcattctttctaactatctttttgcaccattaaccatctccaattcccctttaaatccccattacccttgccagcctttggtaaccatcttgcctttaaaaaaaaaaaaaaaaaaaaacaaattttcttcatcacatttaccaccttctatcataatatgtatttttaaaatttggtttaatttctgcctcttgtaactagaatataagctttatggaagcatgaattttatcttttttatgcattgctatttcctcaatgactagaacagtacctggcttaaagtaagcattcaaggcccagcacggtggcttacgcctgtaatcccagcactttgggaggccgaggcaggcagatcacttgatgtcaggagtttgagacaagcctggccaacatggtgaaaacccatttctactaaaaatacaaaaattagctggggggtgagggtggcatgcacctatagttacagctacttgggaggctcaggcaggagaatagcttgaaaccaggaggtggaggttgcagtgagccgagattgcaccactgcactcaagtctgggtgacagagcgagactccatcctcccccccaaaaaatgaacattcattatatatttgaataatgaataaatggatgccataaaagtcctatttctatgacatttgtaaatgtgcccagagattaacaaatgtccaactaatatatcaaattgttattaacagattcttcattgataacacacttttattgcccactttaaatgactgtatttcaactcttttctcattcattttcatcactgcaaagtagacagatatcaagtatcagtagccttagttggtagataatgtgatgggcccagtcatacagtggtgaacagttacagagttgagattttctactttgcagttgcatctggaggcacttgggcagtttaggctcttataactaagtgatgatccattaataaatgggttgcttcaaaattaaaggggtatggtgagaaaagaataattagaaatatgctttctgatgccaagtcttttgtctccaaccaaatctcaaaagtaaatgtgaagatgtctgcctcttaaatagagtaaatgttataaattcattgttccttctctttcattttcctatttattaaacactgaagcatgctggtgccattctaaacatgaggctcattgatccatgagcttgtatgtgttcataactcacccatggtgctgttttctggatctagaaacactacatcataaaagaggcttgcaaatagctattgctcttaatgaatggtgacttgttatgaagaatgattcctggaagatcattctcttttaggcaattaacttattgattttaccaatgaatatgaatatagaccactggaagagtttataccagagaagcttggacaaacgtgataaatacttaaaagatcagagaaaaaaaggctgtttggattaaacactcttactctacattttttgagcctccttgaaaatatttccacaatatcagagaccactttccttcctccataagtcgagtgaatgaaatggaatctttgtatggtaactgaagatcttgtaaaactcacaatgttctgtatgatctggcccctgactacttttctatactaatctcttcctgactcatgttccagccacaaagacatgccttttactttagagcctagtacatttccacctcagggcatatatacatgctgtttcctctgtctggaacgtttttcccctgactcatgtgaggcctctctcaccacccagactaggtcaggtccccatgcacatttatagaattacacaattttaaaattataaaatttttctagcactcttcacagttgtaaatatatagctatgagggatcttcaaaaagttcttggaaaatgtgtatcatgagaaaactatgcaaggagttcaaattttttttccactaaaataaagtcatactaacttgttgtaacacatctgaacaggatctagtttgaggcactaagaaggataaggcatcattttgaaaagagtccctgtcagagcaacatgaattttgctgaaattgaagcaagaacaaacatcaaatttacgatgaaacttgggtggaagaatgatgacatcactgatactttatgaaaagttaatggggacaatgccccaaagaaatcagcagttcacaaatagataactcattataagaagagacaagatgatgctgaagatgaagcctgcagcagcaggtcatccacatcaatttgtgaggaaaaattaatcttgtttgtgctctaattgaagaggatcgatgatgaacagcagtagcagttccgacaccacagacatctcaattggttcagcttacacaattctgactgaaaaattaaagtcaagcaaattttccacttgatgagtacaaaactgttactcccagatcagcagcagacaaaagcagagctttcaatggaaattttaaataaatgggatgaagatcccgaagcattttgttgaagaattgtaataggagatgaaatgtggctttaccagtatgactccgaagacaaaatacaatcaaaacaatggctacaaagaggtggacgaggtccagtcaaagcaagaatggactggtcaacagcagtggttatcccagcactttgggaggctgaggcaggcagatcacttgatgtcaggagttcgagatcagcctgtccaacatggtgaaaacccatctctactaaaaatacaaaaattagtcggaggggcgggggtggcatgcacctatagttccagctacttgggaggctcaggcaggagaatagcttgaacccaggaggcaacagttgtttggggtcctcaaggcattttgtttgttgtctttttggagggccaaagaacgataatatctgcttattacgagagtgttttgagaaagttagccaagggtttagcagaaaaacacccaggaaagcttcaccagagagtcctaatccaccatgacaatgctcctgctcattcctctcattaaacaagggcaatttgcaagagtttcaatgggaaatcattacgcatttaccttacttacagttctgatttgcctctttctaatttttttttgtttcctaatcttaaaaaatctttaaagggtacccatttttcttcagttaacaatgtaaagaagactggttaagttcccaggaccctcagttatatcaggatggactcatcccttacaaaattgtcttgaacttgatgtagaagtaaagtttatatttttgttgagaaataaagtttatattttaaaatatttatatttcaagtctccctttccatgagctttttgaagtccctcatatttgtgtggattatttaatatctacctgccttgctagaccataagctccatgaaggcagaaacttgtattgtttatcattttctctccagtgtcaagcacaatagttagcaagaagtagtaatgaattaatggaaaaccaggtacttaatgtgaaatgtttggcctaaaggtaacatttgagtgaaacatttggatcatcactatccaatataacttctcctaaagctaggaatgttctagtactgtgctgtctagtacagtagctactagtctcatgtggctactgagcacttgagatgtgactagtgcagttgagatcctgaatttttttatgttatttaagttaaatttaaatactcacatgtggccagtggctaccatactagacagtgtagattttgatgtctgcaaatatttagatattggatggtctacacatttagctaaacattataaaaaagttttacatttttactaagtcaaatttattgtttttttttcctattatggtttctttttatgtttacaaagtgctttctcattgtaagatctatcaccacttttttttttgaattgtttgttttcttttacttttaactcattaatccagttgaagtgtttttatttatcttattctttaggtatatggtatgaattaaaaaatctaaggcatttttcttaagagttgtcacagttccgtttatttaataatgcttattttaccccattgatttttgatgccagttttataatatactaaattttgtacttgggtgtgttctagagcttttattcagttgcattaatctgtctattctcacatcagtgccactttgctttaattatcatagctttcaaatatgccttaatgtctgatagttctatctttcactattgtttgttttagctattctgactcagttaatataatgtccaaactttttttctgatgttaattcatatgtgcatgtaatgtatggtgatcatatgtaaccaactccaaattaggacacatgattaacaaatgaaaatgtggtcaccatagtaagttttttcctccaagtatagggttgtgcatgtggtaggtgcttcttgattaaagagatgaatgaggtcaagacatttcataggtttgtgacttctatagtaattagttcttgtatatacaatacataagatagctttccttttttgcacttaagaaaaaacatccaaaggttattttttctctgttctgtttttactgttcaaggagcttttaggtagtttctggaccagcggtgtcacccacatattcaatgcagcccaattagttactgagaatcacaatgcattgaatcagagggtaactaaagtcaaagcttcaggaagtagcagcaatactaatgagtattcaaagctgattagaatgcaaaaaaattccaccattctttaagtatcagttataatatggagtaatcaggtagcagctacttgaagcaaatgcttgaaagtgattttttttgattgggaagatttcttaagaattacatttttaaaattagaactactttttcccaaaacggttcaattggtgctttctaatgtaattaaaacacacacatatacacacatgcacaaacaagtagactaatattaatattaagcaaatattaataattagtcatatttaactaaatgaaaccagccattatggatagctggaaagctgagactaccaaatgaagggcatttaatatattctcaggggtaatatttgaacagtataaaaatgaaattattggtttaaaatcttagtcatggggctttcagagtttattcaatctatctttccatctcaaagtagaactgaatctatatttatcatcaatatcatcttaatcctactatagggaaaaatggtaatcggaaatctcaaggagctttccccccgttccctaaagagacgatcataaaaatatactgagctcatattaaggtctttgatttttaatttgcatatagatacatagttttaaggaatgttcacaggtcaatacacgttcagtgaaatcttctatgtcttctgaatctacatagaccacaggcattgagaattgataattcattaattcattaatatttaattgatccattctttaaacattttggctgccttgagatgaccttgaggccataaaaaatggtgataattaaatattcaattatttttattactttactaaggcaggaaacattggctcaaccttaactgagccagaaattataattgcataggttgttaatgtgttttctgagcataacattttaatcaatacataactgagaaattcctattattataccaaatcctttttagaatgaagcagactacctaggtttatatccaggacctatcatttgcttactatgtgatttttaacaacttacttgacttctctgtgtctcagtttcctaatttgtaaagtagtgttaatggtagttcctggccaggtgcagtggctcacacctgaaatcccagcactttcagaggctgaggcagacagattgcttgagcccaggagtttgagacgggcctgggcaacatggtgaaatcctgtttctattaaaattatagaaattagccaggagtggtggtgtgtgcctgtagtcccagctactcaggaggctaaggcagaaggattacctgagctccagaggcagaggttgcagtgagctgagattgtgccactacactccagaatgggagacagaacaagaccctgtctcaaaaagaaaaaaaaatgttcctacataatggggattaaatgaaataattcacataaggggctcagcacagtgcctggcacatagtaaatcctgaatacaagtgagatactattattttcaacatattgggaatataactatgggcaatgggtcatgcttaacatgcaacaagaaaaccatatacagaatataattaggtgtttgattgtatagtgcatattatcaacaccatgggtaattgaggaggtggatgtcagaagtttcatgggagatatggtttaagttgagacttaaattatggacagagaacaatgggtggagaagacatgaagatgtgccaggtaaaaggtatataatgaaaaagacaagaaggaaagtgaagatgagtcttagagggccataaaaataaactaaatagtttatcagtggatcattagattgaaaacttcactccggtttccaaaacaaggttttcaagttatatgggtagtaaacagtctcttcagaaaatagtctcttctatttgtgtgtgtgtgtgtgtgtgtgtgtgtgtgtgtgtgtgtgtgtatgtgtggtgtagtttactatctttcaagtggctcacttgaactatctcatttaatacttattacaaccctattagacagtgtgtgtctaattattcaacctatccttctgtctcaaagtagaactgaatctatatttatcatcaatatcatcttaattctactatagggaaaaatggtaatatcatttaatatcatcaaccccattttagaaataaggaaatggaagcacagagatatcataaaacttgtcccaaatcatgcagctagtataagagccagagctagtatctgaatccagacagtttaacttcaaatctctgtgttcttaatcacaaagttgcctccacttaattttgataaggtcttaaaacttttaaaggttaactgttagccagaacaagtaaaggaagaaactcttataatgcagtttggtgcttaagccatgactgctaccttattaatataatcctgcctcatgtctgaattcaaatgacaaggaatgcaattgtctaagcagatatagaaatgtgaagtgtcaaatttaataatatacttcattttaagctaatatacagaaattcaaacaaaattttttgttaattttatgtttcctcgagtagaaggtatgtggaaagtgaggatttgttgttttaggctcactcagaggtggtttgggcagttttgatgtctgatcatacagtgtgttagatgttttgttggctttcctaagagaagtggtaactctgaggtcttggagccacagtggttttaaaaaatatcatgcgcagctccttgattaaatatttaaaattctaccataaattgtctcgatgctatgtcctctgaaaggtataaagtgctactaaaaggtagacacacaagagggagttccaaataactaacaacaaagaaaaatattttagcatgtctagtgcaaactatgctaacatcaaacaacttgaatagtggtatgttaatttaatttgatatgataaatgccatgggtatgggaggtagcatggtgtagtagttgagaaaatatgctctgaagtcacatagccctaaattggagacttggctctgctactctctagctatgtgattctggataagtcacttactatccccacccagagcattaattttcccatctacaagtggggaaaatagtaatacctatacctcatagggttattgtgagaattaaatgatacataacacatgcaaaaaaaattggagtactgcctggtcatagtaatattcaataagtaatgtcttcttaatgtgattgagactaaaaggtagcattaccctatataactcagtatcatttatactagagattcctaattttcacccttggccaggttgattaccactgtgctagaggctgggctattcctttcttacgtgaacattttataaatgactcacctccatcattgtccaagttatctccacaaagcatttccatgacaacattgcagcctgtcccactccaacccacctgacacacacagtgccaaccattttgatccagggtacatcgtccatttccaaagcagagccctgggcagccatctgaaaagacatcagagagtaaccatcacagagacatcagaatgggattggccaacaatgatgtatttgcctatagggaagcatctaaccatctgggccccattcagatgaggtgttgaataaatggaagaggagcttgcttgcctgcaaaaccttcccagggaacttgttatcccttactctgcagtggttttccttagagagccaattaagctttattaatgctaaccccaattcccaacccctggttcatataggaagaaaactatggcaggggcaagaattctttttttcttttcactaaacatatctcctcatctcaatcaaaactatacggatgacactgtatctagttatggccaatatgttgggaaaagatagcagtccctatgaagagaaactttccctactacttctagtctgtgctgattttcccttatgatgtattgcttcaggacttaagtatgttggtatacagttcagaccacaccattaagtatttgttcatatggtgccttagaaatgtgctgtagttgctttatatttattcagcttttctcttcaagattattattcatctgcgggctaacgattgaaatctttacttccatggtatctctctcaaaagcttgcatgatattatgcttataacaataatattaaatgttaaataagtgtttatggaattaatacatgccagatctagactttctgaattatagagaactggaaaatatcaagtcaagaggaaagtgtagcatttaaataacttttatccattgataaagcattaacactgacaatggttcctctttagactttaaatttctcagggatgccctactctttgtacccgtagtctggagttcagctctagcaaagggtaacttcacatgcgccacatgcgcagtgggcagatgaatggagaaagcaactataatgctactgggtattttcctagtagcaacacaggaccagacgtgaattttactgggaatagcccagtcaatattcatttcggtttctttctttgaaagaaaattccaaaagcataaagagcaaaacaaaaaaaagattaaaaaatctgtagaagtaacccagtgttccttctaaatagttttccaagcaactatcaacagacaagaggaagaaaaaatttaaaaataaaatgacagatggttgttagaaaatatgaaaagcttgatgtacgtaatatactcatgacatggcatatgataaacatacataggtttgagaagggaatttttgtagttctattctaatggataggcaatagataattaaggtgaaataaagaataatttgggacatattaaacttctgaagctgaggtaatgaaaggcactaggatatctggcagaaaaacccttgctgtctctgttaaaggaagctccttggagggatggatgatgggatacttctaggaggataattctcctgcccctgtaaggacttaggagtccttgtatatggacttggagccatattgttatgttaaagagaaagttcatcttctgaaccaaattatttaataattattaaattattaaaaattatttaataattattaaattattaaaaattatttaataattacctgtgtaatacacacagatccagacacacacacatacacagaactcaatataaagacaagaaaaagtagtccttaaaactgcttatcagtccattctatactacgggaaaaagtgactctttgatgttgaaaaaacaaattaccttttagtgtgactattttagcatgaaactgacaacattatatttaaataagattgccaaaaataaaaacaaacaacacaaatgccaaaaaacgctaccctttctttcttacatgcatattttcttttaaaaatatatttctgttataaaattagtgagaaaaatcttacctcggacagcatctaagtagtgagctaaaagggaggggaaaagagtgatcaaatgaatttctgagagactaaagctatacaatatgtactaatggtttaccatctgttgcctgggaggagaacagcaaactgcgcactgctgaaatgcctgcagctcaaaagttgggtacatgggcctgtgtagtttgtgaataatattttctgtgagaacaatattaatggcatttctgcaagaaactctattaggcttcataaaaagtgtcatatttcattagaagtataagaactgcattttcacatttcagtaataactcctgtgaaagagcactggcttcaacttcttattagtaatatctttagaagagagttctggagtaaccacctatggtaatcatcacaatatttaaatcctcttatgtaaaggcaataaacttactgtagtacaggaatgtaattacttaagctacacatctgaatctcacccctctccacctttttaatgaatcttaaatatttcccacagttgcagaacaagacttactgtacctttagtagagaagtaatgcagtttatgaagattatatgttatatgtattatatatattatacattactttggcaagctccaaccattataacaaaatactttcacctaaaaatgaaagctgtagtatagtctagtgagggaaaagcctacaaacaataaattgggtatccagaggcccacatttgcctttgctctgcatgaattttctgtgtagtcaaggaatgccactggaacactctgtgaccccctttctttagctgaacaatgggaatcatacttgttactctgtattaatgacaacctttctatgcaaagatttcttgcatagaaaccttagcggtggatagaaatatatgttaagggctttgctttttttcagaaaaagaaagtgttttataactgaaatatttatttttaatatcttttatagtgtgaagatcacatgataaattaattattacataggcttttccatattcacagatcattttccctttgtgaaattagcaataaggggtgaagggagagtggtggcttcaggaccaactctctacactaccggataaacaattcaacacacatgttctattgatgataggtcagaagtgccttcctcatatacattaaagacagcctctaatgatatcgaatggcccctgttaaagtagtcccatttaatgaaattgcctctaagtgctttcaactgaaacaacctatacttttcaaaaggaaaaatgggcagagaatgttaccttcactacaaaagcacttttcttattaactaatgacaccttattccaatgtaacatctttcacttgagtaactcaaagcacttgaaagcagaaaacataaggaatactgaagtaataagaaaggaaataacacaagaaatacgtagaatgtcatcgacaaaagaagaaacctaccagttcacaaaactttaaaacttgtaaccaaccctccttctcctcccctactccaacctcaaattctactaaatgccttgtgattgactcactagactgctcttaacttcaactaatccaacttactttggttaaagtatggtggtacttaccaattgtgcagtggtcgccctcccatccagggctacactcacattttccatctttgcattggccatgctcagtacaatgagaatgacaggagcgttcctcacatgttggtcctacccagccttcttcacactggcaaattcctcttgagcagactccatggctaccacactccatggtacacagctctgtggggaattcaaagaagacatattaacatattttgttaaaaccagcatccattcttccaaaaaacattataattaccaaaaatccctgtctatatttatattttatttatttattattttaatagagatggggtcttgctgggttaaccaggctggtcttgaacttctggcctcaagtgatcctcccatcttggcttcccaaagtgctgggattacagatgtgagccaccatgccctgcccatacttatattttaaacaaaatgttaataaacaatttatataaacaagatgtcacaaagatctctagcatctgaatgaatgtgcaagaaactctaaaaagaggtagttaagtctctaagaataatataaaactctaagccaaactgattctgagaagtctataaaatgataatggcattcaaggcttagaaatgagattaatgacaaacaaatgccaagtgggtttcactaaaaattcattaagatcacagataatgttgcaggaattttatgatagtataaggtatcactgggggaaaaatcccaataaaacagtgccctaacttcattcagaaagacaagttcattaattggaaagataataactttctaataaaattcataatatacaaaaggtaaagatgccaatgatgacaaccagctggtttccctgatcatactaacaatatttgcatttattttaagcatataaaattaaccctggttgattaaagtacacatccttcttatcttcaaatgctactaagtatttagacagtataataatgatgatgtgtactggctctgctgagtttctttcctttgtccctttgactttttgttgagaaatgctgaatattaataaagtcatgacagtagataaaccaacataaaagcatggcaagcctctttcgtgatctaattcccttgctggaggaagagaagtaggataaaaacctacggaaagaatgaaatatgttttgggaacaataggccacatattcctgaaaggaaaagagggtgttctggaagccaggttgtctctttcacagtctcaaattctgaaactagtttaatatatttagaggcattgatattaatattctccacagatagcagagttatttttcagtagatgacaatattcttctgataaagccatgattatgagttttattataatctggatcaatttgttcatgggtttactcacaagtattctttgaaggtcagggtatgatgggaagagtagtaaatttgaaataaagataactgcatccttgattcctctgcttagtacctatggacccttaggcaacttactaacatattgtcttaatctctgtttgcgtaagaatgcaatagaagtaataatacttatacatcacaaagctgttggacagatttgaaatatagtttagagatgtaaccaacaggacttgctcaaaattggatataagggatgaaggaaagggaaaaataaaagtttggcttaaacaagtggatagataaagctgtcattaatgaaatgggaaaggctaagggaaaaataagggtggaagatcaaaaagattaaccctaagatatatgtaaaaagccaagtgaaaatgtcagtgcaaccagcagaatatatgattctgacaggccaggactggagatataaaattggccatcattagcatataggtggtatttaaaggcatggaaataactggttgatacctctaaacagggaatagaagagccctgaagaaagatcaggtagaaaaaaagaggaaccatcaaaggaaactgggatggagatggcagtgagtgataggaagaaatccaggagattgtggtgtaactaaagcacaagaggacacttttcaataaaggagtgtttaactacatctaatattgctgagaggtcaagtaaggcacgggcagagaagtgcccattggatttatcaacatggaattcgttgatgactttaggaagagctgtactgataaaggtgtagttgaaaagccaaattggaatgggtggaaaagtgaatggaaagctgtgcagggactcatcaggttgtgagaaaagtctagggcatagaaaaacgtatcttaaaaacgtgggccttggcttaaaaagtggtagctcaggtagaattatcccaaaagaacccctggtcccgaatcttggtctgaatctctgataatttgtatttataacttcagtccttgtagtaaggctgatattatcattctgttccccttcacggcctcctcccaagacattaaaaactgaactgaaagggcctttataagattaggtgctaattggttaaagctaatcaagtcagctctgcctagaatagttagaagcaaacatttttcatatattgctttgtacaactataaatcttaggcatagaggagtataacattctgatttctgtttgaaaagtaataggactagatgaacagtattggccaaatagcagagtaggctattttcaaactatctctatataaaccattagaaatgttggatataatgtaacaattttttaaattgcatgtcttggctcacaaaaaaagagaaatcttcaagtgccagaagcaaagaggatgctaaaagccaaagcagtcaatcctctggtagccttgagagttattatacccaattacgactaggggcttgggtacttaagtccacaaggaaaaaagagatgaggtcttggcaccatttcagatggagttggactaaatctccagcataaagttggagccacttgaaaggctgcaatcacagtaagatggtgagtaataaactgtacccactagcccagagagatgacaaagaagtactgactattgagtataaaataataataataaaaaatctggagctaggaaacaatgtagaaataaaatactatcgtttaataatatgtaagatggagtgtcctgaatgaaatatttggaaagccttatattattcgggagttaggtaactggtactttgtcaagtatgcatatgaaaacataaaggtggaattctgtttctagtaatagggacctaagtaatttttactattcccttctgatgagaactagaaaatctaaacaaaatatatttttaaatcttttgggagttagtggagttcacaaaacagtaaagaattactgtgccaagttccagaagaaaaagaaaacccagagagaagagcctgacatttatggatgcttttcctatagcagcatctgtcaattatactagagggagctagaaggctcagaggctgagtagagctttttcagtctcatggaatcagaaaaaaaaattgaattgataatggctaatacatttctaacattggccaggcacattggcatacacctgtaatcccagcactttggaagggtgaggtgggcaggtcacttgagcgcaggagtttgagaacagcctgtgcaacatagtgagactccatctctacaaaaaatacaaaaaatagctgggtgtggtggcatgtgcctacagctactcaagaagttgaggtgggaggattgcttgagcccaggaggtcgaggctgcagtgagccatgttcatgccactgcactctagcctgggcaacagagtgaggccctgtctcaaacaaacaaacaaacaaacaaaacccaacactgaagaaagcagtaagccaaataaatgaagcaaaattgaaagaagaagaaagggaaaaggacaaattcacaatcatagtcagagactttacagcccccctctcacaccaactgatagagcaagcaaacaaatcagaaagaatatgaaatatttgagcaacatggttaacagatttgatctaattgatacatacaaaacactgccataaatgactacaaaatacacataatgtatttcaaatgtatatagaacatttacaaatattgaccacgtgctaggctctaaagcaagtcttgatatatttagaagtattgaaatcatacataggatattttaagcccagtatgaaattaaatttgaaatttgtaatagcagatgaatctaagatccatacatgcttggaaatcaagaaatatactttcaaataaaacattaaacgaataagacatcatcatgaaaattagaaaagagatggaaatgaatgaaaatgtgtaatataactaaatccatgtgtacagaaaaatttataaggtagaaagaaaaacgagctgaaaaaccatgacctaagtatcgattcttagaaatcagaaaaagaaaaccaatgtatacaagaaagtagaaggaagaaaatgctaattataagagctgaaactaatacaataggaataaatatactacagaaagaatcaacaaagtcaatacttgatgattggctcagaccaataaaattgataaactcccggtggagactgatcaagatgaaaatacagaagacccagataaacagtatcgggaataaaaagtatgacattgctatacatagtacaaacataaaacatcctaagacaatattactaacagctttttgccaatacatctgaaattttttatgaacaaatttctagaataatacaacttaataaactacaagaaaaagtggaaactgaatagtttctttaaagaaacttaatccataatggaaaacattaccacaaagaaaattccagtctcagatgacttcatttgtaaatataccaaacttttaagaaagaaaaattgccaatcttaaataaacttttccaaaaaatagaaaagaggaaactcttaacaatatgccttatgaggtcaacataatcctgatataaaattctgaaggatattatttaaaaaatatatgacagtctttctcatgaagatctcattcatggatacaaaaatcctaaacaaaaattaacatagcaaatctagcattacataacaagaaataatatcatgaccaatttgtgcttattctaggaatatattataagattgctttcacatttgaaaattaacaaatgtaattcatcacatatatggaataaaagagaaaaatcaaattatcatctcaatagatacataataggtatttgataaaatactaaacatccatttatgataaaaacttgtagcaaactaagactaaaaggaaattttaagttaacttgtaattaaaaggaactttcaactttaattttaaaactaagactaaaaggaactttaaatttgataaagagtagctacaacaccccatagcaaacaccataatagtgagatgttaaaatctttttttgtgttattaagactgagaaaagatgcctatgatcatcatttctacacaatataattctggaggtcctagccaatgaaattatgcaagaaaaaggaaacttgtataaacactgaaaaggaataaataaagtcatcatcactcaaaggcagtacaactttaacttaatggacatatataggacctcaaagctatgactatacaatacatgttctttccaagcacacacagaataacccacaaaaactgacaaagattcatctacaaagcaagactcaataaatgccaaagattccacagcatatggattattctgcttcacaaaatgcagtaaaattagaaatcaataaacaaaaagataacaaaagaaaaatcccagaaaggtgttctttaaaaacacacttaaaaagaattcatgaattatgtttcaaaaattacattggaattagaaattgagtaacaatgaaatactatttacaaaaacttgtgggatgcagcttagacagtaacttagaggaaatttacagcctgaaatgcatgtagtagaaaagaagaagaattgaaatctaatgagcaaagtgtccaaatcaaggatttagaaaaaggactacatataagtagatgaaggacacaacaaagccaagagcagaagttaatgaaattggaaacaaagaaacaacagagaagatcaacaaaatcaaaatctgcatctttgagatgaatataaaaaatagagaaacccatggcaaggtaatagagctagaaaaaaggaaaagaaagaatacaaataaacattaaagattaaaattcaaaaataaattagagactgctattaacaactttatgcaagtaagtctgaaaccttagataaagtagatgtttttccagaaaacaaatggacgtgagaagaaatagaaaacctgagtacacattaaaaacattgaaaattgcccagatggttttacaggtgtattttgtcaaattttcaaaggacagataatctctattttaaactataccagagaacaggaaaaaagggaaaccatcttgaatcattttataagaatataatctagttccaaaacagttccaaaatagggtaagaaaaggagaaaatgattttttttttttttaaaggtgggatgtctctattttgcccagactggacttgaactcttgagcccaagtgattcttccaccccagcctcccaagtatctgggactgcaggtgtgttccaccttgtccagctctagaactgatttcttaataggccaatctcacttataaacatggctgcaaaaatcttcaagaaaatatctggtaatcaaaccaaaaatgcacacacatacacacacacatgcgtacaccagtatatagaagtcacagccaaataagcatgaatgctaggatggtttaactttagaaaaatctatcaatgtaattcaccactgaattattccattttactttcacacatttcataatgattaaagaaaaattataattttattattatatgtagaaagagtaccatttaaaatttagttcctatttatgatagaatctcctagaaaaacatggctaaaagatagcttactgagtatggtaaaggtgatttaccaaaatcctatagtaagcatcatatttagtacagaaacagagtaatatattccttttaatgtcagaagaagtactagaattaactacagcttctaactcaatgttgtattggaaatcttagtcagcacaaaaaggcaaccaaagacataaaaaattggaatgcctgaaaaggaagaggtaaaattgaacatacaggtaaactatgaaagctacaaggtttctggatgtaaaatcaaaaggaaaaaatcaatagcatgcctagatattggggacagcaaattagaacacgtactttttttttctaaataaaaggttccattaaaaataatagcacatatagcaaaaaaaaggttccatactcctttacataaaattttaaaactttattgaagaacacataaaaagacccaatcaatggaaagatatactgtgttcatggctcacaaggcttaatatcattagaatgtcaatttttctgtactagctctataaattcaatgtaattctggtaaatatcccatcatagagcttgaaacatgatcctaaaatctatatgaaacagaaaaggccaagaatatccaagaacattttgaagcatacctattaatactagggggtgtgtatgtctgtctgaacctaaatatccatcaatgggaaaggatatataaattttagtatatttatgcagtgcaaaaaatatagcagttaacttgaataaggtagagatccatgcctgaatatggataaactttagaaacataatgatgaaggaggaaagcaagttattcatatgaaatttaaacacatgtagaaaaatacattttatggatatatacatatttggaaaagcctaaacatgtgtattgtatgacaatgaatagactgaggatagtggtttctgctgcagagaagagaggcagatgggatcacaaaagtatacatagggactttgtttgtatttattaatttttaaagcaaagtagtgggtttacagctgttcattatgttatcttacatgtctgaaatatttcataataatttacaaaagaaaaagagaatcagtaaaaaacaactgtctttagaactgactgttctattgaataaataactggagatattacttaacctaactcttacacaataccctccacagatacaaaccacaaccacgagtcggataggattcagcacagtaagaatccaggtgggaagcaatatcctcatgaatgagggaatcctctacaaaatgaattactacaaatggagaagcagatcttaagcaataagcattcctcattttgaactgcatcaacatttctgcaattgcatccagttccaaatagagtttctggactgattctaagatgtttttcaatcccaatcttcctataatcagcagtggggttggtgtgggtgaagaactaacagaaaacagatgctggcaattgtataatttataaacaagatagaaatgatatttgctctaatacatttgtctcatgaatagttctatttcctgtgtaatattttctatcttgttgaaaatacattaacattacaggctacaaaatatgacaaaagaatgctaaaatataaacattcttctgtgcaaatgtattggaaaagaacatgaaaaatataggcagacactttaaagttctattgagacatttcatttttaataagtttctttatgcatgtcaacaatgaacaacacttgtataaattgaactcagatacaactggaacacttctttgttgcatgctgacaaagaacaatttgattaaacagtaaatccttcagagcctccctcagaaccacttctctgagatttactttttaggcaaaagtttctagtaatgtaaactctgttattcttgacccctctgccttctccaatattagatggtgatcatatttggcaccccaaaagattaaatctggttatcagtttctaaagtatacatttatgtaaaaatttcaagattaaaatatggcattctaaacaaggaaaagacacctctgatgtaaaaattcataaaaattaagaaattattacatattcacttgcccagcatctggtagaatcaattaaagatcagagtaaattaggctgaaagggaaagcacagggaagaacagagaatgaatgagcctgaatagacagagaccctctctttcttagactttactgcaatttttgttggggaaactaaactatgaggatttttctcattgttttgtatgattaatattagaaataacagtaagaaaaaaaagtaaggttatattggcaagtgtaggcagtgccagctcaagctgtttgtttaagggctgaaaaaaattttggtgtacaccaaaaatttcactaaaatcaagcaatgattcaactaataacagtaaacattattacaaacaaaagtttgtgtactgtgtgttgtttcaccaagtatttggatcattttcattttactgatttcaactccttccatttctcagtagtaaatattctactagaaagtaggactactataagtcactgttaactttatatcagtagaacacacgtgcacacatgcatgcacatgcacacatatatacatgcatgcacacacatatttttggtgtctatttctctaaaagtaattagaagaacatattagttgatgaggtatcatatctgttttattgcatatggttaaattaaataccatctctaaccaatctttacaagtaccttgctatgataaagatttggctttactgtgggataagtatcacgttttctatgcttgaagtataatagtatctcctcattttaacacagaaaacctataacataatacttgtccctcagcctcagctttacaatgatgcttcaatgtatcttagtagttttaatactatcttaaatctgaacaattaaactgaagagattcaaaatgatacaaaatgtcagctagctttaactgaacaaatagcaacatacaagcagcataacaacagcgacacactccagcctatataaaaccttgagaggattctcaaattcttgatggataagaacaaaaatcccaaggaatctagcatgtgaagatcaaaagttgtaatgactttgagcttaatgtttcatggatcttgactgtcacatggttttggatttcctttataaaggaactggttaactgttctttggtaggtctgaataacctgacaagacagaaaaatccatgcctgacttacaacttttgaattcgataaaataagtcagttggccttttcactatacagaatctttcctttggaataaatcctgtttccttgcttgctaaataaaatattctccctaactctagatgtcacattttggttagcttagtgatcagaagctcaaactattgaagatgaggtgaacttctactcatttgtagctacagactgcaagagcatgtttcaatcctttgattataaacctgacacttttgcctatccaaatagtatcctcaaatgccaaagaatgttgaaatctagacatttgcttatcatttgacccattaggtaccagattgtcagggtaaaacccaaccctaaaggagcaaatattaactttttttttttgagacggagtcgcactctgtcacccaggctggagtgcagtggtgtgatctcgactcactgcaacctccacttcctgggttcaagtgattctcctgcctcagtctcctgagtagctaagactacaggtacacaccaccatacccagaaaatttttgtatttttagtagagacggggttttgccatgttggccaggccggtctcgaactcctgatctcaggtgatccacctgcctcggcctcccaaaatgctgggattataggcatgagccactgtgcccagccccgcaaatattaacttttaaggctcatgatctgtcatgagtggtaggccatgggattgctcagccatggcagagtttgtttttggtttatctacagcttttcacttagactttcttatcataattgccgtctaggtgcagtttgtgaccacctaaaagggcaagcttaactgcctcacagaggcatgaaatgcatgtcttagacatcagtaaaacagtgctctcacttataaaactatatacactatatagtgtatatcatttataaaactactactggaacaattatactgcatcttgtctaagagtggctacttaagaactatttcttggtaagttagaaagctacttttcgtatataaagtttaacattcttgggcataatttggtaaaaatgttaaaattgcaccaggcagaattttttctcccttttatgaatgatatttgacctgctttccctttttcagaaaattctgacattagctctcctcaaaatgaatttttgttagtccccttaatgcacatctaaattacctacatggtgttattctaaggcaataagcctcccaacttagcaaagaaactctacaaaccaaagatcttcaaatacacgtctaagtccccaagcaaatctgatagcatacttcagtggcaaagccaaagctgtatgctggaagaacacttcacgaagactaaaagtcttactctaaatgagaaagagctcacagacttgtcttccccatcccattcaacactattgctaagggctcaccatgctttagaacgctaactctaactggagtccacaagagagacgatactagcaatcatcaggcaacctttgcaacggtggtaggcttctgcatcctgaatgcagaaggtgtgttcaaggcattacaaaggcatggaaagcagctttctgtcaaagacctgggcaggggctgcatacatatttacaaagctgccatcatagcccaacagaccatgcaccaacagtttatttttacccttataaataagcatgacaggggagaaaagaaacgtaaagaacccagagtcaacaaaatcctcagcatgatgaagaaaaaaggcatataaatgtccttatatagtatttcaatgcatagtttagtgtcatttaagacatttagttttaaaaaaatttatagttttactctatggcaatcatcaaggctctatggttattagtgtcatctgaactttaagacatatattttgtcttaagacatatgtttcctatgagtcgccacacccattcttctaaggattaataatggagtaaagtatttgactttatgtctatccttgtcttatgctatcgacattctagtgaggttacaatgtactgtaggaaagctatgaggaggtagtatatcaatctaggtacatttacacgaagttaaagtccttggctcactctcaatttcacaaataacatgcatgctacgcatttctacctggctaagccaccggcacctttaaactcaacatgtttataacctacattttaatctcgactcatgaatcagttctttatcctgatttcactattttttttttttttgaggcagggtctcactccgttgcccaggctggagtgcagtggctagatcatggctcacggtggcgttaacctctcaggctcaagcaatcctcccgcctcagcctcctgagcagctggaactacagacacatgccaccatgcccagctaattaaaaaaaattttctgtagagattgggtctcactatgttgcccaggctggtcttgaactcctgggctcaagcaatcttcctgccttggcttcccaagtagctgggattacatgaatgagccaccacatccagtctgattttactatttttgttaatatcgtgataatagtcctagtttccaaggttaggatatttggcattacgctttcattttccttttgccttatgctcatatccaactacatctttcagttcttctgttttcaacacttcttcaatttctctctctctggaaggccaggatagcatagtgattaagagtacggactctaaagcctgatttcctggtctcgaatcctagctcagagatcgattaactatgggaccctgagcatctcactaaatctttctatgctttggtttcccatctataaaatcgggttggtacaaggaacaaatgagtcaatatatgtaaagtgcttacatatattacatatagtgctgggtacataagtattacataactgttagaaattatgactgcctctgtttccaatacacttatctggcccttcaccatcttttgtcttgagtctcacaaaagcctcctcatcggcttcacaaatgctctgttctctttttaaacatcccacatacaactataagctagaacaacagaatcttagggcttgggaaaactttaaaattcatctggccagcccctcactttgacatacaaacttcctacctttccaatattttcccaaaagttcagctatacgtcacaaagccagtcaattctatatttacgcagccatattagaaagtaatttgttgatttgaactgaaatctgctgtccatcttctttcaccaattagatttatttgtgtcctttaattctgccaaaaattatcatactctcttttctactggtcagcctctcagatcattgaagatagctatttaatctcaattaaatttttcttcatctagccacccttgagtcctacaaatgttgctcatgttacattgtttgcttacccttaacatattggttactcttctctgcacaaagcacagctctggtcacacactacatataaaaatatttcatagttcaccaaagcacactgaagtccaaaatccttagcctagaaatctaaactctctctaaccaagccccaattgttacttttttgactttggttttcacggttctccagcttgcatcctttgctacagacaaatttgactgctagccctattctatttagtagaatcaccttcttttcatgctttggggctctacaatgttttccctttctttttcaaggcctttcccacagcctatctctacctgcacaaatgatttttccacttgaagcttgaatgacaccttcttcaggcaacagtccatggtctaagatgctccaaggcagggatgaccttctcctcttctatactattatagagttttgtttacacatatattatgattgttattgcataccatcttttattgtagtttttatacatatgcattattcttcccactatattgtaagttgatgaaggcaggaactaggtcttaatcctttttttctctttcacacatttctagcacataagcactcaataaatatctgtaggattatttcatgaattgatttaacaaacatttattgagtactctgcatagctcagggcaaacttgagctttatatactttgattaaataaattactgatgaacataaaagtatctgaaattttcagtctgagtgactagaaaaatgttggcatcattgagggaaaccaggaagtcaggatgagttatgtttggttttggttgtgtttaattcaaggtgctggcaaaagatgcagaatgataggtatttgctaagctggcatatggataggcatttactaagctaagattctattattggagcttacagttgtgtgtgggaaagctgcatgctaggtgctaatgtggatcaaaaaagaggcaggaaagagggtggtgctaattcatcggcacttgtctgagattaacattaaatcaaagtaacgacataaaaaatagtggctacaatgtaaggaaacactgtcagtgtccattgacagacaaatggataaagaaaatgtagtatatatacaataaaatactattcaaccttaaaaaagaaggagatcctgccatttgctacacatgtgtgaacctggaggatgttacgctaagtggaataagccatgtgctgaaaggtaaatactctatgatctcacttatatgtggaatcttatatatatatatgtatatatacacatatacatatatacacatacatatagatatacatgtatatatgtatgtgaatatatactcatatatgtctatatacacatgtgtgtgtatatatatgcacacacacatacacacagagttagggaataaaatagtggttatggagtggggttggggagaggaaatgggaagatacaggttaaaggacacaaagtagcagatatgcaggatgaacaagtctagagatttaatgtacaacatgaggaccatagttaatataattgtactgtattaataattttttattttttatttcattaaaaagtttttttaccttttattttagattcaggaggtacacatgcaggtttgttacctaagtacattgcataatgccgaggtttggggtatgaatgatcctgtaatccaggcactgagcatactacccaacagctagttttcaacccttctccctctcttcctccccctatagtagttcccagtgtcttttgttgccatctttatgtccctgagtattcaatgtttggctcccacttataagcaagaacatgcagtatttggtttttctttcctgtgttagtttgcttaggataatggcctccagttccatccgtgtggctacaaagaacaatacttagttcttttttttttttttttttttttgaggtggagtcttgctctgtcacccaggctggagtgcagtggcacaatctcagctcactgcaacctccacctcccgagttccagggattctcctgcatcagtctcctgagtagctgggattacaggtgcgtgccaccacgtccggctaatttttttgtatttttagtagagacagggtttcaccatgttaggtaggatggtctccatctcctcacctggtgatccacccaccccaacctcccaaagtgctgggattacaggcatgagccactgcacccggcctatttagttctttttttatggctacatagtattccatggtacatatgtaccacattttctttatccaagcctccattgataggcatctaagtgatctcaagtctctgttactgtgagtagtgctgtgatgaacatgcaagtggatgtgtctttttggtagaacaatttgttttcttttgtatatatccccagtaatgggactgcttgattgaatggtagttttgttttaacttctttaagaaatctccaagttgctttccacagtggttgaactaattttcactcccaccaacagtggataagtgttcctttttcttcacagcctcactagcatctgttattttttttaactttttcatagcagccattctgacttaggtgagatggtatctcactgtggttttgatttccatttcgctgatgattaatgatgtggagcattttttcatatgtttgttggctacttgtatgtcttctttagagaagtgtctattcatatcttttgcccttttttttaaaaagcattattttattttaagttccgggatgcatgtgtgggatgcgcagatttgttacataggtaaacagtgccatggtggtttactgcacctatcaacccatcacctaggtattaagccccacatgcattagctatttttcctgatgatctcccttccccacaccccaatagtccccagtgtgtgttgttcccccccatgtccatgtgttctcattgttcagctaccacttatgtataagaacatgcagtatttggttttctgttcctgtgttagtttgctgaggataatggctcccaactccatccatgcccctgcaaaggacatgatctcattcttttttaaggctgcatagtattccatggtgtgtatgtaccatattttctttatccagtctatcattaatgttttttgtcaattttaatgggattatttgttttttccttgttcaattgaatcaatggattcttccaatctatgagcatggaatgtttttccatttgtttgtgttatctatgatttatcggagcagtgttttgaagttctccttgtagagatctttcacctccttggttagatgtattcttaagtattttatttttttgtggctactataaatgggattgtattcttgatttggctctcagcttgaacattattggtatatagaaatgctacttattgaggtggaacagctccggtctacagctcccagcgtgagcgacacagaagatgggtgatttctgcatttccatctgagatactgggttcatctcactagggagtgccagacagtgggcgcaggacagtgggtgcagcacaccgtgtgcgagctgaagcagggcgaggcattgcctcactcgggaagtgcaaggggtcagggagttccctttcctagtcaaagaaaggggtgaatcggcacctggaaaatcgggtcactcccaccctaatactgtgcttttctgacaggcttaaaaaacggcacaccaggagattatatcccgcacctggcttcgagggtcctacgcccacggagtctcgctgattgctagcacagcagtctgagatcaaattgcaagactgcagcgacgctgggggaggggcacccgccattgcccaggcttgcttaggtaaacaaagcagctgggaagctcgaactgggtggagcccaccacagctcaaggaggcctgcctgcctctgtaggctccacctctgggggcagggcacagacaaacaaaaagacagcagtaacctctgcagacttaaatgtccctgtctgacagctttgaagagaccagtggttctcccagcacgcagctggagatctgagaacgggcagactgcctcctcaggtgggtccctgacccctgacccccgagcagcctaactgggaggcaccccccagtaggggcagactgacatctcacacggccgggtactcctctgagacaaaacttccagaggaatgatcagacagcaccattcacggttcatgaaaatccactgttctgcagccactgctgctggtacccaggcaaacagggtctggagtggacctctagcaaactccaacagacatgcagctgagggtcctgtctgttagaaggaaaactaacaaccagaaaggacatccacaccaaaaacccatctgtacatcaccatcatcaaagaccaaaagtagataaaaccacaaagatggggaaaaaacagagcagaaaaactggaaactctaaaaagcagagcacctctcctcctccaaaggaatgcagctcctcaccagcaacggaacaaagctggatggagaatgactttgacgagttgagagaagaaggcttcagacgatcaaactactccgagctacaggaggaaattaaaaccaaaggcaaagaagttgaaaactttgaaaaaaatttagaagaatgtgtaactagaataaccaatacagagaagtgcttaaaggagctgatggagctgaaaccaaggctcgagaactacgtgaagaatgcagaagcctcaggagctgatgcgatcaactggaagaaagggtatcagtgatggaagatgaaatgaatgaaatgaagcgagaagggaagtttagagaaaaaagaataaaaagaaacgaacaaagcctccaagaaatatgggactatgtgaaaagaccaaatctacgtctgattggtgtacctgaaagtgacggggagaatggaaccaagttggaaaatgctctgcaggatattatccaggagaacttcccaaatctagcaaggcaggccaacattcagattcaggaaatacagagaatggcacaaagatactcctcgagaagagcaactccaagacacataattgtcagattcaccaaagttgaaatgaaggaaaaaatgttaagggcagccagagagaaaggtcgggttacccacaaagggaagcccatcagactaacagcggatctctcggcagaaactctacaagccagaagagagtgggggccaatattcaacattcttagagaaaagaatttttaacccagaatttcatatccagcaaaactaagcttcataagtgaaggagaaataaaatactttacagacaagcaaatgctgagagattttgtcaccaccaggcctgccctaaaagagctcctgaaggaagcactaaacatggaaaggaacaactggcaccagccactgcaaaatcaagccaaaacgtaaagaccatcaaggctaggaagaaaccgcatcaactaaagagcaaaataaccagctaacatcataatgacaggatcaaattcacacataacaatattaaccttaaatgtaaatgggctaaatgctccaattaaaagacacagactggcaaattggataaagagtcaagatccatcggtgtgctttattcaggaaacccatctcatgtgcagagacacacataggctcaaaataaaaggatggaagaagatctaccaagcaaatggaaaacaaaaaaaggcaggggttgcaatcctagtctctgataaaacagactttaaaccaacaaagatcaaaagagacaaagaaggccattacataatggtaaagggatcaattcaacaagaagggctaactatcctaaatatatatgcacccaatacaggagcacccagattcataaagcaagtcctgagtgacctacaaagagacttagactcccacacaataataatgggagactttaacaccccactgtcaacattagacagatcaacgagacagaaagttaacaagcatacccaggaattgaactcagctctgcaccaagcagacttaatagacatctacagaactctccaccccaaatcaacagaatatacattttgttcagcaccacaccacacctattccaaaattgatcacatagttggaagtaaagctctcctcagcaaatgtaaaagatcagaaattataacaaactgtctctcagaccacagtgccatcaaactagaactcaggattaagaaactcactcaaaaccgctcaactacatggaaactgaacaacctgctcctgaatgactactgggtacataacgaaatgaaggcagaaataaagatgttctttgaaaccaaccagaacaaagacacaacataccagaatctctgggacacattcaaagcagtgtgtagatggaaatttatagcactaaatgcccacaagagaaagcaggaaagatctaaaattgacaccctaacatcacaattaaaagaactagaaaagcaagagcaaacacattcaaaagctagcagaaggcaagaaataactaaaattagagcagaactgaaggaaatagagacacaaaaaacccttcaaaaaattaatgaatccaggagctggttttttgaaaggatcaacaaaactgatagaccgctagccagactaataaagaagaaaagacagaataatcaaatatacgcaataaaaaatgacaaacgggatatcaccaccgatcccacagaaatacaaactaccatcagggaatactacagatacctctacacaaataaactagaaaatctagaagagatggataaattcctcgacacatacaccctcccaagactaaaccaggaagaaggtgactctctgaatagaccaataacaggctctgaaattgtggcaataaccaatagcttaccaaccaaaaagagtccaggaccagatggattcacagccgaattctaccagaggtacaaggaggaactggtaccattccttctgaaactattccaatcaatagaaaaagagggaatcctccctaactcattttatgaggccagcatcatcctgataccaaagccgggcagacacacaacagaaaaagagaattttagaccaatatccttgatgaatattgatgcaaaaatcctcaataaaatactggcaaaccgaatccagcagcacatcaaaaagcttatccaccatgatcaagtgggcttcatccctgggatgcaaggctggttcaatatacgcaaatcaagaaatgtaatccagcatataaacagaaccaaagacaaaaaccacatgattatctcaatagatgcagaaaaggcctttgacaaaattcaacaacgcttcatgctaaaatctctcaataaactaggtgttgatgggacctatctcaaaataataagagctatctatgacaaacccacagccaatatcatactgaatgggcaaaaactggaagcattccctttgaaaactggcacaagagagggatgccctctctcaccactcctattcaacatagtgttggaagttctggccagggcaattaggcaggagaaggaaataaagggtattcaattaggaaaagaggaagtcaaattgtccctgtttgcagatgacatgattgtatatctagaaaaccccattgtctcagcccaaaatctccttaagctgataagcaacttcagcaaagtctcaggatacaaaatccatgtacaaaaatcacaagcattcttatacaccaataacagacaaacagagagccaaatcatgagtgaactcccattcacaattgcttcaaagagaataaaataccttggaatccaacctacaaaggacgtgaaggacctcttcaaggagaactacaaaccactgctcaaggaaataaaagaggatacaaacaaatggaagaacattccatgctcatgggtaggaagaatcaatatcgtgaaaatggccatactgcccaaggtaatttatagattcaatgccatccccatcaagctaccaatgactttcttcacacaattggaaaaaactactttaaagttcatatggaaccaaaaaagagcccgcattgccaagtcaatcctaagccaaatgaacaaagctggaggcatcatgctacctgacttcaaactatactacaaggctacagtaaccaaaacagcatggtactggtaccaaaacagagatattgaccaatggaacagaatagagccctcagaaataatgccacatatctacaactatctgatctttgacaaacctgagaaaaacaagcaatggggaaaggattccctatttaataaatggtgctgggaaaactggctagccatatggagaaagctgaaactggatcccttccttacaccttatacaaaaactaattcaagatggattaaagacttaaacgttagacctaaaaccataaaaaccctagaagaaaacctaggcattaccattcaggacataggcatgggcaaggacttcatgtctaaaacaccaaaagcaatagcaacaaaagccaaaattgacaaatgggatctaattaaactaaggagcttctgcacagcaaaagaaactaccatcagagtgaacaggcaacctacaaaatgggagaaaattttcacaacctactcatctgacaaagggctaatatccagaatctacaaagaactcaaacaaatttacaagaaaaaaacaaacagccccatcaaaaagtgggcgaaggacatgaacagacacttctcaaaagaagacatttatgcagccaaaagacacatgaaaaaatgctcaccatcactggctatcagagaaatgcaaatcaaaaccacaatgagataccatctcacaccagttagaatggcaatcactaaaaagtcaggaaacaaccggtgttggagaggatgtggagaaataggaacacttttacactgttggtgggactgtaaactagttcaaccattgtggaagttagtgtagcgatttcctcggggatctagaactagaaataccatttgacccagccatcccattactgggtatatacccaaaggactataaatcatgctgctataaagacacatgcacacgtatgtttattgtggcactattcacaatagcaaagacttggaaccaacccaaatgtccaacaatgatagactggattaaaaaaatgtggcacatatatgccatggaatactatgcagccataaaaaaggatgagttcatgtcctttgtagggacgtggatgaaattggaaatcatcattctcagtaaactacagcaaggacaaaaaaaccaaacactgcatattctcactcataggtgggaattgaacaatgagaacacatggacacaggaaggggaacatcacactctggggactgttgtggggtggggggagtggggagggatagctttaggagatatacctaatgctaaatgacgagttaatgggtgcagcacaccagcatggcacatgtatacatatgtaactaacctgcacattgtacacatgtaccctaaaacttaaagtataataataataaaataaaaataaaaaaagaaatgctatttatttttgtacattgatctgtgtatcctgaaactttactgaagtcctgtatcagttccaggagccttttggcagagtctttagggttttctaggtatagaatgataacatccatgaagacagatagtctgagttcctctcttcctatttggatgccttttatttctttctcttgcctaattgctgtggctagcacttatagtactatgttaaataggagtggtgagagtgggcatccttgtcttgttacagtcctcaaggggaatgcttccagtttttgcctgttcagtatgatgttggctgtgagtttgtcacagatcgcttttattattctgatgtatgttcctttgatgcctagtttcttgagggtttttttttttttatcatgaaggtattttggagtttataaaaagctttttccacatctattgagatggtcatatgacttttgtttttaagatgaatcacatctattgatttgtatatgttgaatcactcttacgtcccagggatgaagcctacttgattgtggtgcactagctttttgatgtactgatggattcagtttgctagtattttgttgggaatttttgcatctatgttcaacagggatactggcctgtagtttgttgttgttgttgttgttgttgttgttgttgttgttgtatctttgccaggttttggtaccagggtgatgttgccttcatagaattagttagggaggagtcactttcctcgattttttggaatagtttcagtagaattggtaccagctcttctttgtacactggtagaatttggctgtgaatccatctgtttggggctcttctggttgctagagtttttattactacttcaattttggaacttgatattcatctgttcaggctttcaatttcttccttgttcagtcttgggaggttatgtttttccagtaatgtatccatttcctctagactttctagtttgtgtgagtagaagtgttaataatagtctctgaggatcttttgtatttctatgggattggttgtaatgttatctttgttatttctgattgtgcttatttggctcttctcccttttttattttttaatctagctagtggtgtatccatcttttttatcctttcaaataactaacttttggttttgttaattctttgcttggatttttgagtttaatttattcagttctgctctggttttagtcatttattttcttctggttgctttggggctagtttgttcttgttttctatttcctctaggtgtgaagttagatcattaatttgagatgtaactttttgaggtagccattcagcgctataaactttcctcttaacatagcttttgctgcatcttagagatttgggtatgtcctgtctctgctttcatttatttcaaaaattttttttaaatttctgctttaatttcattgtttacacaaaagtcattcaggagcaagttgtttaactttgacataactgtgcagttttgagagatcttctcagtatcagcccaaaatctccttaagctgataagcaacttcagcaaagtctcaggatacaaaatcaatgtacaaaaatcacaagcattcttatacaccaacaacatacaaacagagagccaaatcatgagtgaactcccattcacaattgcttcaaagagaataaaatacctaggaatccaacttacaagggatgtgaaggacctcttcaaggagaacgacaaaccactgctcaaggaaataaaagaggatacaaacaaatggaagaacattccatgctcatgggtaggaagaatcaatatcgtgaaaatggccatactgcccaaggtaatttgatttctatttttattccactgtggtccaagagtatggtggtatgattgcaatttttctgaatttattgagatttactttaaggctgagcatatgtttcctcttggagtatgttccatgtgcagatgagaagaatgaattttgtgtttttgatgggtagagtattctgtagatgtctactaggtccaattggttgagtgtctaagctaagttcagaatttgttagttttctgtctcaattatctgtttaatgttgtcagtggggtgttgaagaaccatactattattgtgtagctgcctaagtcttttaataattctagaagtacttgttttatgaatctgggtgccccaatgttgggtgtgtgtatatttatgatagttaagtcttgctgaattggaccctttatcattatgtaatgaccttcattgtctttatttactgtcgttggcttaaagtctgttttatctgatataagaatagtgacccctgctcttttttgttttctatttgcatggtagatctttctccaacccttaactttgagcttctgggtgtcattatgtgtgagatgagtctcttaaagatagcagatggatgggtcttgtttttttatccaacttgtgactctgtgtcttttaagtgggggcatgtagaccatttatattcaaggtaaatattgacatgtgaggttttgatcctatcctgaagttgttaactggttgctttgtagtttctattgtgtacttgctttatagggtatgtgggctatgtactggagggtgtttgtgtggcagcaggtattgttctttcattgctgtgttccttaaggagctcttttaaggctggtctagtggtaacacattccctcagtgcttgcttgtctggaaaagtttttatttctccttcacttatgaagcatagttttgtgggatatgaaattattggttggaatttcttttctttaagaatgctgaaaacaggcccctaatctctcctggcttgtaaggtttctgctgataagtctactgttagcttgatggagttctctatgtaagtaatctgaccttttactctggctgcttttaagatttttttctttagcactgatcttggatagtctgcggactacatgcattggtgatgttcattctgtatagtatttctcaagtgttttctgcttttcttatatctggatataaacctttctagcaagattaaagaaatatttttgaattattccctcaaatgttttccaggtttttgctttttctcctcctctcccagaatgccaaaaattcacattttggttgctatatataatcccatatttctcaaatactttgttcatttttttatcattcttttttatttattttgtcagactggcatagttcaaaagactggtctccaagcttggaaattctttcttcggcttggtctagtctattaataaagctttcaattgtatttgaatttcaactgtattttgaaattacttgagtgtgttttcaattccagaagctttgattgatttctgtttagcatattaatctcttcctttatttcctggattgctttagaagtttctttgtgttgattttcaaccttgtcttggatctcattgagcttctttgtaattgtgctttgaattctttacctgtaatttctgaatttctgttttggttaggaaccattgctggacttgctagtgtgatcctttgaagctgtcgctacattcagattttcatggtgccaaaactcttgtgctggttccttctcatctggagatgttggcacttctaatttttgtaattatttccttgccagtaggttttttcttcatcattctttacctataatattattggtttttttttttttttttttgagacagagtattgctctgtcacccaggctagagtgtagtagtacaatctcagttcactgcaatctctgcctcccaggttcaagctattctcctgcctcagcctcctgaatagctgagactacaggtgtgtgccactacgtccagctaatttttatatttttagtagagatgcggtttcctatgttggccaggctggtcttgaactcttgacctcaggcgatctgctccccaccccaccgatccccttggcctcccaaagtgctgggattataggcgtgagccaccatgcccaggccttactgtttttttttttttttttggtttgtttaatttccctttccttttctccccctccctagggggtgtgactgcagagaatgctgggtatgggctgtcttttggctttgcttctatagttctatgcacttctcttagcaggttttatagttagacctacaagccagtagatggtgcttgtaggtaagagctagctagctacagctaatgtggctgcatatatatttcatccttgtttactggtagaaactctctgttctctcaggcaatggactgattcatgcagtgcagagtgctctgaactctgctcagccctagggttgtgggggacaagatgaatggggccagactaggcaggtccacctacagatcttccaatgtcaggcacaagcaccagtgccaagtgataatccagtgggcagccaccaggtgaataggtgctttgaatgcctggagatctccctgggcatgcagcagagagggcctccctgcaccaagatctctgcacaggaaggatggggcaggtcaggatgccaatccaggtgagttggtgctccaaatgcctggagatctgcctgggcttggagtagagagagcctcactacaccatgatctgtgcccagaaagggtgcagcagctcatggtgctgaaccaggcaaacagttgctttgaatgcctggagatttgccttggtgtggagcggaaggggccctgcggcacctcaatttatgtccgtgaagggtgaggcggctcaggctgctagtctaggcaagcaggtgctctaaatgcctagatttctgcctgggcatggggcagagagggccctactggaccaaaatctatgtccaggaagggtggagcagctcaggcttctggtccaagtaagtgaatgttctaagtacctgaatttctgcctggggtggagtggagagggctctgctgcaccatgacctcaggggagcaggctggggcacttagcaatggcatacacagaccagatgcaggttgccaagctggccctggctgcaaatctcacttcccaagggaaactgcagttctcctaccaatccgggattgcagtcggggagagcacaattccagtgccttctgctgaggtgctttccgtagttctggctgtggaggcccctaccctactccagagcaggtgctccaatctctggcctgaggctaaaatgcttgtgtggccacacttctaggttgccaagcaatggctgattttgtatgcacccagattaaaaatggcatctggctctcattcttgggtctgggaaaatatctgcagcttttcctggtatctttctctcacagcatctccaagcctctttctaagttagctctagggcttgggcaaaacaaagtgctttcccttggcctaggttgttcagatccactgtggaaaagtgagtcacagagggaagctctctgcccccttgtgtacttgggcttcactcacttttatcagctggatgacatcataggggctgtttgccagcattcacctccctgggatctggagtgtccttcacaattcccagaataatgcttttttaacttaaaaaaaatcttctcatgtcagaggagagtggaccccaggctgggagagaaatgtcttagtcaccttgggttgcaatagccaaatgccatagagtgggtggctgaaacagcagaaatttatttctgacaattctgaaggctaaagtccaagatcaaggtgcaacatggtcaggttctggtgaggtccctcttccagattgtggatggctgacttctcactgggtcctccaggatttttttaaatagatagattttagctgctcttgtcacaaaaagtaacatgagatgatagatattttaatttctttcacgatagtaaccattctactatctatgtgcatcccataatatcatgttataaacctcaaatatatacaataaaattattacgtagtccacaaaactaatgactatgaacaaagtcaatcttttctcatgtacttggaaaactcctaaatttctctgtttgatactcaaaagtaaacatttgaatctctgttttcattcatatctccattcagtgaggacttctatagaatcactggtttgaaaggcctagaatgtcaggatagttaattctttttgaggcttcaaaggtcagttctcacacgttataacctcctggccacttgcaatctatcaataaacacagacaaatgtccttgctcttttgaaggacaaaagtgttgtactcctttgtggtttggtttctaacttttaagagcaccaagagcagtccaaattcaaaggaaagaagcagcttcctcccactctgttgtcaattatcttcttgggaagtttctttgcagagtttttgtgcatctctgagccaattaccacaagaaaacaaaatgacctttaaattaaagcaatatgagtatgcttgaaatttgcagtgagaatagatcttaagtgtttttgccacatacacacacacacaaaagtaactatgtgaggtgatggatgagttaattaacttgattgtggtaataacttcacaatgcatatgtataaaatcatcactgtgtacatcttaaatgtatacaattttatttgttaattatgtctcaacaaagctagagtaaaaaagaagaaaggaaacaatctgaaatgcaaatgattgactaataatttccaattatgtaaaatattcttttgtaagaaatatgaatactcacttgacaattgtagactatagccacaaataaaaacaaatatattgatcatttatattaaaaatgaaaatatacccttaatctttttcttcttagcatctaagttcagactgtggtttacttggtcggctcttataaaaagaaataaaagccaaaactcttatttaggttttaatacattcaaccacatttcagattttccttaacaagcctaaatattaaaacagcttttaaagatgagtatataaaataaatcatctttatcatgaaagcactccgattatactttccttgcatttttaaatgatgacccttttagaattatccaaaccctgtaactgtcacattcttaactttccacttttttaataaaaatgatttccataaagattagaaattaatctgacctgactctgaaaactaatatagtttagcacgggaagctgtaaaaattcacctatctaggtttaataaagaaagttttttcaatttaaatatgcattgcatttaataagcttgcatgataatttcaacaatgttcatgggttctttaaattaccttcctgctgtgtccaggaaacaatccaattttatttttaagcaactgaattaagaaaagctttcaaaatcacaaagcgatttctgaatgacacaaaatgtaatgattagaagccagccaatcagattgctctgatggctgacttaagagaaaaaaaaattgtttgcctatatttctgtaaaccccaaatatatgagtttttggatacacctaaatgtttgactcttagatatcttctatccaaacatttgtcattgtgaggatcagcattccatccttttttccttccttttgacttttcattcacacgagttaaacatggtgctaactggcagaatacaacaacaaagacagatatggcccctgcctttatggagcatggaatctattgcatacatactcaaagaaatgtggaactacaaattgagaaaagtactatgaaggagcaatgcagagtgcaatgggagactgtcacagggtgacctaatttaatttgaaggtgtcaggattttgaccatttttaggcattggcatttaagttgaaaactacaggatgaatgggcaaacgtatgtggcgatggggaaatgaaatagataatatgtgtcgtaaggagagtaagagagagaggcagaatgaatggtatgagatggggctggacaagcagaggtcagagaattcaggcctttgtaggccttgctaaaattttggactttattatagtagcaattgaaaaaccctgaaaggtagtagagagtaacaaaaatcatatttgccttagaaagatctctttggatataatatagagaatggagtagaaggaagaagaggatatataagtggccaaaaaacatatgaaaaaatgctcaacatcactaatgacaagggaaatgcaaatcaaaaccacaatgtaataccaccttactcctgcaagaatggccataattttaaaaatcaaaaatatcatagatattggcatagatgtagtgaaaaggaacccttttacactgctggtgggaatgtaaagtagtacaaccctatggaaaacagtgtgtagattccttaaagaactaaaagtagatgtaccatttgatccagcaatcccactcctggatatctacccagaagaaaagatgtcattatatggaaaaagacacttgcacatgcatgttgatagtagcacaatgtgcaattgcaaaaatatggaaccagcccaaatgtccatcaatcaacaagaggataaagcaaatgtggtatataaataccatggaataatactcagccataaaaaggaacaaagtaatgtcattcacagcaacctggatggaggtggagaccattattctaagtgaagtaactcaggaatggaaaaccgaacattgcatgttctcttataagtgggagctaagatatgaggatgcaaacgcacaagaatgatataacggagtatggggacttgaggggaagggtgggagagggatagaggatggaagatgggtgataaaagactacacattgggtacagtgtacactgcttgggtgacgagtgcaccaaaatatcagaaatcaccgctaaagaacttatccatgtaaccaaacaccacctcctccccccaaacctattgaaataagaaaaagaaccctatctctcaccatgtacaaagatcaaatcaaaatggattagagacttaaatctaagacctcaaactatgaaactactacaagacataattgggggaaatctgcaggacattgatttgggcaaaaagttgttgaataataccccacaagcataggcaaccaaagcaaaaatggacaaatggaatgacataaagttaaaaagcttctgcacaggaaagaaaacaatcaacaaagtgaagaaacaacccacagaatgggagaaaatatttgcaaagtactcatctcacaagggattaataaccagaatatataaggagctcaaacaactctataggataaaacctaataatctgatcaaaagatgggcaaaatatttgaatagacatgtctcaaaagaagacatacaaatggcaaccaggtatatgaaaaggtactcaacatcacttatcatcagagaaatgcaaatcaaaactgtaatgagaaatcatctaaccccagttaaaatggcatacatccaaagacagttattacaaatgctagtgaggatatggacaaaagggaaccctagcacactgttggtgggaaggtaaattagtacaaccactatggagaacagttttgagaacagtcagtttttataaaactaaaaatggagctaccatatgatccaggaatcccactgctggatatatatcccaaagaaaggaaatgagtatatcaaagagaaatctgcacccctatgtttgttgcagcactgttcacaatagctaagatttggaagcaacctaagttgtccatcaacagatgaatggataaagaaaatgtggtacatatacacaatggagtagtattcagccataaaaaagaatgatatcctgtcatttgcaagaacatggagggaactggagatcattatgataagtgaaataagccaggaacagaaagacaaacattgcacttgctcacttatttgtaggaactaaaaatcaaaacaactgaactcatgtggacagggagtagaaggatggttaccagaggctgggaagggtagtggggtttggctgaatggtgtgggagggagatggggatggttagtgggtacaaaataatagaaagaatgaataagacctactatttgatagcacaacagggtgacaatagtcaatagtaaattaattgtacatttaaaaatagctaaaagagtataattggattgtttgtaacacaaaagataaatgcttgagataatggatacctcatttactctgatgtgattattatacactgcatgcctgtatcaagatatcttttgcatcccataaatatatacacctacttaggatgtatgtgtagcaaacaacatagtatatatagggttcagtgctatccaaggtttcagacatccactgggaatcttgaaacacatcccccagtggataatggggactgctgtatgcaaaatatttttatgaagtagaattacaagacttggtgactgatcagataaagagtgcaaaggatatggaaaagccatgcatcatgtcttagtttggcatgtgcaactctctgggtgtttactctatttcttatcaatatagggactgctgaaggatgagttcagctttagacctgttaacctgaggtgcctgtaaaaaattcaactaaaagtggcaaggaggcagatggatctatgggtctggaattaggaagaggtttcacgggcagagattaaatttttaagtcaccagtaaaaatggtcattgaaaccaagggaatttgtgatgagtgtgatgagaaatgaatggggcctaagattgtgggactttaacaattaaaggtcaagtggaggaggagatccagcaaaagagagaaggattttctatagatgtaaaagaaaaatcaagagaatgtagtatcacagaaaccagtgaaagagagttttccacgattaggagtagttaagtatcccaaatggtactgtaagtcaagtagggtgaacattaaaaagtgtctgtcatatttagtaaaatggtgattactggtaacatagtgacagctgttttagcggagtgattgggggtagaagccagaatgaaataggttaacaagtgactggagtaaatatataaaggataaggggatcttgattttacattgtcagagaagagagttacaaatatgaaaaaggagaaaacaagaatgaaccctgtggtgttgaactggagttggaggtaataatggaaactcatggttttctctagatagatagatgatatataaatagataaaaaggtgaatattgatagaaattagtatgtatatatatatgtgtgtgtgtgtgtatatatatatataaatgtatgtgtatatttcctacctctgttcaccatgagggcctgggaatagcaataccccaatagcaatgaacacacctagtgccgagaacagaacttggcttctaaataccacgccgagaaaagaaattagcctccttagagaaatgcctgattccaggcacagggcagggaaagtgcaaggtgagactggaatatcctattaagacaaaaagtgctcagagaaagatgaggacatgtcaaaaacatgcaaagtccaccttgaagtggcagtcagtcactgtttacaaaacaatttgagcatcaaaataaacagaaatagcaagaaactataattcattgaataatatgaaaaatcctgagttatcacaggtatgaataaatgaattaataaattgaaagtttgatgagcaatacatagcttcaaagtacctcctcacaaaacacttcttaattacaagtgcatatgggatgagtacagtggagaagcctggaagataccatattaattaaatgatcaaagttaacattaccagtagtgggccaaataaataatgggtaccacctgataggatataatgcaaacacaacattaattctatgatattcttgccaaagatgtacaacccaaatctaagtatgaggaaacatcagaaaactcccaaattgaggggctttgtataaaataaccagtatgtaatctttaggagtatcagtcatgacagttaaggaaagattgagataatcttccaacctgaaggagactagagggcatgacaactaaaatgtagtgctttattctgaaccagttccttttgctataagggatgttgctgggatatgtgatgaaatatgaatagaatctaagcattagacattagtaatgtatgaatgtgaatttcctgttttctatagctgtattgtggttatgtagaataatgcctttaattttaggaaatacacaataaagaatttgggagaaaagggtccacaacttattcttgagtgtttcaggggaaaattatttgtactgtactttcacttttcagtaagcttgtgattgttaccaaataaaaagtaaagggtgaatggaaggtaagaaagtggagaagttgaagttgaaacattaaagaaggcaagagataattaactagctagaggagaacgtgggattcaaaaaggaatttctttttcaagtgggagagacaaaaccatgtttaaaagctcttgagaaggatctagtagaaactttggagtcaaacttacgtgtgagagaaagtgggagaaaagtgggatccagagcactggtgaagggactgacctttcacaggactcttcgaggactgtaatgggaggaagaaagagagcctgggtgcagatccaacctgatttcagacttgatggcaggaaattgagggagttctcatgtgatggttattttttctgtgcagcaggaggcaagggcatccattgagaatgaatgggcagaggagaagttagaagtttgagaagagaaattctgaaaaagtgtctgtggagaataacaaaatgaggtaacctgaggaatacagtaatatttccaggcacttttgacatcccaagtgaggttggtggctgaatttttattggtatcagtctacccaaaccgtatgatttttttccaatagggcttggctactgcttgtataggtaggggcaaggctgagagttgacataattcattgtttgaggcttttcaggaaggaccaatggggcaatggattttagagtatttgcaagagggattaaaatgatagaccatttgtattggaacttgggagaatacatttttctacattctttcttaaaggaagtcctacttatatagaacttctctaaccttttactgatggaaaaagcactgcaactataacttagtaaacttctgaagtgttagaaaaattcaaagttggatacttttcaagctgaaaatcttactcttcccaataaattacaataatgttcagtagtttgctcatttggcatcattaatcagaactttgaagtgcggtacataattttaggttgagaaggtcctatctgttcaggccatttaaaatgggttaattatatcgattctaaagtaaaaggacagctatcccatagtgcctgaaatccccaaaactaaagtattatctcatcataattcagatacctgtgtttctacgtgagctgcttaaatgttacccattttatttattggagttcagaagaagatttaactggaagtttctgctgtcaaaaaatgaagttcaaaaccactgatgggtctgttgaaaaaaacccttgaccaattttccaaaaatttcaattataatgcctgtattatcttcctcaccagagttttggaacaatgagctaatgaagctttgttaaaatatataataataagattattggtaagttgaagggagaaaaataagtctagaacttgaggcattgctcagagtaagcaagacttaggtagggtggctgttgggagtcttaggcagaatgaaggtgttatggtgcaagggtgagggacaaggacagaagagccacatagggaaacgcaggagcctaaggggagattataggccactgaagagaaactttgctattttcacggttttaatggtactggttcttgccttgggaatatctgagataaaatgatacaaccctttcccaggatgtggcaacctaaaagatgatgaagccagagaaagtgaaactgaagatgtcttaccaagtgtattgggttaaatggtacgtccttgtcataattcctaaatcctgtgcacgagaccttattttgaaaaagggtttttgcaaatgtaattaaattaagaatcttaagattagatcagcttggattaaccttgtgggcactaaatagaatgacaaatgtcttcataagagacagaaaaggaaaagggaagaggagaaggccatatgaagacagaggcagagactggagttatgtagtcacacactaaggaatgctgccagccacctgaagctggagaaggcagaaatgtttctccccagagtctccagagggagtgtggacctgctgacattttgattttagacttctagcctccagaactgagagagaataaatttcagttgcttaaagtcacctggtttggggtaatttgttatgatagctctaggaaactgatatactaagcatgtcatttaaacatatagcagttgcactgtagttatcaagacctcatgatgcaatttaaacatgcaggcctgttggcattaagcaataattacaatagtagcagccactgcaaacatttatcgggaattttagatactaagcactgtgctgaatgatgcaaatgaattattttcctgagtcctcagaacagctctatgttagaggtactgttattaacctcactctacacatgaggggactgaggcttaacactttgtctagggttttacaaccaccaggcagtagaacagggatttgaacccacacagcctgatgctggagcccacacttttaaccactacactaaactgctttcagaagttatttggatacaccacagtagttggtaataacttatgttctaaataagtctgattggctgaacaataaagatatttttgttttcaagttcaatctaaactcagacatttcattgctatacaatagacacaaatctgtatcacaaagaaacaaaagcttttcaagacatgtcctgttacttacttcaagtaactagagttgagtaaagcaaaaaatgataactttgatagtaccatacttaccctagccagaattaagtagggatgttgttttaataaaaatgttcattttactttttttatttaagctatttgccctatagtatatgcaaaggatactttaataaaatcattacaccttatgtagtagttgtttcttttgatcacaataacatgttcaccctttaatatgatcatattcttccttctttctcacatctttgtactaacttctgttgtcaatttattcagtctacataaaataatcggtataatagcaaaatgacatagtaatatggtgctatctcaaaattagtagttgctcctcaaaaataaaggcagtctgctctaccttgatgtttggattgctcagctgtcataggaaacccttctgcctagacagctccagtcccttggcattctttcttaatgatattttatttgagaagctaacaacgacataaaagagtaataatgtgtagtaggttcaatcccatattttttaatatctcactgtttgagacatcttaaaatgctggcttcctcaaacagaaccacattgttattttccaaaattctattccttcaagggatagagttctttacttttcttaaatgaaaatgcccagaaatgatcagtttgaagctgttggggcagaaactcatcttcaggtccaaaatcgttgatgtgtgagttagaattaatagacctaactgggagtcccagatctgctacttattagccatgtgaactgggatatgctcatagcatgtctaagatggcgtcttcatttgtaaaatgaggatgctatcatccatcctaacttacaggaatgttggaaatatagtgtaactatttgaaaaacactttgaaaactcaagcagtaaaccaaagtaatcctgatacatagaaatgcatgaactttcataatggacagagttggatttgaatcctagatccagtagctgtgtgggcttagaaaatactcttcccttgatttcctaacctgtcaaaggagatacttcttagaagcgttgtttaaatagacgacgtttatgaaagtagtacactgactggcatatattattttttttctctctcctctcccttacatgccctatttctgaagaacatctctagattcagagcaaatagaggattccatttaggatcaatggtaggtttcccttgcttgggactcttcaaaaaagccccaagaacagtgctgcaaggactactgtgaagtcaaagtgtcaggcttcaaattttcttagaaaaatcaatttgagccaaccaaaaatgaggctgcattttggaaaattggcctttaatatctagaaagttcaatactgctttcaccatactagatgggcttttctttcagtaaagaaaataaaaggagtgagttttactacttttgactaggtgactttatgtgtataagaacggtttcatccttttctaggtccaacagaaagtttcaccttaaaaatcacagataaaaccacttttttcttctttggtctattcctccaaataattccaggtgtgatctacaggaccttttgttgtatatggagtcaagggggcaagagaattgttggtgatcttcaggagcaaattccactttctaatctccagtatctttttccaatgttgaaagcacagctaccaaacattttcaaatacccttctggttttgctttgccatttttgttttcagtaatgtttgcttttctcagtgttgtctgtatattcagcctctgaggactaatgtcacttgtccagtaacctaacaatgatgttaaactcaatgttctcataatgagacattactcatccttgggatatttacagtaatacaatgcactggataatatggaatgtgatctactgttccactggaataccaatgttgcgcatcattaataaatgcacagtttctattatatgtgaggctttcaattagcatacatatttttgtcatcatatatcaaaccagctgacttcttctcatcttgttatttttgctgacttgaaaagctgaattcttattgtagcagtgtatattaaagtctgaactttgaaaaccactccaaatgattttcagtattgaaatggaaattcgattttttccaagctttctaaatgaagcaacatgatgtttttcttctttcaatcatttctatggtacctttgcaaaaagaccatatgctgttaacctaaacctggtgtatttagattacaatgcattttgcaaagtatggcccacagagtgcctgcttgggatccagttaaaaaatgcatattcttgggccccactgcagatctactgagtcaaaatgtgagggtgaggcctggaaatttttcttttaacaatattctaggtaatgtattctaaaattacaggatcactgatttggtgttgagagagttgacactcttccatttctcatttctttgcctctataagaacctttatcatcctcataatcttaatcctttctaagtaacatgctgtcccattgactatttaaagatacctaagtgttccatttaggacacaggactggaaataagaagattctagtcctcattttgccatttattttccatgtgacattggacaagacttaatatttctgagctttattttcaccaacagcaaaatggtgaaaagtaggaaagaagggagaggaaacaagatggttagatacattaatgtctaagattttgtctggatccaacattttataatttcatgaatgtttcagctgctagaaagagagtaggagagggaaaaagaggacagtaagataagctgcagaagtcactaggtttggaggaatggaatgagcatgggttctagaatcagacacattagggtttagaccatagctctgatatactaattatgtcatcttgagcaaattataccatgctttgagctttaatttctttgtttattaacatggggataacatatattctcacagagttcacgttatgattaaaagagatagtacactatgtacaatagtacccagcaacaggtgctcagtaagttaatggatatgatgaagaagagaaggaataagaggatgaggatgaggagaaggagggagaggcagaagagaaggaggacgaaaaggaggaagatgtggaggaggacaaggaggaggaggataagggaggaaacattaaggaatgagacaaaatggtgggcatttggtacctcagatttatttgaaaacaaatatctgttgggaatctatgatgagccaagtactattccaggcaatggctatacagtggtggtcaaaatagatattttctacttttgtggagcttattttctgatgtgtatgtgtatgtgtagggggtgatggtatggcagagaataataaatgaatatgggatattttcagtggtaataatggctctgaagaaaattaaagtagggtgagagggatgcagagtaatgaaaggtgggtagttgctattttatattgggtgatcagggaaagcctctctaataatttatcaattgaacaaagactcaaaggaagtgtgagaacttcacagctatttggagggaggcaggcagaaagaataccaagaagaaatgttctaaaacaggagcattatgagaatactgaagaaaaaaaaggaggccagaattctgcatatgtagctggagcagcatgaaagagaggaagaaaggttagtaggagatggtgtgagagaggtcacagaggtgggagaagcagattgggtagggccctgtagattatagtgaggaagtcacctttaactctgagtgaagtgggaagaccatggaagcttgtgagcagaggaatgacaggacctgatttacaaaggattactcttgttgttctgctgagaatagactctagggggaaaagatggaaacagggagaccaattaacaggctattgcaataatacaggtgagaggtgatggtggcctgggaccaggacaggagcagtgtagctggtgagaaatggtcagattctggatatatttgagaatggagccaattagatttgctgatggactagatgtagatatgcaagataatgatgatcccaaggttttgggtctgagtaactagaagaacaaagttgcatttagtgagatggggaagactaaaagagtggcaagtataaggaggataagttacatgtgtaaatcgattgctacagtaaggagtcagccgactaacatttagtgggcactcctgtgtgagaagcccaataacaggtgcgctgagattttattagtaaagtgctcttgttagtattataaggaaaccagagaacattgtctttagttttagtcgagtgcttgtaaaattattttgggaataagctgcagtcttcctaatgcgtgggaagtccacatcagagttaatatacatcagttttcagctttccaaagccatgttcattatctctgaacttcagctttagccaaatcaaataaaaactagtacaagttgaggggctgcaactttgctatttgcttactcagagtgatgccttaccatcgctccaataactgccttaattgttttctggaaataatgctaccccatctggtgggatgtttctgaagcattaagtgctccaaggaaaagagcttctttgctttacagtaagcgcgctgctgtcaggagcctcactggctgttttgtacttcagtttgtgctgcttcccaagagctgaatggaactctattttgtcatttaaatctaaagaaggcatttgcacactgatgatgttatctgaagttctaatttgtgcaaacattgatctgctttgagcagaagagaaatctccattcagacagcaagaactgagctcagattaatagtcaggggaaagaactgaagcaccaggaagagtaagctttttttttttttttcattttaggatgctttatcagattttctttccagatttatttctgctccaacaaagaatattctttttgagctaaatctaatttgtgtataaaaaatacacacccatattgatttcactctggtttaaaatggtatttttgcagcgcaaaaatctaatcaatacaatcttatgagttggactggtaatggtaaacatactaacagatatttcatttcatggggccaaagctctggaaattgataccactgaaaaggattactcattcaccattgggtataactttgtttacccaaccatgatataggtgtaaagcagaaatacaattatgctgtggccaacacacagggggtttttgaatagtagaacttgccttccccatttcccctaagggccatagatcgtacaagttggcagatcaaataaggatattgtgggaaatcgtttactataaatgaaaaaaagtttaatctgatagggtagaaaattagactgacatagtcgctgaagaaaaaaagtctcccaagccaagatcaactttttaaaaattcagcttttagaggagatggatttgtagatccttgaacccatgctgcttttttttttcctcacacatgtatctaaagcctttggttttgagcgagacatgctacgcctttggttttgagcaagacatgctacaagtgaaattgtaagacagtagttgccagggattcaaattgcagccaacaagccttttaacatgcttaatcaaaactgtagcaataccaaaggaactgtgtttcaccatttctagtgggcttaagtgtgaggaactgaaattaatcaaaagatataacctggacttacctctgcctcatgctcacataactcttggttgcccccactggagtaaaatgtagtgaaaacctacagtgcaggagcatacaaagggttgagactagaagaaataattcagctagagtacagaaaaaagcaccattgtccctaaatattatgaccctggaatataagattgatgcctaaagccaaggaggcatgaatctaaggaaaacagatggctattgctgttaatgtacagtcaccataggaggtggatactaaaaattcagatatagattttatgctggaatcagccaagggcagtctgggcaataacgataatgcctgtgagtaccatgttgtgatcgctgtgggtgaccagaagacaataattgatatttcctataatcaatttataagggggcctttctcacaatagctcatagtgctttctaattcactagcctaggttgacataggcacaaaatcactccattagacggagaggagataggtaactattttcattttgataattggaaaacagaggcccaggctaatttgtccaaaatcctatagcaatttggctgtatttctttgaaccccttcagaaagctgacaatatatcaactcaaaatattatcagattctgtttatagtgcaataataggaagtaattcttccatgcaatacgtatttatacagcttagacagtagatgttcagtctttacctttgaacatacgaagtcactaaaggaggaacataagttttaaatattcaaatttcactgcctttggaatctatttttcagtaaataagtgtcataatacagaaaagctatgaattctaccttagtcttctggtctttaacaagtttgcaaagtgtattgtcaactcaactctttgattacaataagtattgtacttcttcctactactaagcatgtgtaatcaaatatcaacaggaaatgttatttcttggtgggtccttattaaaatgaatcagtgagatttaggtataaacagtggcctgaataagggatgatacctccctccttcattcacacaagatcttttctgccagggaggtatttagatctttgtcctccccttcgtagaaactttgagggttatactggtttgtaaacatctatattgattatagtttctaaaatgatattataattaattattctttaatatctaataaatcactttatctcccaaacatgctaggaagcatgcgacttccttatttatgctttatagagtaggaaactgaggctcaaagaaatgagggatttgactaaagtcacgggttactcagtagcagtgctggaactagatctaggactcttgactcttagcttcagactctttccactacagcagtggcttgatgggacacttggactagtcagtataggttagattaggttgcagatgacccacctccccacaagataatagtgggtggaaacaacagatgcttatttttcattcatgctacatgtgcaatgcagttcagaaggtggtgctctgaacacaacttaggacactgtcatctcagcatgaagcttttagggccttccaaggcaggctaaaagaaaatggagatttgtgcaatggctcttaaaagcttccactcagaaatgctacacataccatctgctcacatttcataggccagagcaagtcacgtgatgatgcctaactgaaatggcactgtgccccaaaggataaaacaattgggatcttggtgaacactaatatgtctaccagaatactttccattcaaatgaagtcttaatcagaaccccactatataaaatagatataaagtagggagatccaaacctacttaacttactccttgtttctttggaagctcctaaggtacttttaaagaacatcaggattcagtgaacccaattcaaaatcagctgcctccaatatacaaagaaagccagcacaccaaataagtatctttatagtaaagataagaagaccaataatgtttttcaggatcatgagataaaatagaagctaaagtgggaacagatcacagaatgatccattctttatctcttgttctactcactagactttggttctcccactgtgatacagaaaatcttcaagaatattgtgacttttcatgtcacaatgtattaggtgcacataatgctacccataacgaatgctaagtctcaagtgcacagcatggttcagaaactaatttctaaaggaggcacacagttttagattcattttgaactccacagctgcctcttagtactaagcaacttgacttgcatgcaagagtaaatgttttaatataatatgcctgtacattttcagccttgctgaattttaaaatatgattttttcagaaaacaaaaattattttattggattgtggctggaaggaaaatgatccttttaaagatgaggaaggtaattcagtatcactagtttttacgaagaacattttcaatcaagacagaaaaataaaaatatatgtgtatttcagggatgcttgtttaggcatagaataaatatggttagaacaatgatttcaaggtgtgtgtgtctgtgtgtgtgtgtacatgcatacatatgtgtgtgtgctaggggacacatcaaaaccactggggtggcggggagcttttcaaactacacatactccactaccctcattctgataactcaccccaaactgagaatctgtactttaaaaagtcaccattactttttatgaaaggagtagcctgtcatagccctgaggtgagttgggtagaataaaaatgttgaaatctactaggttggaacagtgttctgtactataaacatctgtggcaacatttttttctaagaattaaacctagaattctccttccagcagtgtcacccatcccaaactatgttgataacaagcaagccatttttttacccaacaacaaattcccaaaagagaagagatttcttgtgctatgcgtttaaaatgacaacagatcacataactacacagaataaagatatttttgttccaggcctccacattgggtaggcagaggggagaggagaacctattaacctgaatgacctccttcttttccttgctttctccctccctcccttcctccttttctcccaactatctatctatctatatcatctatctatcattgatcatctatctatcattgatcatctatctatcatcatctaccaaagcacactcccacatcaatttcatgttcacatgtgaatgcaaagacttttcacatataagtatgctgctgatcatccagcagattagtgaatcaatttaccagtcctgcaatctattttcttcccagagctggaaagaaaataaaatccacattaattccatcctatggatggaacgttacctttcattgccttctacaatgtgtaaagttcagtgaaggccctacctcaaagtttcattttggtggtgagaggtactatttgaaataaggttgctatagaaagatgcttccttctgagatgatgaacaactgacatttgtatagaactttaccttttacaaagcattttctgattaattatcataatgtctcaagtcatgtacatcagcttaaacttcccctgttttccaggcctgaggcattatgaggaaaaaatagaaatgacccggataagaagtgaggttgtgaaaatccaggaaagggacaactgctgatcgcattgtgtttggttttaatgtatatgtaaaccaaaattattctgaatacaaaaaaaaaaggaagaacagaatggttcctcaagttctcttatatcagcaaactatttaaaaaatcatgtctttgaaaatttagatagaacccagggacaaaatgaagagacagtggcaaatgggagatccaactatcatatgggtcaggaggttataaagtatttcattcttcaaattattctggtgtcctctaaatatgtccacctcaccctttatttcatttctttcactgcttggtaatatctcatttgataatatcatgggaatcttttcctcaatgtttttttctacagctctaggtagttttgacttaagttaaagatactgaaaactgtaagagagtatattatttctgaccctagcgttgcccttaaatctgtcaactagggtctattttgacctattttaaatggcatcatctggtcttccttcagctaccctcctcttttggggtgaaaagtctactgggccaatggtataagcttatctggagtttgcactcctgatccccaataagactactccgtgggaagctgggtgcctagaatgccctgtctacatggccctaagcctactttcagggcctatggaggactctggcaagtttggactatgttgccgatatatgcgccccaaggcttgaaggatagctaaaggacaactgttttctgggggggttggggtggtggcgtggtatgtcaatagagtttggctggtatggctgagtccatgtatatgaagcctctcataatatggaacagagtcagggctgggaggagaaaggggttagaacataggcagaaggtctctatttgtatttttgctctatgttccacaaacgttaaggatggccctatctgtaccaattatatttgaaaagaatgcagctttacgtaaaattctctcctgatatccccctatatgaaatctcaaagtaatctagaaaattggtcatggtatagatcattgcacctaagaagttaatacatctacctcccaggaagctccatgctatgctcactggcttatgaaaacaatcttctattctcctatttctgggtcatgcatgtaaaataagactagactaaaatggggtggctgtccatgggatgggagataggaggagaggagccagggtttattcaagctagaagtggggttacccagacaacattttagaagtactgagtggtaacaggctgggcgtggtggctcacgcctgtaatcccagcaagttgggaggcctaggcgggcagatcacctgaggtcaggagttcgagatgagcctggtcaacatggtgaaaccctgtctctactaaaaatacaaaaattagctgggcgtggtggtgcatgtctgtagtcccagctactcgggaggctgaggcaggagaatcgcttcaacccaggaggtggagattgcagtgagcggagatcacgccaatgcactccaccctgggtgatagagcaagatctgtctcacacacacacaaaaaaagcagcattaagtggtaactagaaggcagagccaaggatagagaccaggaggaattgatcatgcttcaagagctaggaacatgcccaagatttagtatcaggccagtaactataaactacccaatattatgcctagaagccatcttctcaacagcattcttaattcctgtttttcccacaaatggaagaagacggcaaagtgttttgatgataacacaaagaatttacgcttactttttaaaaaaatatgtaaccttggatgtagaatgacaggcaaagtagctaagtaaatgttggttgaagtagcatttcatgtctacatcacaggtgttcctgtatgaaagtgtcttggcttcaaaccctgagttaaaagacttaaaattcaaacacatttattgacactcaagcatggtcccagtaattaaacagtctgtggagggcgaactgtactaccaattcaagaaacttagtatttactctgggtgcttcatgactggggaaatttgagcaaatcacttatcttctctgtgccttagtttcctgatctgtcaattgtgaacaatcatttcctcacaggttgttgtaccaaatataataacaattggcaaagagcattgaaaagtacaatgccatacaaaagtaaggttccgttatttttagatgaaacatcttacaaaaagtaacaatttatccaaaacatcttacaaaatctaacaatttctagagagtaacctggaaaaagaatgataatgcatgaattacctaagcttttgtcctttttcctctctttctgtcttggtttttagtagtgagatatatatatacttctatcacagctacttgatgacttttggatataggttaacttctatgaagtctcggtcacagagaaaatatttttattgagcatctactagagccctgtaataagtatttttacatgttatgtcatttcatcctcaatcaagttggtattattatgtttctttagggatgaggacataaacacttttttgcagtgataagctgtaaacactcagatctgaaccagccactggtggggtcacacacacacacaaaaactgtttcaatggaaattacttaaagtattctttaatccttgtcactatgataaggaaagaaattaaactgtctttggtgtgacttgccagactttggtcatgtctaaatgttgcctgcatggcgctaccagctcagttattatattggatatctgaatggataaattggccacatatctattctaattgataccacagcaactggctattaatatgaccaaaaagccccaaatcgaccacaaaatggtcattttcaggcgatgcctggacttcttatatgaagaagatgctgaacatctcttttctgcgttctgagaagactgaacaaaagttgatagcctcaaattaaactatataaaatactaattaactatcaggaagagtagagacagtgttctcaatgtgttgtccttgtaatacctgcattacaatcacctgggtagcttgttaaacatgctgctctctgatcctcattccagactccctgtattaggctttctgtggggagggtggtggcagaaatctgcatatgcaacaggcactcagttatgtctacgaatttaagaaacactgctgtagaatctgtcctcttacagagctttaagaaacacattcaacaagtgtatgtgtgcttgttctttgtagggttctatagtagaaatagaacacatggtctctacatactggaccctctagaacttgagttctgtgaagacaggaaatgggtttggagtttttcactattgtatgtgcagcatctaaacatagtgcctgtcacatagtattttgtaaatagctatagaatggatcagtggaagaccttacatagaaaattgacttcatgtgaatgtacagtagagaactacagcaattcaaagaagaaaaaaaatgaaggaaactacctgcccaagatgtgcctatctgaagaagggagactacaaacatatattaagagtcctctccccttttgcctcttggtgctaaggaaagaaaagcatctaacaagggtaagtgatctttagaaagatgaagaatccactgagattccccaggatatgaaattccactgttattaagatccttatagtcttaggctgtttttataattttaaaatttcttgttggcggtatcagttttgagtgctggtactactgatggtgttaattaagtttccttcttttaagtaaaacttaaggtgcttggtatcttgccatatgccctaaaaggcaatcctgaataggtatcactaaagaggaatgacaaagttggcttcagacaaaaggatcaaatggatttctaattgtccctccctaactttcatacctgactagactgaacagtgccaagtatgaggaaaatgatatatgtgtaataaaggtagactttccggagaaagtttatttttgaggtaactggagctgaagcagagggaaattgagaattgactagatataacacaaagaggaaagggggcagggaagaggtaatatttctgaccctcctgccagtaatatcaagcagcaaatgatcaagtaaaggttggcaggctagcctccgccttggaggttgccttgttgtaactctaatacctttgacatatcctgtctctcaaatcaatgaatgactgcattaggcccttctagttcagcttggactagttccagaaacctaggggtttccatcctgctgccctatgatttttactttaaattcctcggagacttgaattaagtttttcttcctgttatgataatgctgtttcttttttgtttttttcccagaaaggaaactagttcaccagttagtttttcccctgagttcttttagagtctataagaaatactgagattccgggacaaagagaccatctttaaaacttcaccagaagaggcaagaagctgtcagtgaaatgaaagagagggttaaatgaagggaaaagaatacccagactccattcatagccataataatccttaagaactttccttccttttcatgtcatcacagaaatgtaaaatctttaaataaaaatatagaccttaagaattatgaaatgtcagtatacttaagtcagtagcattcaaacttctttatcctgtggaattactcctagttgaaggaattctgtaatttttcccattccatccttcattttcccacttaatcagagagatatggttagacattcacgctgcttggactgggatgaagctttctggaatatattggattatccatcctatccttacagattatcatactccaaattattatgtatatgtacctgtgttgctttctagactttctacttttccatgatctgtttattgaggcatcaataccaacttgttgtatttacttaagctttataacacattgtgacacctggtagggcaagtcctcattcattagtcagtagagttttatatttttctgcacattttctgttatttaatgctaaaattattttacttggttttgtaagcatgattttttcctgttatattttctgtcccattattttttcccattatattttgtcattatattttcagcacattttttgtattatttaatgctaacttcttttttgtttgcttttgtaagcattattttttcccattacattttctgtctccctccataaccctgttgccatcattctttctagatctggccactctttttccttgtcaaaagccacaaacatctattttaaccagttgccttcatttccatattacacacctgtttcctaagttttactcatgtttgtttttaattacatgctattataagtaattaaaagtacattcaagactgggcacagtggctcatgcctgtaatcccagcacttagggaggctgaggcagaaggatcacttcagctcaggagtttgagaccagcctgggcaatatagcaagatcctgtctctacaaaaaattttaaaaagctagcagggtatggtggagcacacttgtagtcctagctactcaggaggctggggcaggatgttcacttgagcccaggagtatcatgttgtagtggactatgatctcatcactgaactctagtctgggtgacagagtgagaccctgtctctacaaaaataaataaaaaacaaaataataaagatttaatgcatattgaattgaattgaaaaatacaattcatattgtaaaactttctgctatgaataaaacaataatataccttgagctgccaattgtagttccttcgtgagacggtaacccctaatatctctttaataaatacttttctgtactttttaatacatttacattaataaatgcatgtagatacataactaatttgtgggtatattttaacctgaatggtataacattgtttatatttttctagaactgggaaatagctccaagacatattgttaagtccatataaaattaacttgttcttttagactgttatgtaacataccatcatagtctggatatgtcctatagtttagccctttacaaatggatatttagattgttcctaaaccttttttctattgtaaacaatgcctctttgtgcatatgtaccagcatttctctagaatacttcttagaaatggaatgactgagttgaggctatatgtattttaagttttgataggtactgataaaatattgtaccaatttatataaccacaatcagagtaagagtatacttgtttctagatacccttcactgatgtgtcaatatggaagagtgtaaaaaagtctcttttaaatttttatttccccgataactagtgaatcgagcatctttttcccttgctatttaaaaaactatcaatatgagtttgaacagatttcagaatggctcatagtaaaaggtataatattcagaggccagagttacaccatgtacttactctgtcggcatggaacaaatgatgcaatcaaaggacttgaactgacttcaagagtacaatcagccaacccttctgcaatcaggagactgcctggattgttcctaaatccttataggcagatgaaaaattgctgttcaaatcctctaaaaaggaaatggcatatatgccatcataagctattctaatttttgaattattctctctcccaaatgaaattctcccttctagccaaacttgatttctctgtatattacttacttcttttctattctttaaagaatgggagaagacctggtcaccataccctatcttaaagcttttcaagtacttgaagattattactaagtctcttctgaactctcttttctcggaatgaatgggggcctcaacctgtcctcaataatgtttttgaccatgattttaaattatgttgctttctacattccaaatcctctgagtccttaatacaaaaaaagagtaaagaaggaaaaaaaaatctcccaatttagcaaaaaacactcttgatattttggcatctttccgttaattctgtacactacgcaccttgtggagatattaaatacacattttagcatacttttagacttcctctgcctttaaaaactttctaatgtaaattaaaaattattcacaaatatttgtaatagttatataatattccaaatgcaccctaatttacctaaccattctgattctgttgcacacttaagatgtacctgactccttcctactttgaataattgctgtgaataaccaaattgccaaacttctatctagaaaaactagatggattactacagtattctgtttgtatatctcattcatgtaacgcataggattcagcacacagtaggggcttaatatattcttgttgtcttacatagagcctgagtcaagttttctccagagctgaaatgattcgtcttatcttatggaaataattattatacatgattaaggccacaaccaaacaatgtacaaaatatcaccactgtgtcactgaagaatacaggagttacttagaagaagggagtggattatatcttgtcattccatttaacaaggagttacttagcggcccaaagagataggaaaagaataaaacagaattataggcaccttcaccgtcagagactgggttcaatccatgtaatagagaaatctagacacaagttgagtatcccttattcgaaatgcttgagactagaagtgttttggattttgtacgttttcagattttgaaatatttgcataaacataatgagatatcttgaaaatgggacccaatgcagggtgcggtggctcatgcctgtaatccaagcacttgtgcaggaggcgggcggatcacatgaggtcaggagtttgagaccagcctggccaacatggtgaaaccctgtctctactaaaaatacaaaaaattagccgggcatggtggtgggcacctctagtcccagttactcgggaggccgaggcacaagaatcgcttgaacctaggaggcggaggttgcagtgagctgagatcacgccactgcattccagcctgggtgacacagcaagactctgtctcaaaatgaaaacaaaacaaaacaaaactgggacccaagtctaaatatgaaattcatttatgtttcatacacaccttatacacatagtctgaaagtacttttatataatattttaaataattttctgcatgaaacacagttttaactgcattttgactgtgacccatcacatgaagtcaggtgtggaatttttcacttatggtgttatgttagtgcgcaaaaagtttgagattttggagcagttctgatttcagattatggatgctcaacttgtaatgttgaaaaagatttcataaatcccctctcatgtagggaaagctggtggtgaatgtttttagcatttagcaaaaactggagatatttccaattttaaagtatttggccctgatactaaaaatggagaaatgctttgtgcaagctagcttacaactgagcatagtctgaataaacaaaagatccagacaggtgaggatgcgcttgagtttatttgtgttgtaatttggactacttaaaacatacctcttatttaattttgtcctactaagttttgggttatgtatggcagattggcactatttccattttttaaacaaataagttattatcaattaagtaactagctacatgtctcagaaattatttttaggttacttttcattacactgctagcatcagaacaagaaggccactttccagataattacaactccctttcctcccaaatccagttaaactagaaatattagattgaactttgtgaaaatatcacattcataggtcgaatatcagcaatttcatacagttcaatctaatattaggggtgggaaaagagggagagacgcatagcctgaccatttcctccagtctagtgtcaaccgccagcttcatttgcaaaacgctcacaaggtcaagtcttgacaagacatgcaagacttttgttgaatgatgctctcacaatgatgtgtctttcttttaagtgaaagaaatacccaagctagaaatcaaaacagagtagcaaactgtgtgcgcgattcagttttcaagaatattttaagttgcatatgttttcttttcattgacaatccttacccttgccatatcaggatgactgacactcttaatttgcaatttcctaaatttcaagagggttttttctttttgattgctatataatggtttacctaattatttttttttcaagttacagtttcggatgtttaatttcaaaatcaatttgagatgtcttgagctccattaatacactgtgatattgcttcactcattttctagcaaagcacttactttaaaaaatgcatcattctaatgattttaaattactctacagtgcacataccaatttacaactattacaaaattttacattttttcccaaagcacttcacatttaaagatgttctgtatttcaagacagaatgagagagagttaacttttaaagggcatgaacacaatttagggcctttaaaattttctgccctctctgatgtagaatgtaacctaagtaaataaaattttaagtgttcagtgtgcatataacatcagcttaggatgaggacattattataaaataattttctttttattcaaactaaggacaatattctttataaatggaaacaaacccattgtgtgtatgtgtgtaagagcaacaatctgttagtgtgtcaatttatgtgtaaatatgcatgggtgtatatgagtgggtaagcatgggcttgaatgtgtgcatgaacgtgcaacagtgtgtgtatatgtgtgattgtgtgagtgtgcatatatgtgtgagtgtgcaagagtctgagtatatgtgaatgtgagagtgtataagggttgtttgggtgcatgtacatgagtgtgtgcatgagtgtgtttgggtgtatgtgtgttcgtgtattcgcttgactttgtgatagtgtgtttgactgtatgaatatgcaagtgtgaatctttctgtttcaaatacatgcttggagatcaaatgttatttgtacttttatttaggcagtcattagagtgtgctctaagaattactttactaacctcagaataaaatgagggaaatgaagcacctcccaactgtatctataatacatctataagatatttgcattaaacacacacacacacaatttataccttgcttgaaatttgcagggaaaaaatagctatattcaaaatctgcatctggtaatatcagtttaatagatgtaaatcagctgccaaagttgggaaaccttccttcctcattgccctttaaaaacatttttgattactttattctctcagaattcttcattcacagtgacacatgccactgtcaaagcgattgaggatactttgggattaatatttaaaagactataattatcatctgttttcgccccagaccacccttgaagttgcagagagcactaggcacatttctggaatgagcctgatgctcattcattgatataacattttccttttgttggttaaaacatgctgctctagaaggtagaggcaaagccctgggggccaaagctaccatgtaataagtgccaggctcagggctagaatctttgcatacattatctcatttaatcttcactacaaccttgcaagatagtgttagtaccagttttcagaggaggtgctgtggctcagagaagttaaatgacttgcttaaggtcatgtagctaattaggagagaggctggtatcaattttgagtttgtctcactctaacactgtattctttgaattacgccatgctgaaaggtatgaccttcctagtatttatatcttccctcactgggaatggggtttctttgcctgcctgctactctctgcccctcaattgtcttctctaacaatccctaaaaacttggttgatgtcaagttcaaatctactttagaggcaatatatccaatttatgaatcatacttccgatgttaagattcactatgtacttattttagagtatactggcttggttaaaaactcactactgtctgtgtaatagacactatttgctcaataactattatgtgccagaggttttacacatattacacccattttacagatatggacaatgaagcttcaagaggttaggtaatttggttaatgatacagaagcagaaccaataaagtctacatccctgctgacagtcctgtataagcttctttggttagatctgggtaggtcaataaatctaatggagcctcagtttcttcatttataaaatggggataatggtactctcactgcaggagttataaggatgagaaaatatacataaaatgtctagaacatattagatagttaatacatgatagctattatctgagccattattgttaatgatgagtatgggttttagcattaaataaacttggcttcaaaagctttgcctcctactggctatttgattgaaatctgctgaatttctctaagttttcatttcctcatctacaaaatgaaggtagcattttacagcaccttttcctaaagtatactccaaagaacactgctatctgcacactatatttaaaaatgtgaggtgataactgggtttcctgatcaaagatccatgggaaactctggtaaacagatttccttatacagggctttttttagtatctctaatacgggaatgtgctttgtgaatttccaagtgggagctaacatatgcagtgtttttccctttcattatactataaaaatgcatttttatttttctataatatcttgcaataaaaggattatatagaagatactttggaaagactgatttgtcccaaagattaaatggataatatttgtaaagcacatatatagtaagagctcaataaatgcaacagtattattattataattaccataatcatcactataatcattaagaagggattagaaagaataagtttaagaggtctactatgcatcatggtgacgacacttaataacaatatattatataattgaaaattgctaagagtaaattttaagtgttcgcatgaaaaaacaaaataagtgtgtgattgtattagtccattctcacactgctatacttgagattgggtaattcataaacaaaagaggttgaattagctcacggttctgcaagctgtacaggaagaatagtggcttctgcttctggggaggcctcgggaaacttacaatcatggcagaaggcaaagggggaggaaggtgtctcacatggtggaagcaggagcaagagagagggaggggagaaaggctgcacacttttaaacaagcagatctcatgagaactcactatcacaagagcagcatcaaggggatcatgctaaaccattcatgagaaatccaaccccatgattagagaagctccatcaaccaggccccacttcaaacactggggactgcaattctacatgagatttggtggggacgcagatccaacccatatcagtgagggaatacctatgttcaacagcttgatttaaccattccacaatgtatatatatgtcaaaatatcatgttgtataccataaatatatacaattttttacttgtcaattaaaaaataaaatttaaaaagcctaccagagtgtcggtgatctgagtgagaaaaggcatgtctaatacacccctaggagtaggggtctacaaactctatagccagaggatttcctttgccagattagggcgagctactccaacggaggtagaagcttcagcagacaacctaccacataattccattgaatgtatgtatttattaaaatagaatttttagagccaccaaaaggttctttgataactaagattttttttgaaactcctcaggttggaattccacaggcaagcactcttattgtattgcactttctgattggttttaatgttctcatacgatcttgtttttagcacaggtatcttcccgtgtatgagttttgtctctttccctctccacttatctaagaaacaacagccaccataaaacttgacagatgtcaggtggactgctgctgaatgcctgactcatacaactggatgatcttccttttggtcctgattcagtttcccagcaatctagaaatgatttgcctttgttcttgtatatctcctgccaaggtgcacatagtttgcttagatatatggtccttttaaaatcatctttaaacttttatctattacctgctccttatggtagagttaatcattccttgggagctgaatttcagaatggtggtggatcctattgctttctaccagaagtcttaagggactgtgtgagttgctttcccatgaagcagtgttttagagggagatgcaataacccaaaaggaaaattcctcacacaaataaaaatgtatttatacaccaatcctgctgatactgaatagtaggatgtgggataaatctgtaagaaagtttgtctgtatctagcctggtggcaaacattatagattttacttgctgcataggactattgactaggattagattctcctctctaactacccatcgttaagatggatattctgaaaaaggtagacattaatcatttcttcactattttgatccttggtatagctgttccagagctatgtttgcatttacattttgatttactatgtaaggaggctgagaggtggtgatggattgagaggctttcacacactatgggcattccattgactcccaaggaccatttcaaccctgccctcatgtgccttaagtgaggggcagctcccattatggatgaattgctgctaattaaaatggatatatacactctgtcctactgtcatagtatgtggtttgataagaatgatgggcagagaaaaacaaacaaaaaaattctggccaagttaatgtggtgactagcaaaaataaatttagaaaaggccatttggattttatcagagtcaagtctatatatgaaaagcttattgctaagtaaaacctcagatttaatatgacctcgtgggaaaatgtgaatttggccgttgcatcccctaaaaaggccaggctccgtggcagttacacaaggtatggatttggagaatgaggtcatggcagctcagatgccaactgacagcttggtgatcccgagccacctctgtccatgtcccttatacagcacacatgattttttaaacacacaagctaaataaagcatcagaggaagacttcatggtgggagaactattcaaagactattctaaatgataaactctaatccttaccagtttgtttatagttattatctccataggtcttctggctggctggacccagagtgtgtctaactcattttatgacattaaaattctgctctctccaagttacaaacctattactttattagacattttatctaaagcatatgctggcttccttcttgagaaaccgaaagcctgagtttccccagcctatattctatataagaaacaggttatcgttaggtatttaattattccactgtcatttcatatttgtattctttatcatcttgtgtagagctctgagtattaacaacttgatgttcctcttgtcttaggaaatataaatatatttattcctttatatttcctggatacgattttattgtcataaactagaagtagatttaaaatggttacccttgctgtcttattattgccaaaaaggattgttagtcagttacattaagactcaaataatcatttttggtagaccttctccatctttaatccactttgtcaataatttcatactgcaagttaacttgtttagttaccttggcgttggaatagaatcagtttaatttggaatatatatgtagttacattttccaggctaaacttgatactgccatatgctaaagcactgctgcccaagagaaatataatgtgagccttaagtgcaagccacatatattatttaaagttttctagtagccacattaaaaagtaaaacaaaattatttagtaaaaattattaaaattaatttaaataatatattttatttagcccaatatatccaaaatatcatttcataatgtaatcaatataaaaattaataaggagatattttaattaatcttccatacaagtcttgaagaggagctaaaggagaagtgtctcattggtttcaatgaaaagaaaagttttattttaattgagctatgagtttgtctatcttgaggacactgtgaattacataattgatcatttttccctcttgtgttggctaagagggagttagaaagctacagtacaattagacattacttagctatgcacatgacttccttaaataaagattacatttctcacttcctttacagctaggtgttttcacatgactaagttatcgatcaataaaatgtaagtgaatgtttctggcagtagcttcagtgaggtcttcttaaaagaaagtagagaagtccctttgcctcgtcatttcttcatttcgcctatagtgaggatgtaatagctagagcactggctcccaccgtgtactataagggtaagggctccatcctagaaatagtacagtggtgagctggaagaagctttctttctgaagtcaccatacaagccctggactgcctgcctctagatttcttttgcctaaaataaaataatacttctatcttgtttatctctttttttccccttggggaggtacttccaatcactgaactataatcttagttgacacatcaggaatgtaaattttccttgaatgtgattttataataaacagcatggctcaaagtaaaggtagtgaagaggcagaatagctacttgttaactgactttccagtaaaacatatatctgtattctgcaaacacaggaaacaataccatttggatagtgacaaaagaacataaagactttggagtagaaagaattttcatacttcttcaaattaattcagctttacagtgtttaaagatgaatttccttgagatttatcatctactaatttatcttctacttacaaaagatttgtctttgaaatgtgtctttacattgagaattgacatacaatgccaacaatagctacaatctatcattataatttagtgcccactatgggaaaagcatcatgctatgtgttgcacatatgttatctcatttaacccctacaactatattacaaaatattaattatttccctattttacaggagaggctcagagaatccaagcaacttactcaaggtaatacaataacttggaaacaggcctgggatttgagttcatttctgtctgaatttttccatgctgaatctctgacaacttttataacattctgatagtcaagaaaaaggtcccaggatccttccccatatatgctcattgccaactttctagagattcagtggaactgttgacaatgggtagaatctgttaaatttatagaaggctctctgaatggtatattggataaaagatctaaaccagaaatcacagtacctgtttttcatactaactacgtgcctaatgagctatatgactgtccataagtcatttgacctttctggaactcagtttcctcatctataaaaggaaagggcagaactaggtggcatctaaaatctcatctattgtcaatattctatgattatgacaagtctgtcaaaaaaagaaatgaacaaaaagaagactgttggaaaagaaagtaggcaatcatatttagagtgccttaactttcattgcttgatatgcagaattcaatttaaaaaatgaatgaaccttcaatatctttcttggtaaaaaagaaaaaaactgaatgaacctagcagagaagtgtgggaagcttgttttgattgttgaaactacttattcttgactccactattaacctcactgactttaactgctatggttcctgaaatgtcttttgagcaatatttcttagaacattctttgctagcatggaataagctcttctagttttgtggaactggatctaatattgttacccataccttagtagactacattcttaattttactggaacttaagttgttttatccacttagaggaaaaatgctaatcactaaaaatgaattgaaatgtgaatttaggttacaaatagtttgcagatgtgtaaattgagacccatagtggttcacgtgcccaagattatatggaaagtcagagctgtgccaggacatgggtcatctgctgatttgagtgacccagagatttcatgagggtccagagtgagcaaaagtttttagctaccttgggcctgtgcaagattagggatatatattgggatatatatccaatctggaagaaaatgcgtgttgcagagacatagtagaagaaaatgatctgtcttagtcttgggtctatgaggatgttaaatatcaagcctcctctgagacctcatggccactagccaggtttcatgtgggtttagggttcgtatttgtactctttatttggcctaaagaattgcaacatgatattttaaagtttacgctgatttgtagcgtaggcaggtttctgacagaaacaaatgtaaatcctcaccagaagaatactttcttcatacaggacttagagagatttccaacctgtttgagctcacaatttaagaaagccaaaaacaagaatgcaattaatatccaagagttcaaagaagtaacaaaccatagacccacatccacaaagacttcatatgctgtatttatcagatactgtatataaaataaccatgtttcatgtaaccaaaaacacaattaagatgcaaaaaattacccaaaataatgaggcatattttttttaaaaaactaagtaaatattttagaaacaaaaagtaatcattgaaatgaaaaattaataaaagggttaaacattacaataagcatagctaaagagagatttagtgagctagaagataaatacggagaaattgcttataagataacaaagggaaacaaagatagtaagtaagaaaaaggagtaaaggacatggaggctagaatggaatggacagtctaagggaacttccaaaaggataccaaaagggggaaaatcaagattcaaagaaataaggactgaaatttttctataatttatgtgagacatgggttcttatattcaagaagctcagcaagtccgaagtaggataaaaataatgaatctggctggatgcagtggctcgtgcctgtaatcccagcactttgggaggctgaggcagccggatcacaaggtcaggagttcgagaccagtctggccaacatagtgaaaccccatctctactaaaaatacaaaaaaattagccaggtgtggtggcatgtgcctgtaatcccagctacttgggaggctgaggcaggagaatcacgggcgaaggttgcagtgagctgagatcaagccattgcactccagcctgggcgacagtatgagactctgtctcaaaaaaaaaaaaaaaaaaaaatccatacagttttttttttttttttgacagtcttgctctgtcacccaggctggagtacagtggcgcaatctcggctcactgcaacctctgcctcccgggttcaagcaattctcctgcctcagcttcccgagtagctgggattataggagcatgccgccacactcagctaatttttgtattttcagtagagacagggtttcaccatgttggtcaggctggtctcaaactcctgacctcatgatctgcccgccttggcctcccaaagtgctagggttacaggcatgagccaccacgcccggcccatactgatctttaagaaaggatattggggtgtgaattctaccagtggcctcaactctgaagcatacacaataaagtaacttgccctgcctctcaaagtaaaggagttcattcaactctaatatgaagaaactattacttaccctactcataccgtgtgggtgttatgagactaatagaaacatttttgctaggatactggaaatttggtagctggggtacaagtcaagttctttatagcagactcaactacccattcagagtctctatgagcctgaccttaacaagtttctaagtgaaaatttattgtcctcactctttactgaagaactaatttatgtccttcccatccctcttctccttctctctaatgattcagggaaatatatatgtaaatcaaatctctggaacagtcctgtaggtattttgtatcatcaaagctcaatatgcaatccaaactctaataatgaccctggatcatggccataatgatgaaataaaaaaaaacactggtatgtatttggagaaaaaaaataaaacaatcagataaatgcaggatatttttattacaggaatagtatcattcagcttatttggggtaagcatatggggtactcttctatatctccaatcacctgattttggaacacaggattgggataatttattctgatccttccccatggccactaatttttacacaattgaattatggcttccttcaacctctctcagccatctccaccacagagcctttctactttatcctcccctgtcagagaatttccatggcagcagggcaagctgtagtggtagacactttctccataggatctctcatatacagggacagacacaccttgtaaatacttccttttgggatctattgtcacttcatatagctaaaaatgaattgagaaaaatgacaaatagccagtgaatctagaattcagaataagagttgaaggaaggggaataatgaaacacaagatttacctgttttcttttgacatttccattggtctgtccaaatggattcttactgtactgtactttatgtaaataaacatgcactcaggtttacttacattttcttgcttcacaattgccatcttatttaaatatatgtctctggtttgaaaaatagttttaaagctttaatggtttggaacagttagtagagttagctcagacttatagagaggcagccgcaaacttaccttttacttcaaacttgtcaaattgtcaaaagtttcactatatattgcattgttgcctgctaataatggtataacgtgtggttttattgtctcagaacaaaaatgtaaaagatgtctttgaaaacatttgatatttgatgtgctttaaattgccttacaatcttaaattactatatatatatataattataaaatcttatggccattaaatgaacttttgtataaagataaagaatttttggatctgagactattttgtggttcaatttctactttcatttgggccaaaaaaggcctggggtgacaaatcatctctgagtcggatgtatggctatgataccactataatagtgtgattttttttccatttcatatctacctcccaaagatattcctgtagattcagtcttacacacttaatttgacttggaattgtcttaaggatgcttttgaattgtatttctagtgccaccaatgaatttcatttacttcaataatctagagttaatgttttaatctcactgtaatgttaatgaaatagctaccatgttttatgcagatgcttgttttatttaaccaatcaaatcagagtcaccttaatgtttatcttttatttttttactgagtagaaaaagaattatttaaaaataaatgtgagcacaggttgtcatactttgaatatcaagatgaaaataatgaagcctgcatatgaattaggcataagctttttgtcttttatccactaaaaagcactataaatcctcctatcatatttctgtgactacctatatttcaacttttttattgccccatatgatctgcagaaatgaactttaagtccagggaatttgtagcattatgataatattaacattattgctaactaatagaaactttttttttctgagaactcagttactatttctaagaaacccaggtgtgtgtccaaagctgcagagaagaatgtacctgcaatcgtaggttcctaatatggtgacattaactgtctctttgtctactgaagatgctaaattctaaatatcttatatgtgagtgggcttttcccttcagtggcatgatgaatagctgcgtagttatcctcatggtgtttgcattacattttgaacaaagattctttaacagatggcatgtatgagcctgctgtaactgttatgtgtaaaggaaaaaaaaacactgtgtacacatgaatcatttcataagacctaataaattcctagaaattgcagtaaagtgatgcattacatgtgctagacacgcagagtcatgtgaaaaatcttttgattactggcactttcaataaacgggagaactaataatgtttttaaagcatatggtacttgtataatcaaggaaagtttcctcagcaacaacaattatataaacctcttacaacctcctcctctaattatctgttttattagtagatgcatatcgtcatccattagggaacacttcaaaacgtaatgagacattgttataatgaagatatacacacatacacatgtttatgtgtgtatgtatgtgtatctccatacataaagggaaatcatcaaataacatagtctatatatcaaaatgtggatgtccttataatgaaaacaaagctatttacaattaataaactcaagagagtttatgaactaaatctatggaccattcataatcagtgtcaatagttcaatatacagtattaagaatcatagatctcagtgttggaaaagacctcatgggccattttgctaatcttccactatttcacaaatgaggtggctaagactaaaagaaattaagttattcatggtcactgtgtgtgaatacatgcacacccacacatatactgatatctttctgatggacaaggtggacacatgtcataggatagtgtaaaaagaaatatccttataacaaagccttctgacatgttaaggaactaacgttccttagaaggggcacatcatgataataccttatatgatttctgctgaatagcaaatagtatgttgaaaagaacctccaggcctaatgcttcacatctctccagctgattaacccacttctaagatacagcataatcagagaggattgtagcagagaaaggacaagagttggcctctctattaaatgcctaccacttataaattttgctgtcagttatttgcaagtaatgatagagggagtggttcaaaggaggtttcatcaagaagagagtagtacaaagttctaaactgcttttatgctctctttcaaagactatgtgaccaggacaagtcagattttacaaaaggaatatagcagatacattgtgcaatgctgatctcagaggctagggccaatacccttagaataggctaaatgtattactgagatttcatgataaggagttatgttttaagggagcatgatttgacctgtagtatatccaaatctaaagtatattataacaagctgctattgtattcctcttcaggtatttttaaagaatgagttaacctttgtgaagtgtcgtgaggccatcaggttaaagaagcctatatcaaatatcattttagagctgttaacaatactcaatgtacctagaaatacagactgaaaataatcagtaaaccattcactatagtccccctggtatcagagcagcacagttaacatgctaacagctaagcttcatgtgcttagtggaagaaaatgatcaatggcaaagagcatatccaccttggaaatgacatgatccattataagaatcagatgttaaattgcttcctgtactgagcacactcaattaaaagtctgcacagtgagatcatctcgatggttaaatatgctctgtgggaacaacctttatggagcttaaaaatcacagaaggactattcctaccatgacactggagatttggaaggcatttccttcccttatttttcaatctgctagttttattaggaagccttttgcctgagaggctgctgagttttgggtcatacctatccacccttttgcttctgtgaacaagagatgattctagtgatcttttttctttgtgatccagaatggatgaatgtggctttggtccagacctctgtacaaaaatgtgtcatttatgtacttggtatttgatgtcctttatctccttttcagcaaactaatctattcacctgagttctgtctccttgtctaacttttccttcttcctttggcaggagtagggcctgagggctgaaaagaatgctagacattacataaaatcagcagacctggtttcttctggcaggtttgcaattagccgggtctatgaccttggaccaattatttaacctttctggttctcagtttcttcatgtttcaaaaactcatatatttcttgttcattttttaccatctgtctctccctgacagactgcaagctccattagtgcaggaatctttgttttcttcactgatatatcccaaaagtgtagcagatggcacaaagaagatattcaatgaaaatttgtttaatagatgaatatttcacatctccgttagtagtgttaccattcatatagtctcccaatatagaaatcatggagtcagtgaaattcctgtctccccttatacccacatagtcaccaagtgctattttcttttttcttttcttttctttctttctttttttttttttgtgacggagtttcgctcttgttgcccaggctggagcgcagtggcacgatctcagctcactgcaacctccgcctcccgggttcaagtgattctcctgcttcagcctcccgagtagatgggactatgggcgcacgccaccatgcctggctaatttttgtatttttagtagagatggggtttcaccatgttggccaggctggtctcgatttcttgacctcgtgatgcacctgccttggcctctcaaagtgctgggattacaggtgtgagccaccgcgcctggccccaagtgctattttctaacccctctcatgtctgtcctttcctttccatctacacttaaattcccttatatcaagtttgcgtcatttttttgactatattctacaaaccatttaccgaatggtaatggtaatggtaatctccaagtcatttaccgaacgactttgctaaaatgcaagcatggtcatgacactaccctctttaaacaccttaaatggctttcctattgtcctcagggtcaagtccaagctcctaggcatggcatacagagaccttcatgatctgtggtcttttgtgatcacttcctcaaccatcagtaaatattaaagactctttgcacattgtatctctctctctatcttttagcatttagtgcaaggtattttcacctttattcacatttgcctccccaactatagatgtttcatccttctttgtatactattgcctcacatgctgtcggagacataataggggctcaggctcaagaaatgttaggcaaataaacaagtaaatgaggaggttttgactagtgcagtagttctcacactgtgaggcaaactgcttaacttctctgtgcctcagtgcattaaaatccatagggatgctgagatggatggaagaggaacatttaatgaatattgaatcagatacctacacttttttccagatctaatattctatagggctatcatttttttccctcatcatttcatttgttttggtgggtaagggttgtttggggtgagaaaggagtggggtagggtttagggtacttcatctggaagagagagaaggagggggcaacatacaggcatgttcataattacccttttcctcccattctgtgattttcttcttggccaacaggactagtgcatgtctttgtgtgttagggagtaggaatgggcagggaaagagaaactctcagtacattgaatttaatgttaactcaatggaaatacaaatatttgaatttatgcaactggagagtagtacattaccaggaattttatctaattctgaggcatcaggaagggcacataaaggatgtgagtgatctgagggagcaattatatgattcagaatcactgtttgatcaatatgtatttattaaatcatatataaagaggcaagcttttgactcactgtaaagcaccctaccatagtaaagacattaatgttggtgttctctagggttctgattttcttcattctcattttccacactctccctggacagtagcttgcattcctgtggtcccaaactatgttccaaatatttgtctgtagctcaggattcttctctaatttcattattgactatcaacccctcgctggccatatgcaagcgggatcttctgcagatgcctacaacacagcatgtccacaactgagctcaccatagctggcccctctgccccaaacctacttttcggcctatgtcttttctctctcagttggcggcacttacttttgcctagtcatccaaagcagttaccctgtctcttttctctacatctaccgtggtcattcctctctagtctgtttccacctcaccattctcacaactacagcttcaattcaggcccttctcaccatcatgctccttgactactccaataatcacattgcacatgtctcttagttccttatatcattcagctacaattggtcttctcaatagtctatctcaaaggtggtttgttttaaatcactcaatgctttcctattgcaacaagaagaaatgcaaattcctcagcatagtgtgtaaataaaactccctattttctggcccctgctcatctcaccagttttatctccttctgcactcctaggctatagctatacccaatggcttgcaagtccccaaatgtgtcatttagattcatagctctatttctttgtttaaactgctccttctgcctgaaatgttcgttcctctcttgtccatgtgataaacatgcaatcatcattctggtgttaattcaaatgttaagacttctacaaaaccttacctgactgtaaggcttcttctcacaaaaatagtctactgctccctcctttgtgctctgtgacacagggccctggacatggtccaacaatgatacatttttatatgtggtgagttagataataaattttagaggacagtgcagtatagtggtgaaatgtatgaactgtgaagccagaagctatatgattatatgattgtctctgggcaagttatttcacctctcagtgccttggtttcctcatctgtaaagtaagcatgattatcatacttacagagttgttatcagtgagttaatatatgtacaatgcttacaatagtgactaatacataataattattatgtgtttgctacaataataataacattaatattatcatttttaacttaaagctctaagccatgatagtgtatctgaaacatggaaggatggaaagtattcagtaacatttagtaagtaaattaataatcaagttaggtccctattgtacagtctcataatacccagaaactttccctttgtaacctttttctaacttgttcaatgtctctctgactaaactgtaggatccatttgtgcaaggaccacatccaccgtgttcactactataaccctagcatcaagtaccatgccaagcacttagcaggcacatgtatatttgttagacataaaggttatagaggttatatatacatataacctctatatgtatatagagatatacatatctatatcctatacctaaggatatagatatatatggtttttaagattttcattttcgttattattagattacctttagcattttgatcattttctgaaattgtaaaatgtattcctctttcctgtattacgtctatgtgaggcaacaaaatttcagtgaagtattgttagaattgcagtgaattattacgctaaaattaagccttttaacagagaaattctcctctttccttacggtgtaggatcacagacttttcagctcatgagctaatccagtggtacaaaaagtcccacagtgcttcaatctttcctgcttaccacgtcattttacatctttaacaaaattcataggcagaggctttctaagagttaccacttattaattatacttatttaatgagtacatggtttgaagaaaaatggtataaagaatgacttgttatttttagaacttataattcaggcaaaaagacaagccatgtgcacacatatctacatcacaatgttttctgtgctctttagcaatgtgcatggtaagatttcaggggatcctggccggtgcagtggctcatgcctttaatcctgccactttgggaggccaaggcaggcggatcacgaggtcaggagatcgagaccatcctggctaacacggtgaaaccccatctctactaaaaatacaaaaaaattagccggtcgtggtgtcacgcgcctgtagtcccagctactcgggaggctgaggcaggagaatcacttgaacctgggaggcggaggttgcagtgagccgagattgcgccactgcactccagcctgggcgacagagcgagaatccatctccaaaaaaaaaaaaaaaaaatcaggggatccctgttgatgtgatcaggaaacattttatggaatggctaaaattatagttagtcttgatggacgggttggatttcactaggtggaagtacaatagcatctcatgaagaggaaaaggcatggagaaaagcataaaaatatggttcattaagggtaaggagagcacatagattactttggcaaaggaacgatttatgcaggaagcaaaaatagaagataggctggagaaagatttttggaatagtttgtggtaggcttttgatcatagactaggacacttgaagtttatctacagataatgggaaactatagaagatgctagagtagggaatgaaaaaaggaaagcaatgttgtaggaatagcaattgagtggcaatatagcaatatgtaaaatgggatagagttcctgggctaagttgtgcttttaagtgatgggacacccagtagaaatatttcgcagatggttggaaatgccagattatttgagtttgggagagatataatttgaaatcatctgcatagaactgacagtaggagacttgggaatgtattaaataactgtaggagaatacaaaatgaagacagaaattcaagcacagacctacaaggaaaaacaagatgaaaaaaataggtaacagcgtattataaataaaaatgcagtaaaatactaacctaggacatacctggaaacctcttaggactcacaaaggtgtacagatcatattttaagaaacactgccttaaggaaggaacagttagaatttaagagtagaggaaggagaaggaaattaactccactacacctgttgagcagtcagatcctgtccacttgggatcacagctgcatactccagcgtccagaagaaaagttccgtgtcctgagcactgctcttgacatacaggaagtggtgtttcacagttaactcctccccagccagtagaacagtgacattctccttttacacagatgccatggttggaacacattgggtctaggcagtcctctgaaggcacaaaaaagtgggggggaggggtgattaatagtgaacaggtatggccaacataccttagtatgatgaaacggagattacattgatttcctagtttatatcatcaatgctgctttaattaggcaataaaatgactcatgcaaacactctgtccaaaccatattattaacacttcaaaacatggtggggtatcacaatggttgcaatctcaattgagaaggaaaaggaaaccacacatgtgctgtgtgaaactgtgaacagtgtgcagtacccccacacaaataagtgggtggagtactgtgggccttcaacaggaattgctcagcttcgcaaaaaagcccaagagtttttgctaagtcattccttatcctttctgaaaatggaagcgatagctcccagagaagacttttacttgatatgtctagaggagtttatataaatttttgaaatttggattattcaaggtattgggtgaggtgaatgctgttgcatgaaataataaaatttacatcaatttattataatctctcatttattccttaaaagtactgaaaatgtaatattttaaacttaatttaaaaattcacttcttcatggcttctccttctatgagaacacggtgacatagttttcagtgtcttagaatatcacagatccaattccatttgtctctgattctgtgagtctggaaatttttgtatacattctaacaaatgtgtatactgttttagaggtaggttcttgtgcttgcctgggggaaaaattgttttgtgattttaactagtaaccattccatgggaaatagaaaggttgatttccaaatttctagtctttctatacaaataaaatgagactaaaataactaatcgtaatgaggacgtatgatttgaattacttctccagcaatgcaaatagactgtgacaacccgcctgcatttccaagactgcctagttttagggtgtggcttgggtctgtggaacagagtaagtctaactaagcactattataattggtgttattgccactataattagcccaagagcttggagtcattagcacaataatttattatctgagctaataagcaaataaataccagaaggtacatctaatttgattcatgatttgaagagagagggaaagtccaaagtatagaatctgttttcagaagaaggccattttgttatattaaagaataataattttaataaagtagtatttaacttaatacagcctattttattaagaagcctgcttcaatgtattcatggaagtcatatttaaatcattcatgtcatatttaatttagaagcacaaaatcatatggctaaaggggccaggcaggtggcatacaggaaggaaatgggccatatggaagaaaaaaagggtgtgttgggagcaaactgaaagcaagcgcccttttaaaaagaactgctgctacttggctccagttgattgccaccacgtagcaatgtgggcccagggtcaccagattttctagtgtttagagaagccagaaataggaattctcatgtggcagttccctatttttaaattttggcaaataagtcacattaaacaacagcaacagcagcaacacagtgtgagccaaacaaaacccattcagaggcctggttcagcctgtgggctcctgctgcaaagtttgacttaaaacatctttttttctattgcattggaaaaatttataccattaaatgtactgagcattattccttaatatcttggttattctacagatattcttagtgaccccggagaagacaaatttaagtgaactcttttctaaactgcttacaaaatttaaattagaggggtctaaattaattagattacatgtttttcatggcaatttgtagatgtgatagtatttttttactaacactgtgtgggtctatatagcatatgaatttgcaacttaaatataattatttcagctggatcaccataaaaacactttctgaaagtaactcagaaactccagtgccttgtctaggccaaatgccatttatatataatataaatggcatatatatatatatatatatatatgtgtatatataatataaatggcatatatatatgtatatggcagatatatacatatatatgccatatatatatataaatttatatatatatggcatatatggcatatatatatatagacatatatatataaatttacatatacatatatatatatatatggcagatataatcatcacaccaaaattctactatcgctaatgggaggtgaaaagctaaagtcttgcttgttcatggagtggaatgagattaaacccgttagaatgctgtgtaatagtcttaatgagccatctttaaaaagcaattattgtgcatttccagcagcctctttcccgaacaacagttatgatgagaccatctcccatggtaatggtttaatattatttctgaaatcagtcttgtttgaggaatgtagcatgaaaaacgtctgattactagtaaacttattttccagtgcgtctctttaaatgataaaacttgccatttcaaaattttggggggataaagactcctttggggtgaatttaatataaaggcatggctttgaaactcattagtagtaagcctgcttccttaggcatggaggtcaagtttcagcatgaggtatgtaaaaataaataatataaagcaataatagtaatggtaattacaaaacactcccaaagaaaacatttgcaaaatggctgcaaacgtgcatatattattatttttattatgtgctttaaagtgagatgtagcataatgcattctgtaataatgaaatcatatgagttaacacctaaaatcatcaatatggacattctcaacctagaaaatagtgagagaaattagggatgtacaatactatttttcattattgctctgaaagtgtcacagatacagcctcatgtataacattagaatctgtcagaagagacaagagctccgctgacccaaaccctctgctgcatgtactaagacgctgagcatttattgtttgcaaaggccacttgcatctctactaggagaacagaatgacaccttggacaactgagtgagagaaaagcctgaagcaatagattaaaatgggattctgaccttcctcgcatatttctcctttgtatcctggcacacagatgcagactcccatgatgcaggtgccgtggccaaagcatgttggatcaatgcattgttcttccggaacgtcacactctggccccttccagccatgccggcagacacagtgtcctttctcgtattctccattcccaccacacagcacagggcaggaatctgaaggttggcaaatgaacttgtaatgttctcataatgctttcaaagtctccaaagagcaattctctattgattttcgtatttcaggcaaaaaattgtactatttctgtcttaccctttattaaataggcacatgttcatgattacaaacagaattttcctcttatgggagtgaaataaaggtaaattaaaaatatcctgagtggagaaattatttcaagtacttgcatttgatctcaccctactcttaaactgttattgttattattttaagctaggatttttctttcttatatttttcttcctcagggagatatgtgtttacttttaggaagcaaaatctgaaaatttaaaaagcaataaatgaagttattaatgttataaaatattatctttaaaaagttgtgtaattaaatagatttctattggacagatgtctgttcctataacacattgtgcagacctttattagaatgctaattctgctttgtcattgttagtctccttattaaaactatgcactttttgaggacaaggcctgtattttttgtcttattgattttttaataccaaccatcacctccacactcaacccccacctcctcaagatctatcatggtgctgggaacctagcaagtgttttagaattcgctactgaatggaatttaatagaaagaaaccaagtgtctgagaaacctgatattaaaatattagcagactgggaactttaagaatacagtgaaaatgagcagaaaacatctctgaaataataactgtaagtctacgggaaaacatgatgtgatttacctaaagcttttcaaaaattaaactatgggcaagtccaggaagagtgaagtttgctaagtttgacttctgactttccagtcgttactttgtaggctccttactcatttggtgataacccaccccttccacatacattggtgtgtacaagcagttatcaacttagttcacttttaaagtcagctcattatgaattagtttctgaaggaaatacaagcatcacatagtgactggtcagacaacctatctacaaatcccagctgttaggtaaccctggttaagtcacttaaactctctggcattgtttctttgcccataaaaattggataatagcagacctatctcatagggctattgtaggaagttggaattaaaagacggaacacaaagtgtttagaacagtgcctggcatagtaagtgctcagcttttggcagcagccatagggaacactgctgctgttgctgtcaccactactaatgttacttactatgactattactactaattctgggttatgaaatcacatctattttcctaaaccaatcagaataacagagcaacattacctctagcacagtcaggtccaaggaatcctgggaaacaatgacaatggccagagatacactctccatttccattgcaattggttgaacagtcatccattatttctagtaatacagagaaaaagataaaaaaaatgaacgcatctccaggctgtagagtctttatttttttttaagttgcaggaactctggacctatgacaattttgccctttgctgtttgtggagcacttactgctcaaaatcacatacaaagacatctgtaagatgtcacatgcagtacaaaattataaaaagggccctgggtttgctgacttggccaatcaagagtggaaccaaaaaacatcattatctctaaagcacataaatgttctagttcaactgtattcttaagagacattcatgataaagctaaaaaatgtaccaggattacagggcatttctcaaaagcaaaacaggctttaaaatgtaacacagatgactaagtctactgtttatttttcaaatttaggttttagcaaataaagtttcttctctagcaacttatttaatctactatcttgacagcttaaatatgatattcagtatttcattttcattaataagtgacaatggaaggcttttaaagtaagtgttcatattaaattcaccaccactaaaagcattagaacctaagtattttgttgagaaatgctttctgaactgtaaatgcttatccgttttctgccactaatttcctttcaatccattcttagagaagaatggatttcagatgaattgagatggctttgaaggtaccgataggtagttctggtgacataaatatgtaccgtgcaacagaacttttataagacttacagtaacttctctgaaaatctataatattatacaaatgtcagtctctctgacaatgaggtgaaaaaatgtttgtattttaaaattgtgtttgagcacaataatgatcaaattctaagtctgaactattatggtacctatgctttattctcgcagggatttttttttgtggtgtgtgtgtgtgtgtgtgtgtgtttgtgtgtgtgtgtgttatcgtctcctcattacacctttctataaatttctcatactcagcattcttggactctgagtttagtgttctggcctattaaactcacacttttcttgtgtaccattttttcccttttcaatctaaattacctgcttcaccaagtttcacttggataagctatttctgattagaaggagagattctaggaggtggtcctgatatcttccactgaacaataagagtgagaatttataatgagggtcgagaaatagcatttctacaattgtggcctgtggattacttgtatcagtagatcacctggggcacttaaaatggagatgcctgtgtttcagctctagatctaccaaacctgcttcagaggaatgcagcccagtcatctacattctgacaatcaccacatgagaacattgagaaccaatgctttaaatagtaaccttccatagttagagaactttgttctaaatgttgcatttttgccttgagaagaataaaaacaagaaaaagaaagaggtatctagtccatttgggggattcttaaaagctgagaatgaatccagtggctggatagccaccctattatcaattgaagatattatttgtctaaccactatgtgaacacatgccttttgcgggtttatgccagtctggtccctcatcacagtgttagaaaactcaaatggataagcaaataacacctgacattcacttaaccacacctgggctgactgaaatgtagcattcagcaaagagccaactatttttaactcattaaaacactagttatcatcagaaaatcactaatttacttgacaagtagttatgaaaaggcataaagagactttttatcattcagagatggaacaattatttatctgttttctacttatctagcttccttgtaccaagcagtagtgccacttcttaagtctacatttgaatttcccccatgctggatggttagtagaaggccatagaggaagctttcaaaaataagtatagttgaatttaatttcataccagatcctattggaaactttatggaagcagccttgtgggaatgtagctcttctggaaaaaatgtttaataaagcttgctatcaaaataaataaaaatccgtacatcttattgacttatttaagaactgtccctgagctcaaagggctttacaaagcttaaccccagcaatgcaaatgagaagagaaggcaatataggctttgaagctgccacttccactgggtatcaaagagacattggaacagccgagggactccaggaggaagatggctgcagcaggaacacataaacaactagccatgaaaaaaaaatgtgtttttctatttatgttggcctccagtaatctttgacttctatcttttaaatcttacttcagaattacttcctagagtccagtttcttagaggtgagaataattttgaagttctatgtttaaaccctgttcttatgctacagtcaaaagccccttgatatttgcatcttcgctgatgataggttttgtttctggtagttattctcatgggagaaactaaatgtaatgaatactcttatagaatgagtatagtctaaagggtatggaatttggaatcagacatactggttctcaaatttcaattttgccacttgctgtctgtgagaccttgccaaattatttaatcttttcaagcctccattcagttatttgtaatatatgtatcactattcctgagctatctgggttgtgatgagaatcaaacaagataactgagtgtaaagcatctagtacagtgcttggagcagagtggcattccataaatgctatctattatcctgctacagagcaagttgcctgagattaagggatactgacaatgctgcctatactactggaaaataatatataataacttaggccagtgtttgacctatattagtcatttagtaaatgttagttattaattgtcttcatccttgttagtagcagaccaaatatagttgagatcaatcaactgattctaacattatcatgaaatagataaatgagcagcgtttagagcaaattcatacaaatctgactttgtttaatcaagtatattggcttctttttactctgattaagataaagttcaaaaacaaaaataaaatgaggaggtcaggcatggtggctcatgcctgtaatcccagcaatttgggaggctgaggcgggtggatcatctgaggtcaggagtttgagagcagcctggccaacatggtgaaaccccgtctctactaaaaatacaaaaattagctgggagtggtggcaggtgcctgtaatcccagctactctgaaggctgaggcaggaaaatcacttgaacccaggaggcgaaggttgcagtgagccgagatcgtgccattgcactccagcctgggcgatggagagaaactgtctccaaaaaaaaaaaaaaaaaaaaaaaaaaaagaaagaggagaatttagggtgaatgacttacaagccttttgattttgggaaaatttacttgagttttctttaagtggaatggtagcagaaacgtttctgttgcttctaattttaaaaagacaagagaaaagtaaagagactgacttgcattaagcaaagagcaaatatgttgttgtatatgaaactgacagcttgatatgtggatgatatgaattgtatctcaaagtttaggttctttgggggaggaagtaagggacaggaaaaaacctctaagcatgtttctgggtctattgatttttggaaggttaatagatcggttagtgttttaacttgagctgaaagagtaagaataataggaagacagaaagtcttcacaaatattttatttcttctaatttatctaatttttaggagaaactcaaccttttataactcctcgacatgcacataattaatattaagcctccatagaaaaatgccatgaaatattcatccattgaacctgccccactgagcctgtcaatagcaaaacagtgacatgacttaaaaatttattttctattttaacaaacaaatattttgtcttttgaagatataagatcagtggagtttttctctaggggaaacatcatcatttccattgtattgactttctgattactttagaagaaagttttgataatcttacggctgaaataccattttctattgactcaaggtcttcagcatcaagtaaaaatagaacataattgttaaaaagagcagatggtatatctattaaagtcaacacatcttcctaaacatatggctgaacaggttaactaaaggataaagtggtgaggattgtattgaaaattgacagctgtaaaatattttcttgtcttttaaaagacatgtgttttaggaaaattcacacaatacgatactgtgtctatgagttgtttattttcaggactctaaaattgctaaggagctcagctttattcacacaaagggtcacgaggactatttatcctaaaatgacaaaagagtgagacgtctgaaactaattagggtgaaagtgaatgagtataggcaggcatcgcattaaaaagaacatgttttaaaaggccctgagcacactgaaagagacattgtgatgaatttcaaactaaaatattctataagaaagggctttgaatgtctcaagttattatccttaatattcttctgtaaataatcttatgttgtattttaaagccctaatgcttctagaaccagttgttctaaagaagaactgtactgatactagttttttctatttgaaaaaggtattcattgctttttaaaaataacagaacttaaattaacttgcttattccctttttcactgaaattgttcatctatgtagccttggtaataatattactaaggtaattatttctgttgagagcacataaaaagatgtatggcaagtgtcctagaagagcaacaaataaagtagcattaaaaaaaatcttaatcagcatttaaacaacatcaatgataacaacaatataaacttttatcatagtaacctttcctcaataatgacttcaactcaaagtgagcaataagcttaaataacccccaggacactgtcatcactgattgtgtctttctagggttgaactgtcaattcaacatattaggcaaagcagcttaccaattgctgtagttaacacgaatacttgctccatcttttttccatcattgtaaaacgccagataccaaggtccttgatccatatactctatgaaacctgtctcctgaagcgaagttaagatcaggttccgaggggagtgctgtgtatcatcagagcccttggagtcctgcttgaccagctgtttgccatccattagttttacaaaatcaaactggaacaaatacaaacatgaagatgagccactactttttcttctagactgataaacatccctaacttcaactgccctatttcttacttctttgctttgaagttgagcaaattggaagaggaggttatcaatttttaagtatatttagacttggccaggcacggtggctcatgcctgtaatcccaacactttgggaggcgaggacaggaagatcacttgagcccaagggtttcagaccagcctgggcaacaaattttataaaaatttttaaaagttttttaaagagcatatttaaactcaaaaacatattattaattatgaagaaaccctcactgtaattaaaaatattataaacctttcagtttgagagtattcaaaataattgtttaaaaatgaataaataaaaaacagaaagaaatcttgtttagtattatgcaggagaatcttgacattttactaaagcatctgatagaagatacttgaaaatacaccttccactcataaatgttactgtgaccttctctacaaattaaaaacagttgtatagtctttaaaataaatgaacagtcaaaaatttgagaacattcatcataatttactacgtttgtgggtgacatatttacatattcaaaaggcccctcctctccattttttctaatcagttgacaaggacctggcacatgtttccttgaacatttattttttgaatcacatttgaatgcattctaattccgtttctattctggcccagaaggtaaggttgttttttagtttgtttctttgtttagcatgatctcttgactaactgaaggtaaggttttaactatagtcatatctgttggggaaaaaacaagccccagtgtttgatcactttttctacttcttagatgaagtagtgctcgaaatgggttcatgtggggaaaaaataaggagaagaaaataagagaaatgagatgtttaaagtttatggaagggctataaaaatcatagaagttttacacatttaagttattaacaacagtaaagaaaaatttctacctgtaagacaaaacctaactttttgactaatttctcactaatttctgattaatatgcgttccttcattgggaaaaggggacacagatgtatgaaatcagtgaagggactgtgggcagtaaagctaagcaagatgagaggtctgggaagctcatgaacagccggttccaggaagcagaagtcaaatttaaagggtgtgtcttaaactttcttttctgaatctgctctgctaaatgttattccttatttctccatgtcatttttttcattagtttcagtgtaattattctggatatttattcatgacaaatatttttctgtccttacctttgacaaccacatatttcataagtcacaaaccctgaactgttcaacccatcacccttgaaaagggtttaagaaaatacctataatatcaaatacctgagtatgtgtaggtggaatgtttcttctgccataaattcccagcagagagtccttggctaaagaaatattgaacttcagatatattggatggtggatagtaatctggaaacgccagaataaaccaggtggaatggtctgcatgacctgtgcaccaatgtcaacttctccagtgtctatcgcccgtcccttctgaaacactagttttaaaggtagagaaaattacacaccatgttaatcttaatttataaagcaatggtttttagcttttcaagaacagatatatcaaaataacttactcagctttttcttcctccccaccccatctgtctttcaaggccttgcccaaattaaatatcatctaagaagccttccccaaccacccactatgtcagtctctctcttctcttcaaaccctattgcatttatttcaatcaatttcactccttttaaccattatttactgagtgctgtcttggtagctgcaagagatacaaagatgagtaagaggcagttgttgctctcaaggagcattgaaaatagggaaaataggacaagcacatataacctcactgtaaagaaaaataagtgctctgtgtatttgaaagagggaaagttatttggttggaggatactcctcatctctagctatctctatcctctttatcttcttgtatttctccttagcacttatcaccatctaacatactacatattttacttatttattgtttattgtctatttttcctcaatagaaagtaagctctgtgcggacaagcactgtggctgttttattcgtcggtatattcccagtacctagaacaatgtaggcaactgtaggcaaagaacatagacgatacatatgtattcatagaacaaatggatgaatgagaaaaagttactatgggaagtggcactgaagatgagccttagaggaggacaaggatttcaaaagagttattgggaagagtggcgcacatggaaaggatggcttgaactaaaaagaggaaagaaactgtaaagctaaggtgtagggtatgtgtctatagagaggagcagttggagttagggctggagggaagaaggaaatcatgttgtctagggcctagaggaccagtcaaaagggtttatttaataaaggatagaaagccattaaaggtttttcagaagagggaagaggtttgggtacattagaaaggctaatcttgaggcagaggtgggacgaattagagcagacggacacaagaatgacataggaattatgggtgattcaagtgaaatgacatgaagatctaaatttagggtatgcccaaacagctcatatagaaaaactacatctcagtgaaaaataatttcatgtgaatggaaagaaggagaagatatgagagacaatgctaaggaagatactgcagtagagattctcaaactttaatgcgtacaagaaggcagttttttaaaatacaattctgattcagaaggtccaaagtcagacatttttaacaagttcccaagtgatgcccatgtcgcatggtctacagcccacaccctgagaagcaaagctctagagaacattaagtgttggggccaatggagggtcaaagctaaccccgtgattgtgagttgggggatttagacagtgctaatagcaaaaacaggagctggtctgtgagggaggatgttgagtttgggcaatcagagctttattatttattgtcatattttccaatgatttctgatgtgccagtttaatatgtgttttcatggaattttttgttttgtggtaatggggagggtaggaatacaagaggaggagcaagatttagtttgccttgattttaagcaaggagggttacatctcaggtgagaaagctcaacttggcctcatttcacatcacctttatttttttcagccatcaactccttctccagaccaaacacagttttaaaacacacatggtctctgttctttgtgctcacccattataaagttaacagcccattaagaaacacacctgcagtggctttattcagtggccaatgccttgcagcttttaactccctaaaatacctccattattgctttttgtgttaaggccaacagtaataactattttaagaatgttcactgttaactgttaataatagatttcaaatgcaattttgtacataattatgtattacaggacacataattttgtggaattgacatttataataaaataggctctttgaaatgataaatgaccaactgaggaccttatttttcactgaaagttacttttttccatgtgagacagatcaatttggcccctaaagggctgattatacatttaactcttaagtcctagagctgacaatgtcttcaatgagcagacaattaacagaccatgtttatgtggcacttctgttcgcaagttaatgttcagtttattcaactgctatcctcattaggggcttttatcaatcttaaaatgcatcatttggttatgcaaacaatattataaatataaaacaattcaaaatgttctaggtttgacaaacactgttttaaaggtgctaagaatagactttaatgaatagatattgtcattttttaaaaatctgaacaaaactggttgatggacattaacctttatattaaaaccttaccaaatactacaccatctctttattctgcactttatagcatcatatattacataatgaagctacttaaatgttattcaataaatcaaaagaaaggaagttgtgttgttgggcttctctgtttattagcaagtctatgtatctggagtacatatgcataagttattcatgaaaataattttaaaagaagttgatctcatcccttgaaagcttcattacagctaagacaaggtagatgaacagagatgacaacatacgaatgagcacgtggactgtaatttaaataaaaataggcaaagcaagctagttgtggtgatttggtattagagaagagacattctcacagcttgtaggtggaaaatttctcagcctcttaccctttagagtttcatgcatcagaaaggaagatatttccctgttagcaatctagaccactaaatagactgctccattttatcatctctcaaaatttgttatagactatagtacaataactatgaattcattatttaactattttccttaatgtagccaaaaggtgtggcaaactaaagagaaggaaattaaatgtagaaaaacaatacaaaatagtattttttgaggccaggtgcggtggctcatgcctataatcctagcacttcgggaggccaaggcgggtggataacctgaagtcaggagttcgagatcagcctggccaatattgtaaaaccctgtctccagttaaaaaaaaaaggattttttttccaaaaatttctgtattaatataggtaaatgggatctatttggccaaacttaacactgactctgatcctttgtttgcaaattgtaaacagcagagatagaatacagcatccaggtacaattttatttatttttgcaatatgcctgttctaattggcatttaatctcttattttactaaagcatactggaaaacctaggaagaccatattctccagttatagaacacttccttgcacaaatttgagattaaatgcagagagccacagatcatatcaagctgtgcagtactgtagttatcacagtctcaccaatatccaccaatttagtttgagctaaacactctctttataggttgcaacacaggcatcaactgctgagcaggaaaaaccaatggtagacaggctgtgttgaaagagggcacactaagtgatggtaactcagttccaaaagaaaaggtcaagatacttggaaggtgaaaaaaaaaggggcctggaattggtgacagacaatgtgtgcagtggcggtatcacctaaatcaagactccattatatctagactcagacacacacttgaatactaattacatgattactaatgacattgttcatataaaataggaggtaaataactatattctgcacatatgtgtatatttattttttctatttaatatagctagacgtggtacattcaatgatcctatgcaaaactcggttgaatattgatagaagatagtgaaacatggtcattaaaaagattccaccattacattttaaggtaaaaatgatcaagttaaaggctatggtatagcccataacagcaatctgagttgtattttaaagacatttgcaagtttcacaaagtatctaagctatgttttccaaagagaagaaatatatgcattcagagcatatttgtcctttacttcaccctataacatgctcaaaatctttaaaagatattggtgtgtttttcagccaaattagacctagtgtgtgtctcacgatataagtatcatcttctttatgttcctctgaatataatacttgtttaacagtaacaagtcttcgcaaatttagattagcagtgcttggagcaaaatgggaggtggaactaacctcttccctgtgattaaatgctttaaagggttcaaaggggtatagcaaaagccatctgaaaggtaggtggaaagctactgtttccatctatgtagcttaatgtaattttccttacgtgaactatcgaagagaaatatgtattcaactctcaatttttcaggggtagattttctgggttatggattacacatgcttttgtatccattatattacccaaaagtagtcaagagaaaaagaaaagaataaaccttgcgcctggtgggaacttggtaaacactgcttggatacattaataaattagtaatgttgataatttttttgttgatagtaattttgataatatatttgacattttagtcaaaacgtacaactttttttattactctcaactatgtgataggtaggtcatcatataattgtttttattaaatgtccagtaagtagatgtcaagaatttactggtgagaggaagaattataactatttacacacataggccttggcaattaactgtgaataaaatatgtttgtaaataaaatcctctgatatgacactgataatagatagctcactgtgtagaaaagttaattaactaatcttacaattgagaaatacattacttgtataagtgtaaacaattatgtccaaacaccaaaagactacagataccagtacagtagcttatttagtattgcttacatcttctcaggtagaagtaaaatggcattgctaaaatcttatccttaattaaaggacttattttgagttgcattttgactctgtatatctgtttttgaagctatatcatttaaaagacacaattctctatttagaaggatttctttaaattttgttgtaaaaacttccacattcccaaaaactttagtttcacagttcttctggtgtggtctgttgaccattaggtagcattcagaaaaatgagtttccaaacttaaggctcttgtgacttgctatacaatctcacacggtgtaatacaaattacatttgtagacgtttctgtatacggattacaaatgggtacatgaagtagccaattactttgacttttcttggtgaaaactaaaattgatataaagcacaaatgtatcatcaagttgttacatattcaaacatttactcagactcatgggtcaaggtggaataaaatatctcttgaaagaaaatattgccaattgcaaaaaaatccaaagatttatgaataaatatgactatatgcaatgaaaactccaaagtgaaattaagaagagaatgtccatttgtaatatcattaaaaagaataaaatacttaggaataattcagtaaaagaaactgtgagatttgtatactgagaaactacaagacataattgaaagaaattaaatatttcctaagtaaatggaaagatatcctatgttcatggatcaaaagacttattattgttaagatggcagtacttcccaaattgatttacagattcaatgcagtccctgtcaaaattccaactctcattttttttttagaaatagacaagctgatgctaaaattaatatggaaatgcaagggactcagaataactaaagcaatctttaaaaagaacaaaattggaggcctcacacttcctgattcaaaactgattacaaacctacactaatcaagataatgagtactggcattaggatagatatatagatcaatggaatacaactgagaatctagaaatgaaacctcacatttatggtgaactgattttcgacaaggtcaccaagacaattcaatgggggaaagaataatactttcaacaaatgatactggaacaactggatatccacatgcataagaataaacgtgacccccttcctcataccatatacaaaaaacaactcaaaatggatcaaatgcctacatgtaagggctaaagctgtacaattctcaaatgaaaatacaggcataaatctttgtcaccttggatttgtcaatagtttcttagacatgacatcaaagcacaaataacaaagaaaaaaatacataaattgaactgggaggccgagacgggtggatcacgaggtcaggagattgagaccatcctggctaacacagtgaaaccccgtctctactaaaaaatagaaaaaattagccaggcgtggtggcgggtgcctgtagtcccagctactcgggaggctgaggcaggagaatggcgtgaacccgggaggcagaggttgcagtgagccgagatcgcaccactgcactcaagcctgggcgactgagctagactccatctccaaaaaaaaaaaaaaattaaaaacttttgtgcttcaaaagacactatcaagaaagtggaaaaacagcccacagaatgggagaaaacatttgcaaatgatatattggataaggggcttgtatctatggtatattaaggaggcttacaactcaacaataaaaagttaaataattgaaaaaagagcaaatgatctgaatagacatttctccaaagaagacagactaatgaccaataagaacagtaaatgaagcttaacatcattattcatcagggacatgcaaataaaaaccacaatgagataccattttacacccattaggatggctaaaataaaaacaacagacaataacaagtgtaaggatgtggagaactggtattctcatacattgctggtgggaatgtaaaatggtgcagttgctttggaaagcagttcatcagttgaagaactgttaaacataaaatgttaaacacagaattaccatatgaccccgtcattccacaacttggtgtatactccaaagaattaaaaacaggttttctaataaaaacttacacatgaatgttcatagaatcattattcacaatagcccaaaagtgaaaatccacaaaagatctatcaactaatgaatggataaacaaaatttggtatacctatattatggaatattattcagccataaaaatgaagtattgatacattgctgtatattatatgattctatatgaaatgtagaaataggcaaatctatagagacagtagattagtggttgccaggggttggaaggaggtggggatatggagtgacagccaatgcctatgaggtttctttctgatgtgatgaaaatgttctagaattaaatattggtgattgctacacaactctgaatagggtaaagatctctgaattgcgcactttaaattagtgcacaattatattatgctatataaactatatctcaataaagctgtcacaaaaatacagttagatagtgtgaattggcatagcatatacacaaaaaccatcatgtactgtcacaagagttttgatgtatttccaagtggttttagaatgttacctgctacctagaagctgaactatcccctggccagtattttagaatgtgtgattggtagtacacatcagggatgcccattttctatatttcatacaatgttagatactgttatatgtcagttatcattatcacatcattcttaactttggatggtggcaggatggctgattatagctcagttaatccagttccctctcctttattttagaatataagtccccagaggatagaacattcacatctgtctaaattttcgacagctactcattgggcatttaataaaaacaattatatgatgaactacccatgacatagttgagagtaatgagggaatggcatatcttgtactagtcctccagacttgccatattgctatagcctttgatttctaccttttaggcatgcagaaatcttcaattacatgaattaaaacttctcacagacaaaacccatgtcagagagtaataataataataatagatgctaccacacttactgtgtcctctttttcagttcctatctcttatttctaaaataccaaaatgcctctttcatactcagtatgccatccaatttgatgtcccagtttatctctaaggctcctccctcctcttctctcctgcttatgctgggactttggtctttttgcaatcttctttcttactcatactcggtgtctccctctctattggctcctcattctttgtcttcaaacaaacacaagtctctcgcagtggctcacgcctgtaatcccagcactttgggaagctgagacgggcggatcacaaggtcaggagtctgagaccagcctggccaatatggtgaaaccctgtctctactaaagatacaaaaaattagccgggcgtggtggtgcgcgcctgtaatcccagctactcaggtggctgaggcaggagaattgcttgaacccgggaggtggaggttgcagtgaaccaagatcgcgccattgcactgcagcctggacgacagggcgagacttcatctcagaaaaaaaaaaaaaaaaaaaaagtctctcttcttttgaaaaatttgtaaaaaaactaataacatgacccaactgcccttttgtcaaattatcatactgtttatctccttcctttccttgctgaactgtttctatcagctgcactattgtttcattatccacttaccacctaggctattaccatctgcatttcccccttaccattcgattattccattctcctaaaaatgtactcctcaagatcactaggagtgatttttcttgttttccaaggtctggcgcaaactacttctccagaaacagtcgtattttaatcttctttcttttaagcctgttaatcacctaaccatcttatttttatttctgtacaacagtttgttgcatgttgtttgtattgtatgtgtatgtatgcatgtttcttccagctctcctatgtaacgggaatctgctcaagggcaagcactatgtcttctgttttatttgttagctttccacagtacttagtacagttaaagtagcagcttggctgatacaggattaaaaattatgagcttctgtgtttctgaatactaagaatttcatttttgttcccttgctattagtttaatggagcatttgaggtggtcaggtatggtttctctttcaactcaactttttaactgttattcttccctctcctagaaccaagaagagaagatggtatctgtgtatagctgtggctgacactttcagtataattataatgaaaatagaaaatgaccattaaaatgactaagggaaaatggaagctacaagaagaatacagaagtaaacgcaaggactcttaatattagacatgtgtaggctaaaaaagaatgtgtgattatcatctaggagattacaaaagttacacgcaggaaaaatgcagatttgtgcattaaattctggaactgtaaaacttcatagtcaaaagtaaacttcaagtaactagaattacattggactccacaaaaaaggctagtaaatgtttaaacttccttgaaaagtaatacaggttcaaagatataaatggatactcaacagaattaaatatacacatggctgataaacctctacaatggactagctcctccacaaaactaaaatgttgtaaaaatgttatgggaagatcccttagctttgaaaggactagtccaggaggataaacatggcattctatagcataccacttagtgaccctgtcagatgcagactgttagactagagggaccacaagacagacctatttcttactgcatcacaggaaaggtgtgtattagtttttttttttttttttaagtaaaatgaggatgaaaatgaaacaagaatgaaacactaaacatatatgaccaaggacatttaacgtgaatttttaatacaataaataagtttgtctttcagcatagggaaccctttccataaatctgttttagaagtcaagtctccagtatgctttaggaaagcttttgttaaaactgaagtatattgataaagtgatttaatatagttgaaaacaagctgcagcactctagctgggccctctgaaaccttctgttagggaaacatctatatagcattataggaaacatttactgtaattcgccatcaatctttaaaaataatactgttacactcccaacaatgttgtctttgttagcgcattacttctattttattcatgtggtttgttgtgcttacatgaattattcccaattctacctcaatatcttgggctataatatcctttaaataaaagatactgaaactatgggttgactcaaagggctgctgaatatccacatgtcctatgaaccaatattgcagaaccacagaattatactgcaggactgcgttccatctgaatgcacaatgattacctgggtggggttggtgcagttttttagtttggtaccacataatgaatctttatctactgattgggtctgtgaaataaatatctgccaaaccttaagtaaattaaaatttaacctgttatttcaggtccacaattggcattgtataaaatgttccaaggcatttatgtctcagataaagcaaaagaaaaaaaaaaaaaaaaaaaaaaaagcaaaacacacacatacacacacaaacacacccctcttctggataggtccacaatgaaaggtggctgtaaacagtacattttgcactgtcatttagttttcaattcccaagagtacttgtggggtgtgtgtgtgtgtgtgtgtgtgtgtgtgtgtgtgtgtgtgtatcttttgctttgtggaggagggagaatgctcgctgaaaggagatcttagatgtgaaatataagatttgccaagtactcttaaggaagagtacagtatttgaactgtatgcattgagatttttaatcaagatagccgttatttaaacaaactggctttgagaaaggaatttttttgaaaaatgaaagaaaaagcccaaggaagggtgctaacagtaaggagaaactggatcacaatctcagctctgcctttagttatgtctattgtctattgcgcaaggcaagtcatgtaactttcttgtgttttccttttcaactataaaacatgggtaacacggctgggcgtggtggctcacgcttgtaatcccagcactttgggaggccgaggcgggcagatcaccggaggttgggagttcgagaccagcctgaccaacatgaagaaaccctgtctccattaaaaaaattacaaaattagcctggcatgatggcacatgcctctaatcctagctactcgggaggctgaggcaggagaatcgcttgaacccgggaggcggaagttgcggtgagccgagattgcgccattgcactccagcctgggcaacaagagcaaaactccgtctcaaaaaaaaaagaaaaggtaacgatagctgccacagaataaaactattatgtggataaaagacattaaagtattttacaattgtaaatgctaagtgcaagctgtgttatatacatgtcaaaactccaaacttataaggtaggaaactgggaattaattgtttgaattgcaacggaattctctgcaagtattttaaatggcaaatgtggttttacaaactttatagatatacatttcaacctctttccaggagtatatcccttttgcaaaaataggtccacttttacttgtattggctcattattcttccttaactgcagaatttgaacactaacgcatagtgtgtacagctgaaagggatcttacagataagttagccttgtgttttgtcaaagccttagcagctgctgagagaatagagggcaaataaagcaaagaggaagggaacgggagttttgccaggaatctgcccccttccctcgccatatctggagaaacttggcttttatctgttttctatttaaatttgtaatttctgggtaagatttaatttgtaaaaacgttttcactgcctgctagccccgcctcttctctgcccctagaaacggttgaaagccaactcccttatttttcagatgagaaactggagcctagagaggtgaggcagtagtcactatttggtcttggctaaagcatcttcatgacaggctataaattgtgtcatatcaatcagctgtattttgtttacatggtcatatattcagcagacactgactagaaaaacgtcattttttttcaactttgtggagatagattgtgcaggatgaatttaaaagaaatgccactttcccccaaggccaggcttatgcaaaattgtaatggagataaaggctgcttttagtattctttagttctgtctttccccacccatccttctttgttcccagtgttctattttggcatccaacctgcaggaattcagtatcctcaactacccaataaatttcatctccatttatattgctactgacaatacaagactttacctgagccttaatgctcctggaaaacaattttgcttaagaaattccccaaccttttgttttccgaaattctcccacttttttgtgtcctgggaaatggcttatgcaaaaaaaccgtaacaatgacaacaaacaaacaaaagtccaaacaaacacatacaaaacacccttccctaaatgacttaagataaaactctctgtcccttctttcccatgatttccctaagactcacctataattccacccctgaaaagaccaaacacagacttttcccctattgcctgaacccactgaaaggccgtatacagaccctccaatttcctattctttgtctcatgaataattagttgagattagaactgtctgtttccctgaaactagctagaaacaaagatacacatttcctgttcagctaactgatacttcccctgattgcaacacgatcccaccagtaaatcatctcacatgtaacccatctaccccttcctaataagaccaagacaaacctccctattgcaatagcctgaataaaatcaattgttttacttgttcagtttttctctgtgatacttattgaaaaccttttcagaaatttatatacttagtttatcctatactattacaataacaggtgaaaaatataaaacgtgaaactcggtaccttctctcctagtcccagctctttctatgtgatctcaacttttctggacctaattttcttaatttctaaataaggatattggatttgataatctttaagattttaacattctaatttattgataaattacgtgggggtagttatttttaattttatttatagacattatataactcaggtctaggaataagtcttttatttgttcatatcctctgctctgtttaaagcagttgttacataatgtttactggttaaatagttataggccaggcacagtggctcacgtctgtaatcccagcactttgggaggccgaggcaggtggatcacttgaggtcaggagtttgagactagcctggccaacatggtgaaaccccatctctactaaaaatacaaaaattagctggatgtggtggtgggcacctgtagtcccagctactcaggaggctgaggcaggagaatcacttgaacctgggaggcggaggttgcagtgagccgagattgcaccactgtactccaacctgggcgacagagtgagactccatctcaaaaaaaaaaaaaaaaattatgactagtttgtaagactctaatgtagtgagggactattttggtacaatactttcaattttataaatatttaatactgacaactgagatttttctggtagattacagtatgtggttgtgacttatatctgcttattgaaattctagagtgttcgtaaattttttagcatactaaatgtctataatcaaatactctttttctttcatttggataactaagtggtgagaaaattctgttttctcatgagaagcagatatataatatatatatataacaactgttaatgggaaaccaattccagtagaatttgatgtttctttaaaaagtgccattcatcgccattctaactggtgtgagatggtatctcactgtggttttgatttgcatttctctgatggccagtgatgatgagcattttttcatgtgtctgttggctgcataaatgtcttcttttgagaagtgtctgttcatatccttcacctactttttgatggggttgtttgtttttttcttgtaaatttgtttcagttctttgtagattctggatattagccctttagaatggcgatcattaaaaagtcaggaaacaacaggtgctggagaggatgtagagaaatagaaacacttttacactgttggtgggactgtaaactagttcaaccattgtggaagacagtgtggcgattcctcaaggatctagaactagaaataccatttgacccagccatcccattactgggtatatacccaaaggattataaatcatgctgctataaagacacatgcacacgtatgtttactgcggcactattcacaatagcgaagacttggaaccaacccaaatgtccatcaatgatagactggattaagaaaatgtggcacatatacaccatgaaatactatgcagccataaaaaaggataagttcatgtcctttgtagggacatggatgaagcgggaaaccgtcattctcagcaaactaacacaaggacaaaaaaccgaacaccgcatgttctcactcataggtgggaattgaacaatgagaacacatggacacaggaaggggaacatcacactctggggactgttgtggggtggggggagtggggagggatagcattaggagatatacctaatgttaaatgacgagttaatgggtgcagcacaacaacatggcacatgtatacatatgtaacaaacccgcacgttgtgcacatgtaccctagaacttaaagtataataaaagaaagtgccattcatcattatctgatgatgatagtggtaacagtttaaaaataataggttttagattggtgagtagagaccaaactttaaagagagaaaacacttcgatctcaagaaggtcatcattcactgcaaagttcatagtggtttgaaagcaggttctatagcacctaacggaatgtcaatgaagttcaaaaacctcaaggtgattttccaatcttttggtccgataataactgctgctaaattaagcaatgtgtcagacactgtgctatatgctttatatcaattgtttaattaactccttactatgaccatatgagacaggtactattattatcacccttattttacagatgagggcactggctgggcgaggttgtgtcaattacttgaggttggagagataatgatggtacagttagtatttaaagccaggtctctctgactccagaatccaggcttttaaccacagtgctataatgcccaatcttctaggagagtagagaaaacaatttaggaagaatggtctggttgtcagtttcatattttagtgcatacagtatcaggacaagcttctagagctgtatttatgggatgtgtcttatgtagaaaatcataaaaggatacaactgaacatttgaaaatatccttctactgtattatatcttctgcaaggtttggattagtatacatatggcattaaaaaaaaaaggagctatgtttttacttggtaagtaatatgcagtaaagacctaatacagcaaaaccatgatgtgcagttatagttaaggttttgttcaggcttccagaaaaagtcaggataagctagcaacttggtatatgaggcatcaacccataatgatttttcttaataaagtatttaattgaagtcggtttgctctgtttgttgttataattgagcagaaacttaaatcatttttcatttatgagacttgtcacaacacattaaaaatagaggtgagtagaatttctctaaaatctatcacgaatagactctgggactttgctttcattgtgtaaaaagttttttgtggtcttcacagatattccatatgaggattttagtacagtgtagaagttaagagactggactctggaatcagaccaccacttactagctctgtgacactgggcaagttacttaacctctctgtgcctctgtttctcatttggacaatggggaccataatgtgaccttcatgatataatccatgtaaagtttctggaacaattcttgacacgtggtaattttaatttaattttagccatcatcatcaacttactttatggaaaggaatcaaaagaggtctgaattagaatataaaatcaaatatactataatgacaactatgtgatgacctgctgtcttgcatgtttcattttcctcagacagataaattctgatttttagtgtgaatggcaagaaaccctaggcagataataccaaatgatagctcttgtactttcagatataaggggataaaacagcagaagagaaggtaagggagaaaaagcaggtaagggagataaggaagaaaaatctgagcagtgagtgtggcagactttcttatctgccacctctgacccctctactctcctcagccactctcaggagtaacagtgaaactgctgggaaaggtcactccaggctagaaacaagtattttgaaatgagaacatacagcaaactgcatcatgaattgaaaactagagcaaaccataatattttcctgaaccctaagcattaatttttactgaagcatggattacagttaccttttcaaaagcacacaaaaacaagaggaaacaaaacccacaaacaacccccccgccaccacgaaaggaattaaaaacacaagggaagagtagtaacccaaataactactgtattaaaaaatgatgtcttagttgcaactaatgaaccaaaataagactgtgttaccacctgtataaaattgtaagcttcttggaggtaaggttttggtcattcattcatttatttacgtttggtctccaaaaattactcaggatattgctggctatatatattattctcaatttctaccgtttaaattgacttcctggaattttacaaggctcaagtccctctgtactgaatcctatttcaataaaaatataaatttccagctattttcactgcttgtatattaagactaagatcattcagtgtgaataagatgttgggagtgctggtactgtgacatttattataaataagtcaggtagttcaagctcatgttggttaaacttaacagttcaggactcaaagtgattttttttttctttctcccaactaggaagaattcatgttcccaaactagaaaaaaatcatgttatccaactttgacataaacattcacctttacattaagcagaaaaagctttttcgtattacaaacagaagaaatttccatataccctttgtaaaatgttatatataaatgctgggcttggacacagagaatgtaatcaaaatcccacgttgcttcagggtagttatatgcgaaatgcaatttccattgtattgaagcctccattctgtaaatatttatctattttcaaaattgccaacatatttgaaaactttaattggtttatactcaaggcactggaaacaaggaaaatttgctttcacaagatatttacatgcatttattctgtccacgtagaggacttctttcaagtgatcatgaaatttaatgtgaagtgaaaccatcccagctacagttctaatgaccaaattagaagaaaagtaatcaacaatcaatcattttgatcactgtaccttttttctctgatttatcagaaacttttcctccaattggagagtaagtagtgtccatggactcggtccccctgttccctttgctaactccatttgcatacagctctccttcaactggttgcaactgccaagtcaggccgaacaaatgcactgctgcaagagaacaagccatacattaatttattccagactcactgagaacatctccaagccaggtatccctttgcacctaaaaatgttacgaacagttttcttttagttaggccaagtaactgggagtttatacctatacatcatacatgtagctacttacatgctacgacacacatataagtgttaacagctgttaaagtagctgttgttaacattttgaggctaaagctatcccaatgataggattagaaattggaatcaactatagtacaattagacttaacttctcactgctgtgaccctttccttttccattccccttagtcatgtaacactagtttccatatggaaactattacagagtaatggtggacagactaccatgagaacatggaagaccttctctatggctttaattcaattcagttcagcaaatatttcctgaacgcctagtatgaataaagccctatgatagttgctgccggtgttaaaatgtagatgcttattagggtgggatttggtagtaataccaggataaaataatattatgcagaatgattgacataagacaggtttaaactgctatcagaagattaaaaagtacccagtgttggtcactgtgcaggaagatgggcactctcatacactcctgatgagagtataaaaatacagtgaccttttttggagggcaatgtggcaccatttattaaatgaacttaaaatctgatttaccctttgagctaacaatttaatttctgtgaattaactatgaatgttgccaaagtacaatgctgtctattgtaacatctgaaaacaatattagaaagttatgatcaatctaaatattcatcaagaggggattaatcaaataactgatgagatagtaaataatacaagattatgcggctgctaaaaatcatgttgcagaagaccatgcaatggcatgggaaatattcataaggtatcaaatgaaaaacattaggctactaaacattataaatagtgtgatctgaagtgtgtgtgtttgtgtatgtgtgcacatgttcatgtctggagaaaaaaaggtttggaagaatatatagcaacatgttaacagcatgggaagcttacagagaatttttattttttttatgatttctgtgttttccatattttttttacaatgaacatgtgtaacatttgccatctgtgaaaaagaaagctttcggtttaaaggaacaggaggttaaaataggttgggctgatcaagaataatttttgaaggaagtgggagtagatatagaccttgaaggatgtgtagggctttgacaggtgacaacgattggtggggagaagggacagggctgaacaaaatatgactttgtaaagtacatgatgtatctgaggcaaaagaagttgctggggttcactggagcttagctatgtgctggtgccagtggaagttaacgccagaaaggaagattagagccatattgtggagcacactggtgccacacttatacatttggattcaacttattaggcaacgcagaggcatttctattttttgacaggttgagtgatatgatcagaatttttcggatgattaatttgagagtggggagcactgaaggtttttagccaaataactgatataataaaaacatcctttgcagaaagataaatccagtagtagtatggagaagaatgaattggagacctaaaggtttggcaaataaatcaattgggatggcattgcaataatttaggaaagaagtaattagtgccccaattagagtagtgtcacaggagtgtctcagttatttgcagtgggaatgcaaagaaggagatttcttaaggagaaattgcataaatggcatttcaggatttggcaagaagtttctttctctctctctctccctctctctcgctttctctgtctctgtgtgtgtttgtatacacattcatgcatgtgtataggtgtgctgtgggagggcgtagaaaaaagtgagagaaaggagggaggaatccaaaatggttaaggttttgagtctaactgaaacaatggtggaaccattaatagagttagagaattctttattagtctagcacttgctacaaatagttggtactggatttgtgttttgttgattgatgactatttgaatatgtggcttgagacaggatgagaagatgcaaggaatgcaatgaattcagcctttggggttgttgggtgtctgggactgatgggccctccagatagtgaatgctaactataggaggtttgaagttctggaggatattagagctagaaaaagaatgaaaagtcatatatgcacagaggcaatagttgaagttgtgagagtgaatgaagtcactgaagggagagaatgttaggagaaaacagttcctagggcaaaaagctggagaaacctcttgtttgttttctcattgcatttttcaacatcaaccaaatcctatcaaaaggcaaaaaaaaaaaaaaaaaaaaaaaaaagtgaatctgctcataagccatttcgtatttctctttgtgttcctaggtgaactgaaaggggctaattagtatgtgtaacactcatgtatagtatttgagttagtgaccgagaacagagaaggatagcctatttaaaaatcattcatccacttttagttggagctaaagagatttctaacacctacttcctaatttatccttaaaacttttaagcatttaactggtttctacccttttctttggattaaggccagtgctgcctgatgaatttctcttgcaattattggaaataattttaactcaaaggatagtggttctgagtaaggtatggtatggcacattaataaagctatattagtgacatccttgagatttccttgccaatggactctagtttaacacacctgttccaattagaggtatttttccgttttacagaaaatttggtctactctgcctcccaaataatttgaatatgatggatagtaggagctatattgaaaatgtgtttcattccctgggttcaattacttctgtgaaattagatggaccatatataacaaaaggaatagtagatctcatttagaagactaagggggctattttatatactttaagttgagccactttcctggcggcacttgaaaatgcgagaaaatgcatgtggtgagattcacttcaaaatatataaggtaaggattaatttttcaccatcgaatgaaatggactgcttccagccaatcaagacagataaagaggtatgggcacatttagtagaacactctttgagagcagtgaagctttgtaattttttgaacttactatatctttcccagggaacaagctgtttgtaatatatgtttgtgtgaatatataatgaaagttaattatttgctacagaccacagacaggtatcatggcaaggctactggccttttatttcttccaaacataggtactggccaaccaaaatggctatcagatataaacaactaatacagtctaaccagtgtgtacacactggctgaatgtcagctttagatgcagtataaagacagcttccttagtttctagtggattcccatccagatttatgctatgtgtttagagccacactgtttaggtgagtcccccaaacccaagaatagacattatgagccaattggctagaataagggtaaaattagtaatgaacaaacagggcaatattaagtcatattcacatgttgattcaacaaatacttttttgagtgcttactttaaaccaggcactgtttttttttttttttctgagtttacagcagcaaaaacataaaaaaacctctaccctcccagaacttacatgagagggtagtgggttaagacaggcaaataaaaaatacacgatataaaatataagatagaatacaacgttaagggaacaaaccaaaaaacaaaaaacaacaaataaacaagataacgttgggtagttataagtgctatgaaggtaaaaataggtaagggtggtcagagaaggcctcttggaggaggtaacatttgaaccaagattagaatgaagtgaagccattgtgaatatctagtggaagaatcttccaggcagacaaaacagaatttatagaaagccctgaagtcttacatgaagtgtgtgagaaatactaaggagcccagtgtgagctcagtcagaaaggcaaagagtggtaggaacactcatacacataagtcctggacccataatcttgttacctcagtacgctagccaactttgcaagctggtcaccaacaaataagaattagaaagtaataaacctaaaatctcacataccagaatatatacctccaaatgagcactgctggttgaagtagatgtaatataagcactcttgactgtaagcaaggtcaaagttactgttccctaagacatatataaaatatatatatatatatatatatatatatatatatatatatatatatatatatatatactcaatgaatggagatggatgctacccagatctctgagggagtacccatcctgttatttgcatttcactgaaattcaatggttggacagaatgtttatgtctactcaaatattccaggaatggtgtattttcagcagattaaaaatggcagtccctaatgctcttttagcaaatgttccctgatgctgagccctgtacattttacaattattctccttccttttctatccaattgcaaagagctgtgctctaaaattataaattcattacaaagttcaggtaatgaatggattgtcttggctctcctcaattccaaattcaatcaagcaccttggaactcaaggtaggctgaccccatgtacagaagctcttcctcttcttaacgtacacatttctgtagcaacctccaagtctctctgcagttttctttctgcgtactgttagaatgttggactatgtttctcataaataagactggtggtctctagcaacatttataatcaataatcctttcccatcccactctctttcaagaggcactcattgactcaaaaaaaaaaaaaaaaaaatcccacaggaatgcgtcagaagtaaatgtgggaaatacatgctgaataacttaggcctatgctatccaatatggtagccactcatcacatgtgtctgttgcacacttgaagtgtggctagtcagagttgaagacttgatataaaagaaaaaatataaaagatcacattaatatttttatattatttacacattgaaatgataatattttggatatatcaggttaaataaaatatttatttaaattaatttcacctgtttcttacttttttaatatggctactctaaaactttaaattacatacatggttcacaattatttctgttgagcagtgatgatcttggactacctacatttcacaaagagatatgatgtttctcttttagcaccctatcatagaatctaccatactatattaaagatatctgtttacatgtctgtctcatcattattaagcactccaaaggcaggaacaatgccttctgcatttttctgtttctggtacctaactctgtgattggtagtcaggaagtactcttcattgctgataggagtgtacagtggtaaagtggctttggaagacaatgttgatatctatcactatttaaattgagaatattccttgaccaaggaattctacttctaggagtctgtactaaagaaataatcacatgtggggcataaaggggcatgtgcaaggaaattcgccattgcattgttaatatattgactttattaatgtagttaaaaattagaacaaccaatatacccatctatggaagagtggtacacgcttactatgaaatcctttataagaattaaaaggactgatactgagaaattatcagattgaaggaaactaaggagacatgatgactaaatacaatatggggatctagaaagaatcctgtaacagaaaagactgtggaaaaactggagaactctgaattaaactctaagtttagttaatagcctcataccaatgttaatgtcttagttttagtaattgtactatgtgcaagatgctaatattgggagaagctcagtgacaggaatacagtgattctgtgctatatttgtaacttttctgtaagtctaaaattatttcaaaataaaaagccaaaaagagagagaaaaaggactgatcaagtgatatgctggagctggcttatactggtttacaaaagccaactgtgcacatctcttcccaattccacctccaatgactttatattggcagttgaaattgaccatggcaggtgtatttacatcctgggaattaggaaatgtggcagatcaggctttttgggccagagagcttgttaaacatttatcaacacatcactggatgatctgtatgtactgaaatgaaacaagctctaagattttatgaaaaatattgtagaacaatgcatattctacgatctggttttagtagaaaatatgtatttatatatatttacattttttaaatgcatagaaagagacctgaaaaatgaataccaaactattgatgtttagagtagggagctgtgaaaaccaaaaggatactttgacattttcatagtattgttagaatcttttacaatgataatgtattcatgtattattatataattttaaaataccaggtgctcaacaaacctttgttaagctgaatgaatagtttcattgttttattctatctcttttattgctattttctgtctaaaattgggcttttcaaaacatttcaaagcagcagaaccattcagcaattaaatatgaacagttcccagatacataaaacagataaaacagaatttgactgaaagggattggctgtccaaaagatccaaataatatagtttgaaatctagtggcctacaaaattatcttcaaaatatctgaataaggaaaatttgggtgttgggaagaattccttttaggtatttaaatttattgaaatatctttatagtgctactgtcaggagacaggaccccttttcatgttattatgtatcttttggggttttgtgtccactctcttacaggtaatttttgaatacacctaacaataaatagggctttgataataaatatacaagttaaccttgaaattataagacttttaagacaaatgtaactttgctttcaaggaattcatcttgcaccttgaaatgcaaagatattcagctaggggtgttatatttatttgttgcaagaattttgggtttttattttctaaatccactaaataaacctatttagaaagtttgaaacctatcttacaaataaagtcctgaccattatggatcatgtcctgcttcgcagcatgccaagacaaaagcatataatattttctaagatactttgttttccctttttgtcagcattctccccctactagttcccttcatgttccttcaggctagggaatgctacagctgttgtactttacttccaaggcttgtcaaaactacagatctgcttgtatgttggacagttcccttcctgaaatatatacgaagtacattacccagatggtgacccctgatgacttcaggctttcaactaactcccgtgggaagcaatttcaccagaccgatacttcagtggccatgatgtgagactagatgcttctgcaataaggaatatcactgcaaaaataaatgctacttgaattaaatgcagtgactgccaacattacagaaaccaggttatcttcccatcttaaaataaatcccatttttattacattaaacatcaaattggcatatgagtgaactatagccctttgataaattaccttcagatctgaattttatcctgataataaccatattacatgcaggattgaaaactattagtttcagagaagcatttttcaagaactaaattaaagaagtaatgcatgtttatttatggtatctactattgcctcagcagtttcattcaacttttctctttttttcctagggctatacatatacattttatactaaaaatattatttgtgcttgcactacatcatgaacataaataaaacatacttaaatgtttctttttaaagcaatttaaatgtagtcagtatggttttgaggtctctttcaaacatttttgaaaacccgaaaagctgttgtgtcgtatataggtagaattccctttgaaagaaagaacttcgctaattaaaagaaaaaaaacaaaaggcattttaacttgaactgttttacaaaacacattttgcaagtctgccatgatgaaacattaaaattaaatgccaattaagaaaagattgagatagtataacagagcaatgaggacaccttttttgttgctccacgtgtttgaatccctacttttcctctcctaaatgaaatgaattattctctattgcagcatgcttttttcttttgccttagtatggtgctagttttatccaatactcaggatggaaaagatcctatcagagtaataaatcattttaatatcccagttctgtattatattatcttaaaactttcatttactacgtattttatattttccattccaagactacagcaatatttataaataacatgtctagttaggtaccttatcacaagtttaatatatgatctccatttgcagttgcataacgggcccatctgtgtattccttatcagacagacacaattatttagtggtttcatctcaagtcacagcaccattaagtgctctccataactcaaatcttatttatttttgtattattatttgctttgtggagtcaggaagaataagcagcataatgatgggataaatttaaaaaacagtttaatgaataacgtagcaaaaatataaatttagacatgaatcagtacttttaattcttctttaaaattttattttttttctattttacttcattttctgctcaactaattctccctttctctatggtccaaatcactgccaatcacttcttcattattgatgatgggagtttctcagattcctaaatattctcctactctctttcctggtttgagtacttattggcaatagtaaccaggttcttttaaaaagacccaaataaaacttgtgactatagagagtaagaaatagacatacacagctatctcttcctcttacccatttgacctgtatattatttaaatttttaaaatagaaatgtattcattgatttatatccacaacctctggtagctgatactttgaaactcacttttctgagttagcatcatgtaatcatagccataaatatgtggtatgtgtccttctgcaaacttttagatattggaattttaaaaaccctgtcattaacttattattcacagttaacgttaaggagcagggcttataaaaggctgggaagacaggatatgatagagaagatggaaaacgatgagtgatgaaaaactatgaaaccttctcatctgccttataagatgtgaacagatgaggaggtagagagagtgaagtggtgattataaggacccagtttgttctgggttttctgaagtgacaccatgacagtgttcttctgaaagagtcactaatgtattattcaaatggggttgattcatgatccggatcctcaagtcttctcctttaatgcagtaattatttgttggctggatcctatgtattagacattgtcctagttgctgaggatacaacacttactgtttggttgcaaaaagaactggccctgttggggatttcactctgtgtaaagggaggcagttgtcatatggtataataaagagcagggactctggagccaaggtttcttggttcaaatctcaactctgctgctaactagtgtgtgtaataatcttgggtaagttattctctgcctctcagtatcttcaccataaaatgtgcacaataacaacatctgcataaggttgttgtgaacactaaatgagtcagtatatgtaaagtacctagaaaaaaatgcctggcacatactaaatgcccaataaaggttagcaatcattattaagcctgtttaattgatccctttacaaaaccatcctggaagtggagaaaggtagaaagtcattgactcattgaattctctactttcctgccctaggagatgattgtgtagttgtgattctctgaagagagtaacacagagggcctccggtctttgagagaacttcagctgccatcttcacacagctgtagagttaaaacaaaaacctcacctaatttcctgattccaaatccttgacttaatatacaacagacattcatttatgttcccatccccatcaacatcccccaaagctgcaaatttctttaatttcctttcctctatcatcagggcactggggatctggaagttgtaggttttgggttttcttggtaaaaggattccagaaattagagcatccctaagattttaaaaggtatcatcatttcttagtagagtacactttttataaaggttagcataaagcagttagagtctcattttatgaataataactgataattctcacgtagctatatagtatgaaatgggtcccaagaaaactttcagctgagttacccagcacaagtatgcaatcctgggtgatggattctactctatcaaattgatctgcacaagtaagggaatctgtctgcaacaataaaatcatgctatgttagagctcaaaaagaccacagagtaatccagtatggtttagaaaggagggggccagtacatttaaagtgaagaagcctggaaaacactacctcagctgggttatcatcaatgatagcatgtacattatggcacagacacctgatatgatgcaatgataatggcacctctgtggtcttcctctccaaaagcatactgccagtttaaacataagcacaacatcagcaaaacccaaattgaaggacattaaaaaaacaacctggccagtgctactcaaaattgtcaatgtcatctaggtcagaaaactgttatagaccatgggaagataggaaaacatgacacgatataatatcctattttgaattggatcctggaaaagaataactggtgacatccaaatgaagtgtcaaatgcagttaagagtaattattgatgttcatttcctagttgtgacaaatgtaccatggtgatataggacgttgacaatagaagaaactatgacagcctttgtactatctaaaaaaatatatgagaaactaaatgaggagtatatggtaattctctgtactatctttgcaacttttctgtaagtctaaaagtgttctgcaattaaaaggatattttggaaagaacacaccacacacaagccatttgcctcaatctcctcattttacagaagaggaaaataacacctagagaaaggaaatgctttgcacctaggacacagagagctgacactaggaccctatttttctacctcagtcttgtttcacccaaccacactgattcagtcttacttaaggccaagagaatacgtaatccatttcttcttttcaatgacatttagtactgaagtaatttgactggaatatcggactaatgaggccaatgttataggttaagtttttattccaacccgttacttttgcatagggaaaaattccactatttgtcatagcctgattattcaagctattttttccatcaatctcaggtaagtacataagagagaaatgggaactctgtaaaaaccctccaattcaaaatacatgtacatctgcaaaatctttttataatgacacttaaattttattgaattactgggtcacatgtagctgaagtaaaatacactgtatatattttctactggttctacaatcttttctcttgtctacttcaatcttcttagcatttttgtcaaaatggatcactttgttgtcctaagctttgctcactatttttgaaaaagatgcaagtttctctttaaagaaaaggtaggcagtgggaagttaactcaatttcatatcacccctgaaaaggagtcaaaattttttcttaatgtttcctgaaatgctttaccatgatatcaatagatgtgggaaaataatatggcagtattttagtttcattatttttgtatggtttgaaactgtaattttggattttaaacaatgttaaaatatgcagtttatgttaaaatcttcaatatataaaatttcttataaatcaataaatatcagctgcacctttcaatagaaacatggacaaaagacatcaataggcaattcacaaaaaagaaatggaaattaacagagacaatttaaaatattcaaccatagtggtaattttaaaacgcaaattagaggagtgatgtcaacagtatggcagaataggcatttccagtgcttgctccctcatggaaacatcaacttgaacaatcattcaggctaaaaaattccttcacaagtgctaaggaattcaggtgagagattacagtatctggtggaacacagacataaaaaaagatgcattgaagagtgtaagaagaatagtttagcattacctgcaatactactctcccaggcttacacagcacagtgtggagagaaataccttccatgtggcagaagagagtgaagtaaacacctaacttcactgtagaacccagcaccatgcccaccccagggaaccctggtgccaggctggcacccaatgaccaagcttacaggcctaccctagtgataggcaaggcctcaaggcctgagactccaggctggtccacatagacccaagctccaggccaaccactaaacatggctggtccctgtggctccaggctttaggctagctccaatggactcaggctcccaccccagtatcaggctggttcccacggatctgacctttagtaaagccactgccaacccaagatccaaactcatcatagcacaaggatggcccttatagccctaagctgcattcattcttcatggcccaagggtttaggcctaccctagggccaggccatcttccatggccccaggtaccagtctggcactggtgaacccaagctccaggctcaaccatcattactgacccaggaaccggggtgccattactgacccatgcaccaggcttaccagcccaaggatttcagcaaagccaacccagagaccttccctgctggtccacacagaatccctggacaagctgacaggtgaagagcttctcctggtgaagccagtctttaatgactggagaaggtgccaatgccacaggaatcatgaataatcagggaaacatgacatcaccaaagggaaagcaaaaaacaaacaacaacaacaacaacaacaacaacaacaacaaagcacctgtaaccaaccctaaaaaaatggatagctataaaatgcctgaaaaataattcaaaataattaacttaaagaagctcagtgaactacaagttcagtgagctacaagagaacacagatagacaagtgaataaaatcagaaaacagcacgtaagaaatatgagaagctcagcaaagaaatagaagccataaaaaaaaatccagagctgaaaaacacaatgactgaactgaaaaattccatcaacagcttcaacaatagtcagtgaagcaaaagaaagaatcaacgagctcaaaggcaggtcatctgaaattactcagtaggaggaacgaaaggaaggacaaatgaaaaagagtgaagaaagcttatggtctcttcaagcaaatctgtttttttttttttttgagatggagttttgctcttgttgcccaggctggagtacaatggcatgatcttggcccaccacaacctctgcctcctgggttcaagcaattctcctgcctcagcctcctgagtagctaggattacagggatgtgccaccatgcccggctaattttgtatttttagtagagacagagtttctccatgttggtcaggctagtctcgaactcccaaccttaggtgatctgcccgccttggcctcccaaagtactgggattacaggcgtgagccaccgtgcctggcctcaagcaaacctgtatacacattatggaagtcccgaaagagaaaataatgagaaatgtgtggaaagattatttaaagaaataatgactgaaaacttcccaaatctgaagaaggaaatgaaaatccagatgcaagaagcccaaagaatccaaaatagaaatagattgaacataaagagatatatactgagatattataatgaaattcacacaagttaacaacaaaagagaattttgaaaacagcaagagaaaagtggcctatcatatacagagaaccttcaaaggaatataagtggatttctcggcagaaactctgcaggctaggagagagaggggtgatatagccaaagtattaaaaaagaaaaccctaccaactgagaatattataactggcaaagctgttcttcagaaattcaggagaaataaaggcctttccagacaaacaaaagctaagggaattcatcaccattagatctgctattcaagaaatgctaaagggtgtttttcaacctgaaaataaaggatgctaactaacaactaaaataaatattagaacatacaaaagcataaaattcagagcttgattcagccattcgacaatatatacatattttaaaacaatatattgcttatccctgatgaacattgatgcaaaaatcctcaataaaatattggcaaaccaaatccagcagcacatcaaaaagcttatccatcacgatcaagtcagtttcatccctgtgatgcaaggctggttcaatatatgcaaatcaataaatgtaatccatcacataaacagaaccaatgacaaaaaccatgtgattatctcaatagatgcagaaaaggccttcaataaaattcaacatcccttcatgttaaaaactctcaataaactaggtattgatggaatatacctcaaaatagtaaaagctatttatgacaaatccacagccaataacatactaaatgggcaaaagctggaagcattccctttgaaaaccgacacaagacaaggatgccctctctcaccactcctattcaacacagtattggaagttctggcagggcaagcaggcaagagaaagaaataaaggatatttaaataggaagagaggaagtcaaatagtctctgtttgtggacatgatcctatatttagaaaacctcatcgtctcagccccaaaactccttaagctgataagcaacttcagcaaagtctcaggatacaaaatcaatgtgcaaaaatcacaagcattccatatgaaaccaaaaaagagcccatatagccacgacaatcctaagcaaaaagaacaacgctggaggcatcatgctacctgacttcaaactatactacaagaaaccagcatggtatcaaaacagacatatagaccaatggaacagaatggagacctcagaaataagaccacatatctacaaccatctgatcttcgacaaatctcacaaaaacaagcaatggggaaaggattccctatttaatgaatagtgctgggaaaactggctagccatatgtggaaaactgaaactggaccccttccttatgctttaaaactttaactcaagatggattgaagacttaaaagtaaaaccccaaaccataaaaaccctaaaagaaaatttaggcaataccattcaggacataggcatggacaaagattttatgatgaaatcgccaaaagcaattgcaacaaaagctaaaattgacaaatgggatctaattaaactatagatcttctgcacagcacaagaaactatcatcagagtgaacaggcaacttacagaatgggagaaaatttttgcaatctacccatctgacaaaggtctaatatccagaatttacaaggaacttaaacaaatttaaagaaaaaaacaaccccaccaaaaagtgggcaaaggacatgaacaaacacttcttaaaagagacaaagcaagacacagaaagacaaatactacatgatctagcacacatgtggaatctaaaaatgtcagactcatagaagcagagagcagcgtggtggctgtcaaggactgggggtagagaaagtagggagctgatgctcaaagggtccaaagtttcagttacacaggattagtaaattctcgaaatctaatgtatagcatgctggctatagttaataataatgtatacttcaagattcctctccactcctctcctctcctctcttctcttctcatagcatgctggctatagttaataataatgtatacttcaagattcctctccactcctctcctctcctctcctctcttctcttctcatagcatgctggctatagttaataataatgtatacttcaagattcctctcctctcctctcctctcccttctcttctcttttctcccttcccttcctttcccttcctttcccttcccttttttttcttttcttttctttcttttgtccaggctgacatgcctgggatgtaggctcactgcaacctccacctcccaggttcaagcgattcttctgtcttagcctcccaagtagctgggattacaggagttttcttttattttatttttcttttatttttttttaaaaataagtacaatttccactttatttttctccagagagtagttttccttcagtctgtaaggactcagctccttacaggggccttggttggggccatggggaagaacccacaggtctaaatagtggtaggggtgtttagtccttgcaggcttcacgagatcaattcctgactaccttgctgtgaatggtacaattcgcacagcaatatagcttcacatacagcttgggaaacactgtgagcattgagggctcacttcagaaatgtccctcactgctgtggcctctgctatgtttttaatgacaaacttcttaatagccttattcctgggcatgcattgagcacagttcttgcagtgaacaggctgcaagtgaatggcatgaccattgttccttctttcctttggcattttggaagcaaggatcctacttgaacatttctaagagagtggatcttaaatgctctcatcaccgaacaataaaaggcaactatgagggtgttagacatatgaattaatttgattatagtaatcgtttcatagtgtatactgtatgaaaacatcacattgcgtaccttaaatatacacaatttttgtcatttacacctcaatatacctcaataaatatggaaggaaaatgcaaactaagacactgaaatacccttttgcctatcaaaatggcttcttttcttttttataaatgatgatgtcaaaagttttccagagttcagaggaacgaacaccctcacatactgctggtagtgtaaagtgttgcaaaaatgtttggacaaattggcaatatatatccaaagtgttggattttttaaaaaatatttttatcaagccatttaatgtttagaaatttatggtaagaaaaaggtctgaatagatttaaaacattggtattcagcgtattgtatataatagcaagattttgaaaattactcaaatgtccaacaaatgggatcagttagacaaatgactatatacaatagaagatcgtgttgccattaagaatattacagaaaatatttcatgatagagaaaaatgtttacaaagcaagtgcaataaagcagtatataatatgagctccattttagaggctgtttagtgtaataagtgagggcacaggctctttttgtgtcagacagattcgaagagtaatggctcttctatttattagctatgtgatgttgtacaagctcctaagctctctgagtctcagttttcctatatgtaaagtagaaataatacaataagccctccttatcagtgaggaatatgttccaagacccctaatggatggatgaaaccacggatagtaccaagctctacatatactatgttttttttttcctacgtgtacatgcctaggataatgtttaatttataaattaaaaagatgaacaataataacaaaatagaacaagtataacaacataccatgataaaagctatgtgaatgtggtgtctctctcaaaatatcttattgtatgtaatattttcagaccatagttgaccatgggtaactgaaattgtaggaagcaaaactgtggataaggcagtactattgtaatacctaatttggatgagactatgattatgcataaagggacctacatgagttaaagtagaacacatgcctatttctagaaattaaatgattaatttttccatattacaaatattaaattctttttgttgttgttcagtgtataatcaattaccaccattcttctttctgacactcaaatttggccaaggggaatcccttcaagttggctcctgtgtcattttggcatgcctgaacacttccttgctttctagcacaagatatcccaggcttaccttatacttactttccctgccacagacctagaaacagccaatccttcaaggagattttggtaggaaatgtatttagaaatcaaagtttgggtataaggtgtattaattactactgaggtgttattgcttttaagtcctttcagaggacagactaggaatatacaaacaaataaaaaaatttttagattttataacctgctttgttagagtgtgtgtgtgtgtgtgtgtgtgtgtgtgtgtgtgtgtgtgtatacacacatatatgtggattgctacagtttggatgtttgaccctccaaatctcaggttgaaattggattccaaatgttgaaggtggggcctaatggaaagtgtttgagtcatgtgagtggattcctcataaatggtttcgtgctatcctggcagtaataagtgagttatcttcttgttctactagttcttgcaagtgctggttgttaaaaagagcctggcacctccctcttctctctcttgccttgtgatctctgcacacactggctccccttctccttccacgatgagtggaagggctttgaggccctcaccggatgcagatcctgtgctatgcttcttgtaaagcctgcagaaccatgagccaaataaacctcttttctttataaattacctagcctcaggcattcctttatagcaacacagactaagacatgcatatatgcagtttaaaagcacaagctcatatatatatatatatccccaattctaatccaacacttcagagttcttctttctcattccatatttttatttccttttccacacaatgaaccttgttcccagtaacatcaatatatttacctgtttgcttatcctataagatgcacaaaacagtattggaattattatagcaaaaccattactagaaatgagcctactaagtaaagttcaaattttgtgtttttgtccttagaatatattcccctgagggtatacagttagagttatgtattcaaaataatgactcttcttaaactcttaaaatttgagacaaagaaaagaaaaagaaaatggaaaaaaaggcaagagatatgagcacacaggtaacaaaaaagatccttaaaaatatgaaaagatagtcaaccttactttttcttaagagaaaaacaaaagaaaactacactaagacgtcatttctaacctgtcaaactgacgattcaaaagcttgcagcacagtttgatggcaatgtccgtggagacgtaaacacgttcatacattgctggtgggtgtacgaaatggctcaatcattatcaaaaagattcatgaaaagttgccacttacagttttttacaactttcctctgtttcaatggttatttctcctcatttcttacttcgtatatatttccccttttctcttgatttcagattatttatggtctgcctacttgttaatttttaacactattttatttatctttctattatttttgtttcctactccattaatttctgctatatctttcttatttcctttcttgtgttttctttttattgatttttcagatttgttttcttttattgatgtgaattttcatcttatacaaggtttaatagtaatttaacatgtggtgtgttcgttataatttttcttagatattttaaaattttatgttttatttccccttatacacaagaattgtttaaaatttaaaaaaattacagatagaagggcttttctggtatttaaatattcttattaatttgtacgttcatttcaccatgatctggtaatgatgtttgtattgtttctaacttatgaaactcactgagttgttacctaatatttgctcaaattttgtgaatgttttatgaaaccttgagaagaaggtgtattctctaatatcagggtgtttaagttcaatacatagccatgggatctatcttgactaaatattctcccttataagtgggagctaaacattgagtacacatgttcacaaagaagggagaaagagacaccgggaccaacttgagggtggagagtggaggaagatgaggatcgaaaaactacctatcaggtactatgcttattacctgggtgacaaaataatctgtatatcaaactcccttgacacaaaatttacttatagaacaaacctgcacatgtacccctgaaactaaaagttaaaatattattaataattactattataatacattaaaaaggatctatcttactgattttgctttcttaggtcttcttctatatatttactatgtttttgtccacctgacatgtcttgaactgaaagtggtgggtcaaaatttcctaatctagtagggcttatgagtacagtattctctgagttcttgcatgtttaaagtatttttctagatccttaataattaaagaataactggtttgaataaaatccttggctcatactctttcttgagttatttgaaaattctggccgggcacggtggctcatgcttgtaatcccagcactttgggagtctgaggtggacggatcacctgaggtcgggagttcgagaccagccttaccaacatggagaagccccgtctccactaaaaatacaaaaaattagctgggcgtggtgatgcatgcctgtaattccagttactcgggaggctgaggcaggagaatcacttgaacttgggaggtggaggttgcagtgagccaagatcatgccattgcactccagcctgggcgacaagagtgaaactccatctcaaaaaaaaaaaaaaaagaaaaaaaaaaagaaagaaagaaaatgctgctctactcttaccttgctttgtctgttgtcaagatgtctaatttcaatctgattttctttcttttacaaatgactcctcccactaaaaggcccagagatgattataaataataattgaagtttaatatttttagtagcacatgactaggagttgatagttttgagtcagtttttgaaggtacttggaggtaattccaaggtattaaaggttgtgcccttcaatacttacagtcaggcctattatttctggaaaattttctttgattatagttttaaatattagttttatttcattgttttgtttttcttctttgggaaccattaatataattatatgtagtttgtatttatttgactatcttctacagcaattattttctctgatcttttcttaaacttctttctttatttcaatttcgttccctttgctattcaagtgcctttcatcattgcatctttttcattttaatatcttttctcccttcgtcatcagtcagtatagtattcattttcacgatgggtttatctttttcttcaatttattccctgagtttagtcaactctcattttgtacatttctgttctgagttttaaactttatcatttgagcctttttcatatcttcaaatgtttgtttaaggcttattaggactgagatgttttattgctgtttttttctgctttggggttggctattagaagttttttttttaatcaaatgaaatgattaattcttattttctagttccttcttatagagctttgtgtaggtgttgtctcccttttatgttcattctgaaatattttagtttcctggaccagtaataggagttgtatgtaaataggaatcaggagtttggtgacttgttagattactagaattattagttcttattaaagtgtagcttttaaaatcaataatggcttttggatagggggtttggtaggtcgcttaattttgtgattcacttttatttttgctgtatcctgaaattatacctcttgctttcttctttctcttcaccaccaagcctccaaaggacatctcttccaagttaatgcccccatgccctcagaggttgtgccttcccaaggctaccaactttacttctgtgaactttaaagtacattcctttccattttcagtagccattgctctcatatgccaggtctgagattgttcaaacagttttttaatgggagtaattcttctttttaatgggagtaatttgatcaagtctgccatagctgggccctagctctcatgtcttcttttccatttagcctctatctgactctcagtcctggcatgggctacagagacaactctgagtaatttgggtgcttatttctctacctatgtgtaatctgaagtttgtagaattatctatctcctatttatgttattgagtgggttacaggtggttttacttgcttcccttctgcatttgaatttctttttgaataagggaatggagagatttggatttaaaaggccaatgttaccctatgggaacccagaactcactgttaatatttatttttacgtttatataatacatatgcagacacacatacctgaacattgtgtacccagtatctataacacattcatttgaaacaagtctctaataatgggtatgaaatataattttactgcatgctgttctttacgttcagttccatgcatctatgagagagtcatccatggttagggccatgatttgtaactgtggataaatccaggtgtactaacagggtgactgtgttgtattcttaggcatgttttcctgcccttcacataatttctccacctggatttttaaggcttggaaattcatagtgagtatctcacttctttggcttaaagtagtgatggcaaatatatttcaacttctgagttgactctaattgcagaacctagacttttttagaattaacactttgtctcctgataaagtgcaaattacgtaacggagatataatacacttatctttgttatagccatttatacctcagtgtgagttattttattatgtggcttcaggcttagatatctacatagaaggaaggcagataatataaaagagtgaagagggtaggatgggtattcgatggactggagcgttcatggtcctatttagccccagttgatggttctcatactatttttgccacaacaaagactgaaataatacttgacacatagtaggtactcaataaatgcatggggaaatgggagaatgccgggccagggatgacagatctatttttaaagagaaacaagacattttatgtaaaacctcttgacctaagattcaattctgaattcaggttttgttaggaagtagaagacaggactaagttcctgatttggggagggaaacgcaaagggagattgagactatgggctttggtaatgaaacagaacagaactgaactgacagattgaaatagtaactgagcccatgacctcagcctcattagcgagaatgctactgaggcagtcagtgagtaatccaaatatttttatttctttcctacctactcaaatcacaaaagacatatgcactgtaattgcctataaaaaagaactatattctttaatttgctatgcatgctaacaatgaattatgcttcttttaggccaaaatatgtccctaccactggactccacagtcttcattttttgaaagtctatttaactgtgattgcccattgaacctcttatttttaaaattgagggattttttttttccttccagttaatgggttatacatttaatagttcattgattcaaaagactagattgttgcctatcagcaaaaagatttatatgatggctaacccaagttatataatggcagaatttgttcagagaaaccaaactaaaaacatacagaggcaggaaaagaaaccaaagatactaatggtttgtttgggttttgtacaatcttagaacaggctgtgttttaggcatgacaaagaaaggatctatttgtaccatctggctttcaatactcccacagtctcctatgttggtaaatcttaagtagtgctatctctacaacattctatgagataatattggagcatgtgctattatagcctggagtagcattgaatatttccagtcctttacattttcccactggtataagaactttcacctctaaagagccaaatagttcaagtaggttcaaaagtcatctgattcttcaactacttatcgactgattgaggctagatttaccactacaatcagacatttaaaaagaaaaacttcttgactctctgctaggtggtacaaaaaccagtgaactatttgttagcttcagaggattagggttcaataggtttctatgtctggaggtagcacatgatctttaacaaaaccactccatttcaaaaatttccactttctttcatagtgcaatatacttgttcctagtttcttgacagctggtatctctctctctctctcctctctctcttaagcattgtacaactagtattggcttagctgcttgttatgagtaaaatccaaaatcttttatctgctctctttatttaatattattttcatttaactccataattttattagttaattctgcaaagtatttgtggatatgatatatataaaagactgcattattgttatttgccatatttaatatctacgcttaattaaaattaaagttcaaaaccaaaggaaatgtagattcataagtgaacaaagggtaaaactgaattaagaacgttgaataatgggctatttgatttaatgaaacctatgactaccaaagagcaaagtctttgtctgtgtagcacagaatggttgcagtcaaaaatcacatttccattcatttttgaccagagctgcagctagtttatctgagagctcaaccacctcctctggtattctatgtatatatgctagcctacagttccctgatcatttgatcaggaaagctcctttaatatgagctaaatgaaatagaagcaagagtgcttttcaaagtgccagatcatatatcttttcttcctgttaagaatttcccattgtcacatccaacccaataatcaaacatttgtgaggcccttccttagaaactcttgactaagcaattaccctggaagttaactataacacagtacacaaggtctatgttaattagactggcaacgctttgatgaggctttgacgagtagaaaattacagtgagccatcttggatcctcttaatttgttcattactgtcccatagagaggagtaggagccccaaggaaggtgttcctgagaagttacactgtaatctgaaattccacgtgggtcttgcctgtatggaggatgcaatacaaactagtgctattatttaaatgctatctgtactttggtgtaatttgttaatgggcttgtaagtctacccaggaaagactactttgtgggatcatacctagacaagaatctagccttccatgaacaaatgacttagtcttagtacttctttattgcccttaaaaattactgaagatgccaaagagcttttggtgacatgagttatatctacattagaaattaaaatggataatttttaagtatttattaatttattgaataatatatagataccattacattttaacataaatgacacattttgtaataaataattatatagtattttgcaaaacccaaaaaattagtgagaatagtggcattgttttacatttttgaagttctctttcatgtttggcttaacgaaaaacaggcggactctcatagctacttttgcatgtaaattcttgtgatttcacatgtcatgtggtctctgaaaaactacactgtacactcctgagagaattacagtaaaagagataaataacacttttatggtattatgaaaatagttttactttatagatgctttgacaggtcttggaattcctagtggttgctagacctcacattgagaaccactattttatcttcaccatagaatgttttcttccaatctttctagttgtttcttcatagtctgcttagcagattccttttccctgggcttcttgaacaccagtatttcccagagttcaagtcttcatactcctttttccttcctactcctacgattttggtgtcctcaacggtagttacctccaaagtttcagcaccaaatatttaataatgttctaggtatctctacctgtaggtccattttcacccttaagcctcttccttccatttgctatctatcttgactaatagcatcaccatctacccagtccctaagccagataacaacattctctcctgatacatcttattagtcactaagtcaagtgagttttatcatttaaatatttctccattccatctcctccttctccattaccagaagtttatgctctcactatcactaatctgtattactaatatagtcttctaatttatctccatgttttcaattttacaaacccatcgtcctgcctgccaaacccaacttcaatactgccattagggtgatttttctaaatgtaagtctgagcaaataattgtcttgccctaatgaaaaaccacaacaactctccatttgttctgggaataaatttcaaggtccttaccatggcttaaaatgccttccataatcagctcctgcttaccgtcttcatttcctgccacctttctgtatctttccttttttgcttccccaggtattgcaatatatttgtatttattaaaacatactatgcttttcaacctttctgtgaagcaaatattgctgaaccctaaatggataagcctccaccctgtaagatgccacctgttagtgttgactatgataaatcagatattttgttggtgatactggccctccccactctggctgttctagataaaaatttagtcatatttctgaagtttaaaatgggttaacctgccatctgtttaaaagccattgctctaatttagtttattcttattcacttcagagtaagtatagcttaacgacttatgcaatgtggctctaaaatattcacatatctatgtatgcactatatatacaatttgggtggagagaaactgagttaaacaggagctaaatttcttctttatgaaatagaattcaagttatttactgtgaagtcatagatttcttgagagattttttttttggtctgagtttgcatgattgattcttactgttctaaaatgtcttaagcatgcaaaactccaaaatgactaacctcctgtccagtccccctttattatgcctaccagtagatctttatctatttcacagagtctcattttaattttcctagccgggctaagaaagtactgtatgagaagtacttagtagagtgattgcctctccttgagacaataatctcttgatgcaagacatatatttagtatctactacttgttcacccaataaattatttctcttactctgtgtcttaaatacattctggagttctaagaaaaaaaaataagtgcagtatttgcctttcaccaagatgcccttagtctgaacaacaggacctaactctgattctagaaattagttttatttgacatggattcatcatgtcattttagtatgtttaatttggattggatttatacttttatttatgacaggcaagagtgccacttaacatggtggggataaaacttatggaatatattataccaaaaggtgatgtaagaagagtctataaatcttttttaaagaaaggttctggtaaatgcatggatagcagatttgtaattagactgaagtcataccaccattttccagatccctgcttagagacattgctagaaggttggtagattcatgaataggaggaaaagtcaatgctaatataaaaactgtcagtattatcatgattgggtctataagagtgaattggaagaagtaataagtattaagcatgacagcaaaaggattgataacggtctataggataatgtgaaatgctttttagcattttatgctgagtcatttcttgaatgttataagctgtaatgcattttaatgaaaacgtgtttcaacctagatatggccttcagataaaaatacaaaaccatttgaagggtcaaaacatcatagaagagggatattagtaaaataaaggcaaagtgacagctatttcagaccaggcagaaggaaacaacaaactcattagaggattcttgtgagacagacattcatgctctgaaaaattgttttagatgactttggaaagaagggaaacaaaagcagttcatgttaggatgaattatatcctcattacccttaccccagctcaaactaaataatcttcataataattctatttcactaataattatcattaatctttattcagctgtgctaagcaatgtcctgagtgttttacaagcttcaactcatttaattataaagacaatccttgaagaaagtattatcaacattcccattttatagatgaggaaacgtaggcacagaaagattaatgaagttgctagcactataagtgaaagagttgggctttggtaagcatatttatctacatttagcaaatactgtgtgagggagcatttttatatttagatttaatggggaaaaaactccatttctatcctctctgttaaaaaaaatctaaattcttgaattttccaaagtcagcacatgccacagtccactttatgtcttccctgtatagtgaggtatttgcactttctttttgaggcggacaaaatgaacacacaccactcctttcattctattattttcagcactcttttactccactgtagtaaacccccaaaatagggcaatttgggccagtgcaaagaggcaaaaaaagcacttgaatctatgttattgaattttgctgcagagagcaacatgaagaaggccctttgccctcttgaatagtttcatctctaacctttggatcagagaactgggtacaaaactctatctcttctagttctatattgttaatatccattgtggtcagctttctacatgtaggctatatagtatgtcatgacaagatttatggactgaaattatttcatctgcacagttggaatactacctgtatcccctgaaggtggtatggattgctactaatctcatggcaaaggaaaaggatcatccatgtcattaactaatgataatgggtacgagagccagaaacccctactcttcagctcattcaatgtaacagcgcacttgaccccaggcacaatgtattcatgtgagtttccatgtatgtgagattctgtagcctcttatacaatctgctgactgtgaagaaacttgatcaaaacatcaaagattgccagagaagctgtgtttgtgcccttcacaaccactgatgaagtaccttaacctcgccttctcttgacaccttgcatatggtcatctgtcttcctgactactacttcatatggcttatttgtaaattcaagcaaatgtgcttctgactggcactgatacatcactgatgccaaaatatcagaaaagatgaagcataaggacatactttttgattcagatggaaaatattacagatttacgaggaagtgatgacaatagccattccatgctatcttcatataatcagtatttttccatgcctctcttcaccaacttttttgaactcaaaacttattcaaaggaatgatttttttccctgatccaaaaggtatagtgggtaggtgtggagataggactggttggctgaacaacccagctctggcttttcacgtgctggatttccactgctttccaatgaccacttacagagctataatgcacagaatgactattgatgtcccattgatatcgatgcgatttcccctagtggattgagggcagcacagcatacagccattagtatctaaaggttatgtataatggataatagaggaaaatgaaatagcagaaaggaatttgcatgggaaacagaagcagcaagtagtttcagtgaaagattttacttgggttatacagcaactgcaaatggggattgaaaaaaatgatgacttacagactcagcaatagtcgagaatgaaatggtttcatattttgaaatataatacttttttatttcaaccacagaaagccatttaaaaatcatcttgtatattacagctcttatgtgctatctttcacctgaatgcctatttatgaatttttactctatccttctgaggtggtcaccaatatggcacagatgggataaatcaagagagatttttactgacttatccagtcacataatgtccagttcatgacagaaccaggaacaaagttccagtgtttgccataaacatcttctcatattgaacccactcaagttactgtgccagcatttagcctgatatttctgcatctaaaaaatctcccagtaaatgatttcaacaaatattgcttaccaatcaaccaatcttagtggcactcaccatgggaatagatgacttggtatatctaattgaatttgtaatttaataagaaaaaatatctggtggatttattcagtagactgagaagtaaacaagttataaagtttacttcagtgctagaagagcagcaaggcctagcactcaagagtcagtctgctctggcttgaagctcagcatccttatttcttagcaaggcaccctcttaatctcaaaagtggcctctatgtgacctcttaactttgttgagcctcagtttccccatttataaaatacatatgtattgatacctatccttaaggattgttgtgagaattaaatgtgctcatacaaggaaagagcttagcataattcatttttttccaacaaacttttactgaaagggcttacacgtgccaggcactgttcttggtgctgagatacagccatgaacaaaattgttaattctgggaactagtgaattttaatcgtgaataataattatgatggtaacaatggtaatattaatgataatatttaacatttataggctacttactatatttcaggcactactccatgtgctttacttatattaactcatttaattcttctaacaatcctatgctataggtacgattttaagcctgttttacagatgaggaaatggagacctgaaaaggttaagtaactcacccaaggaaacacacctaataagtggcagaggtctgaaaaatctatgttaataactattgaactatactgtcttacttccatgccaaattgatatgccattgtttattctattaaaaaagacagtccttgaaataactgaaatgttccacttttgctgatgaaatgaataaacatacaactgaattaaacaagtttcagaatatgtaataaaattttgatatgggagtggccataataataaatttaaatagaaaattagtattaaacatggtataaacctaaataaagagcttgctattacttgagcttgtttacaccaagggttaggccttgtatctaaaacattatctctctatatagtaaaagttaatagaaaataacccatataaaagtttatctcaattgagcaagaccattttaaagggactctaatgtatttaaactttttatattattccttgttctcaatgatatatgaaaatcatgtttgagttgtagaactttctcatccttcgcctccattccttcagcagtatttctcattacaggtcaccacaaaccaaataaacacacatgttgggttatcctgaaatgtctgagataaaagacacagttttgatattatagggtaatataatccatgttaaatagaagcattgttcaaatatattcagcttgtgtgatgaaaatataaaagagagaatcatgaacatcagcgcaggctatgatcctatactgtttacatcatcagtgacctccctacaaaatatagccgtttatttacttaccatccactggtctatgatgcccacacaaactcattatgtgaacttttagattattctcattttagataaatgggaatcaaccaaatgtactttattacttaaagaaagtctaagtctctttttatctgccactcaaaatcatattcattgtctcttagtgggtaaatctgcttcaaataggtaactggggtaaacctgaaaataatttattagggatatacttggatagactttgttttctacaatgacattctattccttctaggaatagtgctgccacaaaatacacacatttcttaagtcagtttacattttagactgcagaaccactcaagaaagtaaattaatattcagtcacaataaaatgacatccagaaaaatcaatacaatttgctaccaaatgagggtgactttaatcagggtgactcaagaacaacaacatttttcctaaaagtggaaagagcaccttataactgctctctgctttacttttcaagacatagtaactaaacaattttgcagtcatttacctagtgaaataagaatacattttttggtcacagtgtaaaaatctgaattcttgggaagaaattatgtactgaattttctgatagcttccaaataactggggctttaatgaaattgctacctgaaaattccgtagcagtattattgtttaactgtaatttaagaagctattgtagattggtacttatgacttctaatgggaaaaccataacaaccttttaattgaagggaaaatggttaactacagtaattgcgatcaataagactgtgttagtagtataaatatttcttctcaaagagcattccttactctcctcagcagtatttaaggttaggaagaaaaaaaaaaaagaagaaaatcaatttgttatcatactaagcctaggtccaaatgtgtacatgccagaatcgagagaaaaaccccccattcccaccacaagcaaaacaagactttgattaagaacaaaactgaggcatgacaaaaaggacttaccaatcacataggctagtaacaaggccaaagtcactgtgattgcagtggcgctcaatgctgtgcacttccagttgcagcacctgtaaggtttgttaaaggtaaaggcaggtcgggaaaaggtgcttcgaggaagaggcctgggagggggcgagtacacggtattggatgtcagagggtagttctgactggctgcactgaagatcgcagaggaaccagatccatgtttgaacaggaaatgcctgtgaaaaggaaacacaagtttgggctataaaaagcaaagccagttgctacaaaaacacaaactccattaatttcaaacaatcatgctatagccaagctcaagagaactggatggagctcagcaacattttcatatacctaagagataattctaaattgcccttgttgttctctctcttttctttgtctttttttttcttttttcatctagacctttaagaaacaggccttgtgttccccgatttgctggctagtgagtgctaacattccacatttggtgttacacactacacccttccctttcattaaatatgatcatcaagagttgattcaaaaacagagatgcatcattaggcattttgatcattagaatggcctagacaccagtgtttgagattatcctcactaccaaactttagagactagcttcacagccatattttcattcaacattttattataaaaattatcaaatatacagccaagttgaaagaattttataataaacaatcacatactcactaactagattccacagttagcatttgactgaactcactttgtcacatacttattcatttctccattcttctctccatctgtcagtttttagttttttgttttgttttgtttctgtttctgtttgtttgtttgtttgtttggttttgttctgagatggaatctcgctctgtcaccaggatggagtgcaatggcatgatctcggctcactgcaacctccatctcccgggttcaagcaattcttctacctcagcctcctgagtagctgggactacagttcgcaccaccacgcccagctactttttgtatttttagtagagatggggtttcaccatgtcggccaggatggtatccatctcttgacctagtggtccgcccgcctagcctcccaaagtgctgggattacaggcgtgagccgctgtgcccggccagtttttagtttttaagcattttgaagtatgttgcatacatcagtacacttcccttcatatattttaactcacatattattagctagtttgatagttttacaaattttaatgtaaaatttatgcataataaaatgtgcagttttatgtgcacatttgctgtagatttgacaaatgctgtcacctatgcaacccaaacccctatcaagatgtataacattcccatcaagacaagaagttctcttctgtcttttctaggtaaatccctatttctattcccagagaaaaccactattctgcatgtttttgccaccatacatttgttttgcctcttgtagaacttcatgcaaatggagtcatgctactgtcatgtttgaattactaaagaatgattgttgagtgttcatgactattgtaatatgggcattttgtaaacagtagtaatgtattcacatggaaggagttgccaaaaacaaataaataaataaataaaattgcatatacttcttttatacaacaaataaataaaagtacttttatacttgctaagtgccaagtgttgtgctgaacactcattagtatctcttttgctctttactcttatgaaatagtctatattattctcattgtgtatttatagaaatggagaccaaaagaggttaaacaacttgcccaaactcacctagcaagtgaaggacagagccagaatcagaatctaggtcatttggggttccaaagtccttaatctttttttttttttttttttttgagacggagtctcgctgtcacccaggctgtagtacagtggcacgatctcattcactgcactccagcctgtaacttccagatctcactgcactccagcctgtaactccagctcactgtaacttccacctcctgggttcaagcaattctcctgcctcagcctcgcaagtagctgagaccacaggctgccgccctgcctggctaattttttgtattttagtagagacggggtttcaccatgttgcccaggctggtcttgaactcctgagctcaggcaatccgcctacctcagcctcctaaagtgctaggattacaggcatgagccactgtgcctggccaatcattttttataaacttttttcttttcttttttatctttaattgacatatataacaattgtgcatatttatggggtacatatgagacaggaataatatagtgtggttgcaggagaataaaaaaattccaggcagcagtttcacatgattagaggctatgggctattaagaccctgaataataggatttgaaccaagctggctaagactgactggacccaacgtggtgcgggatttgacctaggtttcacctcggacttcattatatcctcattaacatactaaatcacgcaacccaccagcaccatgacagttccagaaatacccatgtttggtgtaaaaatgggtggcaccacagttccgataaatctccacctttttacaggaattttcatgaatattctaccccttgaataaacaaaccccaaaaggtagcagctccaaacccccttgtgggtgattctctcttgagtacacttatactcccttttcttgagtgtgtacatttccctttgcaataaatgtccatacttccactattttccaacttgtctttgagttcattcttgcaacagtgtcaagagcctggacaccagctgtggccaagatcccgccagcatttggggacttcccccagcctaccagcatcacatagtgttgtttcaatacatatacatgtagaatgagcagatcaggataattagcatattcatcaccttgaccaaagtctttaatcttaagcagtctaccgtattacctggggcagtaaaataacaaaacacattcgagtgctacattttaatgtacaacaaaaaatttcactaagcataaagccaacatcaccttgtacatgtaatgtgtgcacaaatgcataaattactaacattattttaagactgacttctagcttccatatttaaagaacaaaagcatatgtatttaaagggattaaaaaaaccctatatgaatgttaatggaaaatacccacaacagagaattttgcttcagtatcatgaggttaaaaattttttaaaggactgggttgctgaggggagtacagattcacaggtctttctggagggcaatttggcattatgtatcaaatgactttaaaaatgcctattctttgatgcaataattatggctataggaatttttcctcaggaaatgatgtgtatgacaatccatataagaagccattcattgcaatgttatttataatagcaaaaaataaacatctaaatgcccagtaattgctatttcattaagtaaattattttataaacacataatgtagtactacacaatcattacaaattgcgtggcaaatgactgtctattcactgggaaaagtgtttacagatattaccaagcaaaaaaaggcaggcttcaaaagagtatgggcaacgttattcaatttttaaaggaaaaaaagtacatatgttcaaggaaaataataatttatgttacctttgtatggtaggggtattttctgaacttttctgccttgagcttgtattgattttgtaactaagataaaaaaaaagattcatgagtattagggagtggaaaacatttacaggataacaccaaccacaggaatagttggttccatttaagttaacgtgatttattgagcgcctagatgggccaggctccaagttaggcactttgtctccaattttgatccttatatgtctgtgaagttgatactattatcctaatcttctagatgactgaactgagacccaaagaggtttagtaggagtagagcggtgataatagtaattattataataatgttagtaagagataacatttgagtgattatttttgacaggcattgctctaaatacttcacaaagtattatattatttaatcttcataacaactttattacagtcgatatctctattttacagatgagacgatctaagcacagagaggttaagtcacttttccttggccccacagctagtaattgattaaactgagtttcaaacccaggcagtctggctgcagagccactgctcttaaacaatatactataacatagtgtattgtttgtgatgggaatacaggcctgttgaggcatagaataagtatgctttgtgttgaatttggcatgaggatgatgtttaactgagccacactattacattccttttctgactaataacaagaatgtgagaatgatggctacagaatcacagagttggaagggacccgcagaaatcatctagtagcccatccctctcattttgacgttagggaaactgaggccaagagaatgaaactttcttacttaaaaataacatagctagctaataggcatggatgaaactgaaatctggggcttccaaaatagtgtatttacattaccccatgctacttgacaaccacagtcttcaccagattagcatcaggttctaatcatctgggttaactgacctgggcccaacaaatactatctgttcaaacagtactacataatacacatctattcttctgtatgtcaaatgttcttctagtaaattttaaagactgtcttaactattttggatgaatgggtaagcattacaaagaaactaccctttagttgatgaaaacctaaaagagttactactgcttctaaaggcacctaatttatccccagaatgaagaaacaatataaaaataataataagattaagtatattttaatgaataagtgactcttagttgtcctcttttcatttgattgtgctgttactttaaggcttttaaataaataacctcctccgcaccataaaaagatgaatttcttttttaatgtctgcttaactctcccagactgtttttttcccctttgaccatttcatttactagtgagcaagaagtgtagcactatacaggcagcgtagggatgtagcctccctacctccccactcctgccctgtggttactttggaggtgacaaaatgtcacatattatggattcgatgcagcaacactctgatatggtcctatgggacaaaggagaaacccagcagaatgaggttcctttacttaatgtttggagataaaatcttcaatcttttgcacatttatgaaggagaataattggatttttgagacaatgtaagtgttccaatatgttggatattgatttggtttggtataatattaagaggtggaaggaaggaaaacaaaagacagagaattgttggctattatgacggcaattacaagaataatcaatatccctgagccctgtaatttcatcctgatgtacaccaaaggatttccaaatgcagtttcataagtaaaatattacagcataatgaataaattcaacagttgcagcagaacaacatttaaactaatttttatttgagtggaatccaaatcacggttctcaatgagggtagataataaaatgagttcatgtactaaggttcttgttttcttattaacaaactcagattaagattctatgctgaaagtgatctgtactttgttgtgaaccatgaaaaagagcaatgcaaatgacgtgttttgtcataggctttgcagtccattgttggaaagtcaaactagtgcctaaatgtgttttcatagtccctgaaagaagcaggagcagaaagacaaatgctcagtgctagatgttagctatgtgctcatacaatcagatcatctgtctaagcacattgcttttccctggggacctgaggatatactaaaatgttgctatcaatttcatacaattgggtttttttccacagagcaaatgataaaaatgcagttcaagagtttatgtgtaagtagtactcttctttgcatctgttttaatattcaagttcaaatttaaaaaggaaaggcaagatattaccaaaaggaaatgggcatataaagaaattaaaaaaaaaatcttcaagaatgatgagacccagtggtggtaaatgggaatataataaatgcccctgtaaggattttaaaatcatctataaaaaaggggaaaatgtgctctctatttttaaacccctcatactacataattctgagggtatctgctagcactaaataatgtgatttaatgtggcacttaaaattctataggaaacagacagaaatctatgactttctaacaacagatgcataaataaccaatgatttttttcttttacatcttgtaaacattcttatgagacgcatatctatacctatattcccttagctataagcatctgactcatttttgtacccagaagaaggaattcaacttgcttccagtagaagctgaggttgggtttttaaaaacaagaagactagaagttaataggaccaaaccatatttggatagcatagtagaatttaggtatttttttaaaaaaacaaattataaaatgaatttttattgtgataaaaagcatatggcataaaatttcgcatgttaaatttttttagtgtatagttcagtaatgttaagtattattgacatggttatagaacagatctctggaacttttacaccttgcaaatctgaaacactatatccccattaaacaattgttctttccatcctcttccaagcaaccaccattctatttgtttctatgattttgactactttacatacttcatataaggggaatcatacagtatttgtgtttttgtgatttatttcacttaacataacgtcctccaagttcatccatgttgtagcatttgacaggatttccctcatttttaggccaaataatattcttttgtatgtatgtaccatattttgtttatctattcatccactgatggacacttaggttgcttccacctgttggctattgtgaatagtgcttctgtaaacatagaaggtgtgcaaatatctctttgagatctgctttcatttattttggataaatacctagaagtaggattgctggatcatacagtagttctatttttacttttcggaggaacttccataccgttttccatagcggtttctactttacaacaccaccaaccatgtacaagggttccaatttctccacatcctcaccaatacttgtaattttccttcttctttttttttaatagtaatgattctcatgggtgtgaggtgatatctcattgtggttttgatttgcatgtctctgatgaatagggattttgaacatcttttcttttcttttctttttcttttttgtttttttggagacagagttttgttctgtcacccaggctggagtgcagtggcacaatctcggttcactgcaacctctgcctcccacgttcaggtgattctcctgcttcagactcctgagtagctgggactacaggcgcttgccaccatgcccagctaatttttgtatttttagtagagacggggtttcaccatgttggccagggtggtcttgaactcctgacctcaagtgatctgcccacctcggcctcccaaagtgttgggatgacaggcgtgagacaccgcacccgcccttgaacatcttttcatatgctttttggcatttgtatatcacttttgcttaaatggctattcataggtatttattctcatgcctccaaaaaacacaagaaaatgccatgctgggtcagccccattttcttctctaacaagaatacttagagttgttttgtggaaaagagtcattactggcaaagatatcaacctcaacatctctactaacaactatataaaggagaatttcattttatttgccctgtgattctttcttccaaatactaagccacctctgtccacatattgcttctaaacctcggacgccaagtgttgataaaaattccatgctccgtccacatcgttcataattttaagagcttttaaatgaatttctggatacctatctaagctttaattttcctaggcttaagtcttagttctataatatattctcaaatagaaatactctgtagtctagatcgttactatcgtgatttgcaaaaaaaattttttttttttttgagatggagttttgctcttgttgcccaggctggagtgtaatggcgtgatctcggctcactgcaacctccgcctcctgggttcaagcaattctcctgcctcagcctccccagtagctgggattacaggcatgtggcaccatgcccggctaattttgtatttttggtggagatggggtttctccatgttggtcaggctgttctcgaactcccaccctcaggtgatctgcctgcttcggcctcccaaagtgctgggattacaggcgtgagccaccatgcccagccgggagatcctttttaaacctttcagtggttatcatcccttctcctcttttattcagaagcaatatctgccctatctggtcaactatctctggattgcatattccttgaggacaggaaacagtcttaatttctaggtacattgtctcttacttcagaggtattcgatgaatacatattgatttgtatgatgcctttgtttcttctaaatgggtcttgaatcactatgcagaaggaacaaaggttgggtagtctaaggtaagtgttctatttgcgggcaaatatttcttggcttgttgaatgtaaaaacaactatatgcgctcatttcattttcacataatctaaaataaataaatcaaagaaatagttgattcacatttcatgtcttcttgtgagatattttagtcatgaaagaattactattaataattatactaataatttaaagataattgctgttaatgataatggcaacatcattgtccacttactgaacatctattatgtgccaggtactctgctaaagtacttcatgtgctttttctcactgaatcctcaccataatcctataaggtagatgatattatctgcatttcataggtgaggaggctgtgggtcagataataggattagatacatttcatcaggttacacaattggtaaaaggcagagttggtaatcaacttcagttttgttgattgctagaatgtaagctacatgaaagtacaaatgcctatcttatttattactgtatcttcagtgcttaaaatggtgcataataaacagcaggcactcaataatattttaaaatccatgcctacaatatcactcataatattaatcattgaggtagtatgatcttcttaattcacctggtcatctgatatttctcttctcaaagatgaatacatataaacttcatatttcactgaatatgtttttatggaatttgttttcaactcttaaaattacagaaatgatcaaatgatatcaggaggatacttatcatcattgtgaaagtgaggtaattgtcatggctccctgcttagaatgtgggggacatcagaaaagtttcatgcagtactgtactggactttcccatgtcaattaatataaacataaatataaattaaatataactaaatataaattcaacattctttaacaggatgtttagagataaattgaaagtaggagtaagggcatagatacataaatggtatagaaagaatatactacatattttacaatgtttgatcaagttgctttagtagacctcaaaactaattaaaataaataattaatgcttctcttcataataatgccctttcaagtcaccctttcattctccttccccaagttagatccatgttctgttaacccaactttaatttaaaatttgatattaaaaaactctatatcagttgaagagtaaataccaaattaatattttctattaatgcaaatgttcctgtattaaaaggctcaggccaacgtataaaaattatttacttagataagtaagcttatcatattttcattctctttatatttaatgctaatttaggttttgagataatggtgtggaagctataatcctttcaaactacaaaataatgtggaaagctattggtaggtgagcttatcaatcctcttacaattttatacattttccctatggaggaataatggaatgccaccctatagttttcagtagttcattccctaacagagactaatcaaaataggaacaaacaggtgacgcaggaaatacttgtgactatacatttaaaagtaaatcagactctaaatttcctaggacttaaaaaaaaaaaaaactcttcattttgtaaagaaactcaattacatttccctttgctgaaagtcagttcccaattttactcaacagagaaactgatgattttataaaattgatcttcagtggttacttggattattatggttatttttttctttatacaggagggggtagtgggcagagtattatacacttttattacctcttttttcatcttctcttttctttttttttccttttcttttcttttccttttcttttcttttctttcttctttctttctttttgagacacagttttcactcttgttgcccaggctcggtgcaaaggcgtgatctcggctcactgcaacctccacctcccgggttcaagcgtttctcctgcctcagactcccgttcaacttcattttccacagacatgtcttttcctggtttattttatgagccagttgacatggtatacttttctgtatcatttatttttattgagttataatgtacctcgataaggacatcttatataaaaaaaagtttcaaattaattacaaagaagtacaagaaggacagagcctaagagtttctcactaaacacttcaggttgaaaatctagatcattatgctaatgcaacttttgaaggatcttgatcaacatttggcttttatcagcttttatttctttgaaagacttattcatacatgtacattaaaggtaagaatattttataatgtcataaattaacataagaaatgccactcaaatcagtcccttaatctatccagcataacatttttcttctctaaagaacaagctggcaaaacacatgaatgtcctttgaaatagcctcaaaataaaacagccagaagcagagactgcttctcaccaacacccatgttctcctctcttcctgggcacacaaatggagtacaatttcccaaccaccatttttgttaggtgtggtcctgcgactgagttctggctaatgaaatgtaaagtgtgagcaaaagtgatgtctgacacttcaaggcttgacccctaaaactttccacccatgatccccaatctccttcctcatccactggctagaaaaaagcagacccaaatatggaaggagcctagtacaattgttacaggtaaataggcatgagtggggcaggagagggctctccctatcacccactagaaatgtccattgatggttcagcaattattgcattgcctttcaaacagtgacaaattggtagccggtgccatttcctgatagtccacacctgttaacatcaaaatgttaattgaatgtaggccccaaggagaagcaacttcctggacatgcacatcaagagacaaaaatagcgaagtatgatcttccgggtacacgccactggaaaaggaaagaaagcctcagatgggcatgtgtataactccctaaacacactgtgcgtgctcaattccaaatggtaaggaacgcactgagtatgcaggaagcccaccctaagggtagaatcatgggagagacgagcctataaagccctaggatcaaagttaaaggcacctttttttttgctctcttttctcccttggaccttcaggtgcccccttgagtctcctccaagcaaattttcctttctttccgtcctgaagacttttaaaataaacttccactcctgctctgaaacttgcctcagtctctttttctgctttatgcccctcagttaaattctttcttctgaggaggcagggactgaagttgctacggacccatatggatatgctgctggtcagggtaactcagatctcttctactggtaacacattcattccatggaatattatgcagtcagaaaatccaaagaattggtaaccacataagcatattagatatgtagatcattgtctctcagcacagagacctagacaggacatccatgatccccctatgcccactccccactgcctgcagccatagtccagaattggataaccaaacttagaggcaatcgtattctctctttctcactcagaaatctagacatagacacacaactggggaagccaagatgcaaggtcatgttgagccagagctggagttacaacattataggggaacagacaaagaaatcccatctagagtgaagcttgagaatggagcatatctctagagagaagaaaagatgagacatcacctggtcccagaaagaaatagaatgatggagagagtttcatctttcattaggcctggctgtacttactgtgcttttctttcactgtgagattactctgcatcttaaaaaaaacctttaaaaagtttaatttagttgtacaggttttctgctcccagtaactagataattttccatattgagcaagaaacagagttcatgcatatagtacaaccacaattacgtgctgtcccctcccacacaaaaccaaaagcaaaatacaaccccaaatccccattccacagacatctgatctagaagaaaacaaaaggaaatcttaatagtaagtatctttggatgatggaaattgtagttatttttcctggtgattatccatgtactttctatttttgaaatgaaggtatactacttttataaggtccgtcatgacctggcctctgcaggcctgtcagcctcactactgctattgtctacaatgccctctatacttctagccatcctatgttatgtgcatctccaaatgggccatttttctttcaggtttctgtgtccttgtaagctttttgcaaagaacaatatcagaagagctaagacatgcccccaaatagtgcaggtctaaagtaaggcaggaaatagaggacaaaaagtgaacatagggagaatgaagagtataagagaagagaaaggaatagagtaagaaaagaaatcttacagatagatatggctgtctttgcaaggttagaagatcattcgttagttgcttcaggggtcactctggtctcctttgctataggttgtttagttttgatctaaataaatagtcagcaatgacacactgtatttttccatctttatgcattaccagaaaacaagtcaattaagtatagtacaaacagggtatatattcaatgtgtcaaaaatgtatttctcttgcttaagactctcacatagaaatgcaggatatgacaagttaattggggataaaaattatatgacgagttgccattgcattaaaagtaaagcaatgcagagaggctcagatttaaatggatgtagtttaatggtttctatcccaaactataaactggagaattgtctaaacctctaacaaaggccttggaagaaaggaataggaggagggaaagatgggaagggaaaaaagaaattaagagtttgaagagtggtttgagtaaaaagtgatccagcaacaatagattttgtcttaccagtaccaggactaagttgggaaacatcgatggaaaagaatgtttctcaaactggctacaaaaaaagtgtttctcaacaggggaccaactggtccatggggaatatttggcaatgtcagtagacatttttggttatcacaacttggggaggggtactactggcatctagtgggtagaggtcagatacgctgctaaacatcctgacagtctacctccttaagacatatgtaacaagaaattattcagcccaaaatgtcaatagtggtgaagttgagaaccatttgtctaaactcttcatccaattggaacgtgaagttttgaggtattctacatctctacaggagaaaatctgtcactctgtaaagactcccagaggaagattttcatgccaggcactcctgatcttatcttcctccccaagctcacagctgttcctccttgatgctctatttgcacttgggattggtctattatccaaacaaataccctgaaccctagggccagagagcatatacaactcaccgataattgcctcaaacatttacccttactgaccaaacaaggaaatctttgtaacaataaaaaaaaattgctttttaaactgtacccctcatgaacctgtcatgaggcaaaaatccaaaacctgaactgattaaaatatgcagaatatataataatcatagcaattgaaacaacattaactcctcttaggttaggtcacttaagaaacagtcaaattcagctttgtgctatgctctaaagcttagtgactacaattccacttgagcacaggagaatttgtggaaagcaggcctgccttccactaaaatgttctctccctagttccctgctgtgtggatttgagagtgcaaagaagaaacacattggttcactttaattattcagggacagcacagagagataaacaaggtaaggtcaacgtcaagaatatagggatttcatgcactctgctgacctctaaatatgcttttgtacttggcaaatataatattaaacctggacttattttttctatgcatcattgcctatccttagaaaacaaatatcatcacggattcacggggtgcagtatagaaatggctggttgtaacttaaacctaaaccagattatatttttatctttcaataggaaacataatatgaagctgtatttatgtcatagactgagaatgacaacatgaaggaagatattgaaactgtactgcagcctcacacacagtatgacccaaggcagagtagacttctatacaaggtgttgcatcttgaatcttgtcactataaaggtgcaaaccaaaaataaaattcgaaggccccaaatcatccgaatggacccctcctcttggccaagggcatttcagagttaacctgaaaatctaattcaagccatgatggaagatggagtttaacatgcctcgttatatccctccagtgttaacatcaacatagaccttaagtctgataagaaacatatacagtctattttctctaaagcaggcatcatctgcatgataaaacctaagtctccacaaccccttattgtaacccagacattgttttctactaataattctttcaactaattgccagacagaaaatgtttaaatctacctatgacctggaagctccccaccttgagttgtcccacccctccggatcaaaccaatgatgtaaatcatacatgtattgattgatgtattaagtctccctaaaatgtgtaaaagcaagctgcaccccaaccaccttgggcacatgttgtcaggttctcctaaggctgtgtcaccagcgcatccttgaccttggcaaaataaacttcctaaattgactgagatgtgtctcagatattttgggttcacaaagggttttgttttaaaaatgcatttatttaacaaaattgtatcaagcacctattgcgtaacaggaaaaatgacttcatagactagtcttgcactggcctaatgttgcctccttaactatagttgcctgccatcatcactaccctttgacagaaagggaagtgtggtgtcttcttcagttcttcttgcctataggaaattcagaaagaatcatgactgctcaacttaaatctatctcacttgtttggggacctcacctggaattagtaaacttgcaattaattagaatccaactaactggaaagctcaattaagcaggattctttcagtggaggagcaagagacaagaagcaagtcacagaatgacagagattgtaaagccagaaaggacctcgaatatcgtttagcttcatttcctcatctgactattgaggaaaatgaggttgagaagaagaaagggatatcaaggttacatagctatttaatagtgaaattggacttggactcaagatttctaactgtaaatctagtgctttttcaaaaactcacacggggccattaaaaatttgcaacggatatcctgggaccactagacattttgtccactctacaacatccctttatacctagaacactttacaataacaactcaagcttaaatggcaaccctgatgtactataagattttcaattataaaagattaaattatgatcatttggattaacatggaaagtagattcatatttaagaatgattttcaacaaggatggcaatttgtaaaaagttctatttaaccttaagctaaccaccaaatccaattaaccagaatgccccagtttcctgggcatttaagattttaatataaatagaataaaaactagattatatctccaggcagggaaacttaaccgaaccataaatattcactgaaagacaaaaagagatggcgtggagttctttatataccagagacaaattgttatagtgcaaagagcattggattgtttgcacaggacttacattccaacaccaaatcttgctccaagaaattttaataatttaataacacatgctccacatgaatgtgttattaaaatttcccaagactcagttattttaccattaaattgggcatagtttctattatgtctactttccagggtttacagtttgaaatgagataactagtgaaaatactttggacaatagcaaattatgcgtgcatacttatatatgtacacatgcctatatgcacgcacacaaacatacatgcatacatatacagtacattatcaaatagctaagccttttgattttgacagacaagaaaaagtatttagctacaagtgtatctactaaaacacaactacccacattaccataaaattacctaagttaatgatactattcactatggtaaatgacaaaatttgaaagattagactgtcatagataaaaacaatgattttagttgaaaggtgagaaaaatatcagattgtgactattttatgccagaagaaattcaatttacttatgaagctaatatcatgttgtacttgatattttgatagtttgaattggaaatagtcatgttagcatctatgctgtcaatgcaagctctgtgcatacatatgtcactattaagtatcttcttcagtaacaagggaccgcctagtgttttttgtatgccagatagagataaaaagttcgagttctaattgtgtcttggccagtgataggtgcttgccctcggaaatatgatgtatatttgagaaccaactttagataagagtgggaagatgtaatatcacctctactgtgagaataccaaaggcaaactttttattttattttaatcctcctcccaaaggtgaggattaataaatccccagctcggccaggcgtggtggctcacgcctgtaatcccagcactttggaaggccgaagcgggcggatcacgaggtcaggagatcgagaccatcctggctaacatggtgaaaccctgtccctactaaaaatacaaaaaattagccaggtgtggtggcaggtgcctgtagtcccagctacttgggaggctgaggtaggagaatggcttgaacccgggaggcggagcttgcagtgagccgagatcatgccactgcactccagcctgggcgacagagagagactccgtctcaaaaaaaaaaaaaaaaaaaaaaaaattccgaagctctatgtccttgttgggacttggcaacctgggaagcctgtactgttgtatgggatcatgttgttttcttctgaattatgtgattatcactgcatatttctatatactttatcattaaggcaacttgatctctgactgggtctgtttcttcttgtcactcacagcactatcctgatgtctagtgtatacctcctcactaatgtagtttcccttgtattttgccttccaattcacatgaaagttttgccctgattcagtctgctctcaatctactgccccatttcaaaaccctactttaccttttgtttccattttcttagctcttaccaattcttcaaatccaacgtggtatgtggcttcaatctcactactgtacagaaattggctgcttaaaatttataattgatagagtcaatggtctcttctcatccatagtttatttgattcctctgtgatatttgaaaatcatgatcaccacctcctggaaatttccttctgtttgttctcttccgtgattacttttcagtcacctacgctggcctttctcctctatgaactcctaatacataagtgttgccatggtttggtttttggctttcttttagtcttgcataaaactccatctaggtttttcaatacttactattattacatttacctatgaaagtcttaattatctacgtccatcatgagctctggaagcagacatatctggtgggtttttttttttgttttttttttttttttttgacggagtctcactctgtcattaggctggagtgcagcagcatgatctcagctcactgcaacttccgcctcccgggttccagcgattctccagcctcagcctccggagtagctgggaatacaggcgtgtgccaccacgcctagctaatttttgtatttttagtagagacggggtttcaccatattggccaggatggtcttgatctcttgaccttgtgatccgcccgcctcagcctcccaaagtgctgggattataggcatgagcaaccatgcccggccgaagctgggttttaactgactccactacacgtaactgatgaccctgtggcatgttgttcaacatttttaagccttagttttaataacactaagttaaaataaatgtgacagttacttggaaaaatacttggcacatagtaagcaagtagtaggagaatattttttctctatttattcctttccttggactcagatccatattttcaactttttttgatactgaacatttcaaactagatggctcacgtaggtgttccaatatttccaaaataatatgcactgtctgcttccattaacttctgttcctgatttcagaaatctactctatctgtagttctctgctcacttactctgtccatgcattttgttgaacgatatgagccaagcactgagggatcaacataagaaaaggcatagcactttacttaagtttcagtgaggaacaaagacaagtaaatagaagtttttgagggcaaatatacaatgaaataaggcgttgtgataaacatattggcagagtgttatgagatcatagataaggggtttctacatgaaagttgaagtggggaggttgctatagtctgaatgtttgtgtcccttcaaaattcatatgttggccatgtgtggtggctcacgcctgtaatcccagcactttgggaggccaagacaagcagattgcttgagttcaggagttccagactagcctgagaaacatggcaaaaccccatatctacagaaaatacaaacattagctgagcatggtggcatgcacctgtggtcccagctactccacaggctgaggtgggaggatcccttgagcccgggaggttgaggatgcagtgggtcatgattgtgccactgcactccagcccgggtggcagggcaagatcctgtctcaaaaaagaaatcatatgttgaaatcgaatccccaatatgttgatgttaaaaagtagggcttttggcagggtgattaggccatgagggttctgtcttcatgagtggaattagtgtccttataaaagaggcttcaggagcctgttggccccttctgacatatgaggacaaagcaataacgtgctgtatatgaagaacaggtgcttaccagacaccaaaatctgctgacaccttgatcttggacttcccagcctctagaaatgacagcaatcaatttatgttgtttataaattacccagtctaaaacagaggtgatggcagactaggaagactcctaagaggtatctttgactcctctccccgttttcccatatcccatctagccagaccccaagtcttgcaatattattaacctcaaaaaagatcaatgttttaggggaaaggctctctccccctactagattgtaagctcattaaaggcaaggtttttatttgttttgttctctgttgtagccccagcaactagaagagtgtttggtttaaggtaggcacttaataagtatttgttaaaatttgatgaaactaaaataaattcattatattatttataatgaactgtttttcatttaaagtatttgcattatatactttctaataccctcagatatcacaccaattttttaaacaaaatagagaagcagatgttactgtttatttgcttatctgttcaccaaaggggacaattctttttgagctttcttgttctttaaataaaatactcagtaccacactttcacaattcttgcaaacatatttcaaagacctcaagacttaaccagatcttatcttttgctttgaaagctacaaacatttttgtgttatggagttaatacagaaccagctggattcttctaaagggagatgcttagtagcacatctttttgatacacacatacacacacacacgtgcagatacacattaacaccctgatagaaaataagaataattgacaggaaatttattttctgctgctttaaatatatttcatgctcttagtaaaatagacaagtatctattaacttgacatggtaatggaaatatttgttatgattcactggataagtaactttgcagtgaatgaagttgttaagaacttgtgttctctcttgttcaaaaccatacatctctgttttaaatatagtcggtatagggaagtgtataagtatatggtgagggagggcaaaatgatgggtacagagatttcactaaaatttaatttttgtttgctatactcgtatattacatcaatcaactcatttttaaaaattccctaaaacatttttagattcacatttgcattgccaagtaaatcttctccatattaaaatcagatttcatctcacctatggtgaagcattctttccctataaaatgaaacaaattatgtttgcctatggttttattttgaaatgaaactgagaatagtcagttgaaaagcatgtttaaaaataatgctgccaccaaagtaactagagactgtatcacactgatctccaaagtattgttcttcactgcctaagcacaatagacttatattttactctcaacatgtaaaacatattttaagactacagcattctctttgatgtaaatttaacatattccacacccatcatgtggtgtaggctgaaaagcttggttgagcttggttaaacaggatttataggtcatagattagttctacagcgtcttttcctgtcttaaaaagaatctttaaatctgtggctgaagatagatttttgctaacctccgtgctgttaaaggattaaagcctgagatactgttggatctaagcactgcatatgtacattttgagattttttttctccagtcattattgaaggaaaaaatttagtctctatttttccattgcaaatgttctagaaaaaaactacttataaatgttaggtatattttagcagtgctgtataataaagacatattactgctgctggagaacttacatttattggttaatacttaaagggtatttttccataaataaattactgcaatcaccattaatgagtatttcctccaaatgattcttttttccccaagatagaaactagctctggaagtatagtaatacacattggtcatataagtttcatttctgtttccattccttgccaaaatctcctttgccaatggccctggctcttcttttgtaaaaataaccctgtagactccatttaattgtcacattggcctaaagccatcaagggcagttagcctcataccaagctgcagccatctgtcagaatatgctaaaaatcaatgaagatggttacttgcactctcctgccccggcatgattcctccacacaattctgatttgtctttgtgaactgaagtggtcatgttaatcccaacaccaggttttctctagtgttgataatcacagcaaaacctttgagtaagattcattttggtaaatagatcatgattactatccattatcatcattctgaaaaaataattaccatctaagatcaggccaagcaaaattagttgtcttgaaccaacacttggccaaaaattatcatgagtaatagaatatcaagtagactctgaattaggaatttgaattgggggacagcaaagagagtaaataagagtaaacaaaaatggctgcaattccacttaaaagtgaacctggatgaagaggctgagaagcaaagggaactattccagtgctctgcagcaagggggctgtgtttgaattcctgacagaaataagcacctcttcaattaattgggtgttaaaggcaggtcaatctacttgcacataatttcatggatagaatgaaaaaaacattctatagaaaagaaggaaagcagtaaatcatgattgtgagaagctagaaaggaataaagccagtgccaggggatggacatgggaagaagagaaagaagaaaggaaactaaaatgagggtgcaaatttcatgtgcggtatgaaataatacttgtaacaaccttataaagtgagtgctattaacccatttttaagttcaaaaaactgaaattcagaaaggttcagtaatttgcctaagctcatagaggtaataagaagcagaatgggactttgaactcagttctattgttttctttttttttatgttttaaacattttagaaaatatttaatctcactaataatagcaaatgcaaactcttaaccagtcttacagaattttatcaagcagtcacaggactgtgccaccaaagccatatgatacctttgggattgaggctcatgccacagggaagaaaaagagactttctgaagaaaaaaaaaatcaaagaataaaagaaagaaaggatctgcaaactctagtatatctaaggatgggcctctggataaggaaggataatatggaagtttaacagcaggaattttagcatgaaatttagatttctggctcatagcttgagaatgataggttttcagttccagaatggttgtctctcattagtactagaaagaacatgcttgctcacagagtggccaacctggtcaagagtatttaaatggcaaatgaagaagggaaagaaataataaaaagaatagtgcctaatatcacttagataactggtgactatgcacaattttgattgtgatatgttattcccagaatgccctttcctccatttttcacttagtatcacctcatgattttagaacaaaatgatttttaggccattttctcagggaaatttcgactttccccccttctacctacctgaacacttccttagtctctactattcctaccttggttagatctacccccctccaagggttcttacctttggattacttaaatataacaaaacacttgtgatggtactgttatttatttacctttgcttcccctactacagaaagtcagtaatgcatagtggttaaatatgaagatgctagacctacagcctaggttcaaaacctgacctggatctgtcatatcctacctgtgggattttacaaagttccttaacctctctgtacctcagttgcttcatctctcaattgaggatggcaacactaaatagtacgtaccacatgggcactagcatatggattaaagaagttgattcataagggcttagaatagtgcttggcatatagtaatgctgtttagcatagttagatatcgttattgttactagtactaaaccatgcatttctggaatacagggattctcattcctcatagaagcggcagtgcaccaggaataactagtaaatgcttgctgaatgcctcgctgtgcaggacacgcacaataatccatagactgggaagtatatgtgaatactggatgtttttacagcagattaaagctattgtgtctctctgaattgtagtaactctgaattcatctacttgccagcaggtctgtgccaggctattatactgaattgaaaatagtaatatttattgcacactttctatgtgcctggctctgagtagacattttcatatattatctcattcagttctgaaaacagccccatgaggtagggtctgtcatttttgacacaaaacaaacagggaaattcaggtctatggaagttatgtcatgtgtctaagttcacaataacataagtagtttagtccagggatgttggagtacatatgcttgcacacatcacccagcctctccatctttggcaatgtgcccatctttccgggttgcaaaaaacaccctgcccccaaaatataatctagacattgggaattttgagaagaaggcttggagaaggagatagcaaggctgacgtctgagtaagggagggctcagggcagggcccaatccccaatgtactgggtagacagggcattgtttttctgaataacacagaaggcaggcagcaatgcacaagctgttttgaagattgatcacagggcagtcttaaaaagcctcacaggtatgtatcgtcaaaatgtgggagaagggggatggttctgatgatttggaacatggtggtgaaagagtatattctatttatttatttagagacagaatctccctctgttgcccaggctggagtgcagtggcgcgatctcggctcactgcaacctctgaaccatccccactccccgccggttcaagcgattctcctgactcagcctcctgagtagctgggattacagggacctgccaccacacctggctaattattgtagttgtagtagagatggggtgtcaccatgttggccaggctggtccggaactcctgacctcaggtgatccacccgcctcagcctcccaaagtgttgggattacaggtgtgagccaccgggccaggccaagtgtattctatttaaaagcatgctaagagaggaagtggaatgatgttgtatatgtttactttgaggaaattatgaatggaagggtagaaatacctttagttagataaagatagcaatagggacaaaaagtaaaataatctcttgtgttattattgctattattattactaatatttacggagtgctcattatgttcatggctgctctaagcacattgcaattaggaactcatttaatgctcacaatggccttatgagctaggttttactattatccttactttacagatgagaaaaccgagacatggtgatgataattaatgtgcccaatgtcacatgactaataggtagtggattggagagtctataataagacacttggccagaaggagacaacggatgctgattttcaacacagatcacaaaagcgtcgtaggaggaaagggtagtaaacatgagtgatttcaactccataaacatctgctagttgtatcgatttgcaaaatgcaaatatatggcaagttcccaaatttttgtgttaatgactacacctcccaaaaggtagagaaaataagaaacttgcctctctgactgacttagaaaaagagaaactggtgagttgaaggtgataggaacctttagaggaagtgaagtattttatcttagagtccataagtaccttataaggcccaaatcccagactttaggaaaagagcttgctgaagtaaagtaggtacaatttcatgccctgagatactctaatatggagatgaattaagagagttgggaagttattatattttattttttttaacctgttgaaaccagtgtgtctgtactgggtgttatccattcacattcagtttggatttcaaaagaacaggtgccaaaataaagggatgaaaaccaaaaataagtaagtttaagagggcatgatgaaaataatgctaagaagaattataccccaaatgagcctgaggcttgagaaaaaaactgctaaagatgacagaaaagtgctttttaaaaaatatatttaaaccaagaagagcaagggtaggagagacatgcaacccatgaaattgttattggatggccaatatctgagaggccttctcaactactgtactagttttctttgtgaaaaagaatgatgatagacttgaaatggtaaaatcaatatcagtaaccataaattgaagctaaaataggcaaagcagtcattaaaaggcatttggctgttctataataaatgaattaaaattctatcccagagtggtcagaggtcttggagattggattaccctgtcacagttgctaaagttttagcaactgtagtgtggttgaagtgtgacaggagactagaaacagaaaacattggctttagttttcaaaataaacaggaagcatatggactccttagactagaccaagaaacaggttgattaaatacaaaattctacaacaggttaataaaagaacagtttgtgagcgcttaggaaaaaagtagtaaccataagaaagcaagcagtataaattctctaagaacaagttatgttagacaatctcatttcatttctattcttgacatggttattagattggaagatcggtaagaatgtaagcatactatatctgaatatcagcaaggcatttaacaaggtctcccataatatggctatgaacaagatggagaaatgtgggttgttagtaaaagaatgttgcctaatagataaatgtcaccagtggcatgcacagagatctaaccctaatctggtcttatgtaacatttgtatcgataacttacataaaaaagagggaagcatacctaacaagcctacagatgacataattctgagagcaaaagcaaatagtttgtatggtagaattagaactcagcaacatttccacatgctaacaagatgagatcaaattaggccaaatcaaggctccaaatatatttccactgttatcttccataccaaacacaaaactgaaaaagaatcaactatgtacttacagaataaataaaacgtggtttagcttcagaacatgttaaacaggctttggggtttagtttccggtgttctcaatgtgtatggatagtgtcatgtggccaccaaaaaagctgatactggagtagacagcattaacgaaaatacataattagaacaagagaggtggctaattgttggtcatagcataaaatcctcagtgaatcagtcaaaatgactgactgctgagagtcccatctaaggaacatcaaatctgctcacggtccttcctcaagggacaaccatagatggccatgttgtttattttaatcacatgacttttctctccccgtagcctcagttgactatgagaataattgccagggcttgccaaaaaactgaaacacagcctgctataaaagggatgaactgggctaatcaaattccctcttagggttttgagcctacagtgaccaagataataatgcagttagcaatgggacatgcagctgaagggatgaggtgagaggtgtgaggaggtactcttggagtcatgtggtacagtggagaaaagacatcgttatgagatagtagaaactatgtggtagacaaaataaatattgagctgatggaaagaataagctattggacaaagaaacagacagagaggagcaaaaatgcagagaactgctgagtcttattaatgctagagatccacagtctttgcctttcctttggggattgaccagagtttcccgcgttcccggggactgacaacacatacactgaaaagatgttctcaattactcgaggcaacctgaatgtctctggcttcttgcaaccagagaggctaataagaacccacacctgcattcagccttgaacattacatttcaagagcagtttggacaaactggagtgttctaaagaaagagaccaggaagggagatttgaaacccattaatgtgaggaacaggttgaaggaattggggaaacatttagcacaaagaatagaggactcaagaatagtgaagggctgtcagttgtaaggggaattttacttattctgtgagaccctaaaattagatttgagaaaaatgggcagagttaagaagggatagattttggttcaaaaagaatcttctagtagttgtttgaggtagagtggaataacttaggaataagccaattacctattttggagatatttatgcaaaggcaagtggccacttagtagggatagtaatgttaccttttaattgtgtagtgctttacagtatatgaggcactttctactacgttagtttgattttcctaattaggaagtcaggcatttgtatattcatttttacagatgaggaggctgaggctcagacaggttctgttacacagttcatgtataagttcctggatacccacagttacctttattgactacatgagaaatgaacattttaaaggctatatttgaacaatgctagttgatagagctaataacgtttctggcttttaaaaaatcatcattgtgatgctaaatatatgttcaaatgtactaaaaaggtactctgttcactcttacatgaaaacttatgttcttctctgcgtcttaagaaactgagaccaattaatatattccttgcatagatacagaaggtccgtgggtgcagtttgtacaaacatgcctagatgtacatttcaaataagaataattttctctctccatttgcctgaacccattccccactctctcccagattttctgttatttggcttcaaagacgaaaggagtgtgtttgcttgtcagaactgctacttaaccatattgccctgttgtttcctcagctctctatcactaagctctgcaaatgaactaaaagtaaaatgaggaaataaccactgtttgaaaactccttgaagaagatatacattgttctttgcattttaccctttactcacctccccctttcaattaaaaaagaaagaaaagaaaagaaaagaaaagatacagggctgggcacggtggctcacgcctgtaatcccagcactttgggagggtgaggcgggcagatcacaaggtccggaattcaagaccagtctagccaatatggtgaaaccctgtctctactaaaaatacaaaaattagctgggcgtggtggcatatgcctatagtcccagctactctggacgctgaggcaggagaatcgtttgaatccaggaagtggaggttgtagtgagccaagatcttgccaccgcactccagcctgggcgacagaaggagactgtctcaaataaataaataaataaataaataaataaataaataaatacagaaactctatcactagtatagttctaattgggttattgtcaccataggtgctgactgctatatttttctcttggaatgtagcagaaatcaccctttatgaaaccatttaatctggtaagtgatggatgatactgtttcctggacatgggccatagtacttgcagtttgttgatggtgaaatattctctgatgccatggttggtatttaatttaatatgctgctaaacaacaaaaacaataacaaccagtcttaggagagttgactagtccttctctttccattccaattcccagagatcagattagaaggtgataccagacattgtttatcaagtagtatattatacccattttttacatacaaatgtctttagaaaaagtttctgtaaattggatagctataggtagaaggaaactggactcctatccctcactgtatacaaaaattaactcaagatggattaaatacttaaatataacaccagaaactataaaaatactagaagacagcctaggaaaaaactcttcaggacattggcctaggcaagaaattttatgaccaagacctcaaaagcaaatgcaacaacaacaaaaatagacaaatttggcttaattaagctaaaaagcttctgcatagcaaaataaataatcaacagagtaaacagacaacacacagaatgggagaaaatatttgcaaacaatgcatccaagaaaggactaatatccagaatctacaaggaacttaaacaaatcaacaagaaaaaaatacccaaaaattcctgttaaaaagtgggcaaaggacatgaacagacatttctcaaaaggtgctgtataagtggtcaacaaacagatgaaaaaatgctcaacattattaattatcagagaaatgcaaattaagaccacaatgaaatacgatctcataccattcagaatggctattattaaaaagtcaaaaaacaacaggtattggtgaaaatgtggagaaaaggcaatgcttatacactgttggtgggaataaaaattaacacaacctctggaaaacagtatggcgatttttaatagaacttccatttgattcatcaatgcacttctgggtatctacccaaagaaaaataaatcattatatcaaaaagacacctgcatgcatgtgtttatcacagcacaatacacaagagcaaaatcatggaatcaacctaagtgtccatcaatgaataattggatgaagaaaatgtggtatatatacaccatagagtaccacagagccttaaaaaaaaatcatgttttttgcagcaacatggatagagctgtaggccattattcaaagtaagctaactcagtaacagaaaatcaaataccacatgttctcacttataactgggagttaaacaatggctattcatggacataaaaatggaaatgatagacccttgggactccaaaaaagggaggatgggcggggagtgagggttagaaaattacctattgggtacaatgttcaccctttaggtgagggtacactagaagcccaaacctcaccactgcacaatatatccatgtaacaaacatgcacatgtatccccgaatctataaaaataaaacaaaaataaaagcttccattgtagaactaaataaggcacacaaaaaaacaaggggaagtccttgaatttcaaagaaaatagaatctatgttttattagttagtgtttttctatgtcaatataaagttgtaatgtttgatttaagaaagtgactagaaatgatgaataatttctttattaattgtatctggtgctaaaatctatcatgatcaagggacctagaactgcaaagagtagaacttttatcatgacaaagctctgaggagtcaatctagaaatctaaacatgtgaagaaaaacagaggcaaacttttttgctcaaaagaccaaaagcttcaccctaaaggcagaatttagtttttaaacttacacatatacttccattacatgaggctgatcctttttttttttaatgtttgaaggcaacttattttttcaaagaatcttacaataaataaaatagaaatgatcactcctcctccagttgtgtttgggttttcttgtaatactgcagttttttaaaacaagggacaattgcctttcactttgaggctgcagtgacagcttagataattgctttgttttatgtttttgtggatatgtgacagcagggtgtttatgtatctgcggcttcatcttttcacgtgtatctgctttggtctgtggctgtggctggatctagatgtttgtgtctgtttgcacatctgcgcctgtgaaggagtcttcctttttgcccatgcatctgggtgtgtatcggtttgtgcatttgtgtgtctctgcagatgtgtgtgatgaaatgagtttctgcaatcagtagaaccatcctctgccaatacttaagtttagtgggatcaataatagctcaagtacctggtctccaatggtatgttgctgttcaggacccagctgttatgcagatggactgaatcctgcgtgctggttgggggagctggagcagctgggctgggctggctgcgggtagtcattgatctcctctgaagagagtccgctgcagggggtggcttcctggcacaggtgcaggcatgaggaggcggaggtggcggtgggaggggtctgaaggtgaactggttgtgtgggctgctctgcacatctaaagaggagagaagagaaacataaaatagagacttactctcccacttggcagtcagggaaaccagcatgacagacttaccaggatttcagataataaaacctgtggggtgagggaggttgttttaagttcagtctatctgtaaaaatgccacttaacttacaaaagcacgtgcagcatgcttatgaaatgtaaaacattcacagttgcatttacatgtaaattctttagggctatagcagctaaaaagtaaatgaggccgcctcacaccatttgtcatagtttctgctactgaacaaataaatcatcaacaagacaccaagttacagaacagaagtgagctgatttccatcagttgcaaaattctcacttcagaaaatgctagtaaaaggcacaaatttgttgcaaggaaaatcattcggcacttcaaataaaaatataaggccaccttctggcttacctcaggaaaggatgtgagcttgcctatacgggagcaaatccatattttagaaaaacagctcacgagtgtgtcgcttggctgtgtgaaactaatctctttgtcagccccccaactagagtgctacttgtaaaaggtaggctaaaagaagtttgttcaagttgttatacatatttccatggtcatgcaaagcacagtctgcaacttttttcctttgccacacctttctaggagctctgccatgttagcggcagcttaggcagcaaggaaacagattttttttctgctcgtttgcagaggggcagcctgggacagcggtcctcaggcttctattgttgctattgcttggtatttttccattgttttcctggcaggcacacgtaaagacagtgagttagaatttggcccatgagaaatacctcaattaaacccctttaaaaagaaatcactattgtagctgatagccacctctcttccacaggagaaacataatagatgtcaagtgatttcttgtaacaccagcacgttctggataaactttgtggacagcatggccttgtcccacctcccaaatgactgagagttgaaaagcagaaaaacgccagaggctttcgatgcctagcaaaggactcagctggtttgtgctgaggcccactttgcagtggctgatcacagaaaaaaaaaaaatcacttctttcaatctttttacttcaaacttgaattttaaagacattggcatggttttttatttttaaaaacgatattagcctcccaagagcatgacaaattcttggctgtattttctagcacaggtggctctccctttaaataaactcactatatgaaaatctgaattgtacaaaagatagatagagaagggagtggtgatcattcattttataaaaaggattcctttagatggtcagctatccttgtatattttaaaagaactaaaatgtttcatgaatttcctaagtcacccccattattccaggcccagctcaaatcccatattcactaaaaaaaatcatcacaaatacttaacatctcattaactttttttaaacctctgggctcatactcataaccgtaactagaagtgtgctttccattttggggactcaaagaagcatagaatgttgaaacccaaaggactttggagatgctctcattttgcaaatgagaaaacaagtccagggacacttggcaagttagtggcatggccaggactagaactcacatctcttgactctctggctaatgctccattccctgtattgcagatctctgtaatatgagttctcttttccttcataagatttagagacaaagaattgtccacattttcttgatttttcacttaggtttattacgtctgcttttctctttgaccatgactccttaaatgtagaaaggaaggcagtgtggtgtaatggtatgcaacacagcacagtggaaagaggagaggacttggactgggatgtatggcaaatctgggtttaagttctgcctctaccctttagaagctttaacccctcatttgtaaaataaggataataataatcccttttcctaacaattaaatttaattcatgtaaaatgtgcttgagcatgcattttattgactatttctttattgaatgtaataaaagtataaaagtataaaactataaggctggaagaaatcatagggatcacctagttaagcttgcctctctccactcgccattttacagatgagaaacccaagacccaaagaggtgaactgacttgctcaaggtcattcaacttggatactttttcctgcccatgccagatgatttctttactctttttctgtacgtgtttttgtaaattaagtgacattttaacagatagactgaacttaaaactctcccccacccccatgggttatgttatctgaaatcccagtactctgcccagcactctttccattatgctacttcggaacataaacatgactctcttctatgactttaacatttactatttttgccataaatttgatccctgagttggcaatattatagcatccccatcatattctatgtgttttgccttttctcccaaaatagactgcatgtttcttagaataaggtttccttctacttctcctgtatgctgtatgacattgagcaaagtactgggtacagagcaagatctctaaaatcttttgctaatagaagagggtttgactggatcatgggacccagataatcaccttctgtgttccctttggctctcattctgatgtagccactggctatctattcaattgacagagaagtaggttttccccttgaagatcttagtggaatgcctcccagagccatgacaaaggacaatgatactctgaagaaggtgcttaaaatgatgccccttcatgatgtgaaaaaagcaccagtgacacactacagatctactgtctaatgccacgtgtgggagagcacttaatgacccgagggaagggaggaaaaggtgcaagtccaaggttagaagaaaaagaggagtcaatttgaggtcttgtgctcagaacccctctaaacaacatgcatgacatttactagcttaatcagtaggggtttctgtcagcacagttgtgcaagagaaagggtttctcttcagtacagttgttcaaaagaaaaagaatatctcattgacatcagatttattgcctgctagattacctcacaatctttgcaactctattatgaaaaatgataaaaattttacttcattgaaaagtgcaatcatagtattattatttctgttgcaggtagaatggctttgtctagtcatttagattatctacgtataatgcatatccatatacatatatggatattttgattttcatctattttactgtgtatttttatttccacatttcaaatatgtggaagtttccctgctagttcatattgtctttaaacgctttcacaatattggattgttgcactgagtggaatacatccagaccttaagcctttatgaaatgcaaatgatctcagattcattctttttttcacctcaggaaaaagatggggaatgcacttgttccctcccaaatgaagtaatttaatacttgggatccatgaaatgggatttcccaacattaaacactaatgaaaaatacattagtgttcagtgtcagaagctctagaacaccaattctaggggtttgcgagtcacatacactcacttccaaatgtatctggcaaccatacacttctgtgccccagagagaggaagggagaaggggggagtggtgattatgcaaatgtagatatccagacttacttacaaagctttctgaaaataaattaagttttcaaatggaaaggtctaattcacataatatacttggatagtagccagtttcaggtttgaggtcctaaaataacttggtaagataatttctcaggagcaaaattcctccaaactgtagatttgagacattttaagtgtggcagagctactaatagaagtataagccttcagaaacaacattgcctctgtctccaaaaggtaagtgcaagaagaaacgtgtcacgcatagttttttcttttttccttttcttctctttttgccaatacaccttattttggataatgtgttagagaaagctttcacaagaaattagagtatctctgctcagaaatactgtggcaacttatcagagtgtctatcagggtgttttgtcccttacatttcattaacatatacagtcagttctgctacaagacaaagcatgcatttctgcaattcactgcactatgcaaaatcacacctaaccaaagggttatggaaaaaatgaagttagggatgcaacattcagaaacataatcaatgacgcattaaaaaaaaaggaacctaataagaatgacagcatagtttgtcatatattaatggttaagggatacgcgaatgccataccaaatatgacactttatcttgtgaaagtgggtgccagaagagttgcaaattgtgagttattgtgaagtggtgaaaaggaaagttatctgattaggacggaaacttctaaataccagatgtggatgggacaggctcctatccacatgtggtgagctgaaatagctgatggatattgcaggtatatacatgtgcccattttgtgtattcttacgcagttcattctgctgtatgcagttttctgcattcatctagtgcttttaacagatggaattgcgcatatgcaaacgcaaaatttgtcttaagttcaaactgttctcaaacatcccaatggcaaaggaaaaaattaacctttataaaacgagcactgtagcagcactggctgtacatgcaaaataattttcggtaggtgttaaaaataaatattgtcagtattacagtaatgccaaatagacatttttcttgaaaaatttgaccaaagtagatacatggctagcttttctgaaatccatgtactaaattgatcattcttttctttagtgacactgtgacaataccttccctaaatatgttttttcccaaggttactatgcagtgtacgttgtcaaaaggggcacatatattcctatagctctagaaaaaggtcacggagagtcagaaatcatgtctgtacttcctggtcttagtatgtgtttcattatctccttggccaaggggaagggtagctccacaattctttatctacaactatggaatcaaagaatctctgaaaaatgagtttgttttcccctaactcactgggtggcaaaagctgacctgaaatgctttgaggatatttatggtctttacttatttatctaatttcataaattttggtggcaaagcctgacctgaagtgatatgaggacatttatagtcttcatttatttatcttattttgtgaattttcatacatttaggtaagaaagtattaatgcattttattaaggggtgctggcccatacctcactctgggtgagtgtatatataatatacagtatatgtacagcagcacctttgtaaaatttgaaaaattctaaattctgaaaaaagtggaccccaaaggttttggataagggattatgggcctgtattagtatttaaccaccttcctgagctcttatgaggcaatattaattaatgcctctgaagaccatataatctacacgtgcaaagaacatcagggcaccaagagttattgccatactacttatgtcagatctctcaaggccaattagaagtctttggttcctgaggttgcttttctgagctgccctccccttctaggcaggagtagggggtaaaaggaaacaggcttaaaagaaagagaagatattttcttattaatattaactattactactaactcaaaatgtatgttactacttaatggtattttacctgtcacaaagagcttttgtaacttgtgagcaggtagttttaagatttgcatgttacggctaatatccattaacttcatagtgctcaatgatcatcaaattagacttaaatgtatctggctgttctgttctcaacctcgtaattattattagaggctcaaaagaataaaaaggtaagaaaactggttttcagaagaaaataaacaatacagtttatcacttttctggctcaaataatactgctttaatattaatataccaacatcctttattaaaagcagatttatcagttaaataaaccattggattgagaatggaaataaagtccattcgataggtaatgcttaataaatacttatgtataaatgggcatgtgcatgagtgacgcacagacaacaacagaaagagtcagaaggagagagaaatagagaggagatatcacaactgaagcagatgactgaaggagaacagtcacagaggctctgggggaaagctaacaataaattacaatgttttctagtttccatgggctcaacctggttctggattactgcattctgcatggcttccacagccctggatactatttactgtttttcggattgtcaagtacatccctttgaggactttgaatggccctctcactaagccagcaggtaagatatagtatgctgtgttaatttctgtcagttaggttgatctttgttacaatcactggaaatgaaggtcaacaataaagcacctatgatcctttgacatgtttgtgctgaaattcatatttatattttagtctctctataagctgatactcatctttagagggagtgctggtctacatccagaaagtccaaattttctactttctagtttaattaatctcttttcctgttctccaatttgttgtgcaagcatacaagttagtcaaagatccacaaagcagccctcccccagcccatttcttcctgtctctgttatagagggaagccaactgtgctgtacactgtattggttttacatagtacaatcagccaacctcaggcataatactcaatattcctgccaataagtgtctggttttttaactcagtcaaacaatccaggactttacaatcaagaaaaaaagataaggctgtggtaaatgccattttgtttaaattattgtagtaattgctcaaactacctaattttcttggttgtgaaaatacaagatggatataactctgctaatatttgtagagtagtttcgtaatgttaaaaaaaagaaaaatgaagccaatatatttgtcatcttagaaaattgtcatttttctaagtagagtggtaaagagctctactttatggcacaatttggaattttaaatgtcaatatttaaacgttagtatacggtattagttagcaattaaaattagtggttggccaaagccttttcactatagccttgaaagaaactgttatctgttatgtaccatgaaacatgaaatagataattgccctgttttatcttatgttgacaatgatattgtggcttctgttattacccagtgaagtatatcaaaaagaaaatataaaaaagtaatgatcctttaaaatttcatatttagtttatactcaaactaaagtcttatgtaggtatttcaattattttcaatcttcaagttcattatttatttgcaggtaggtaatggagggttatgaattaattgacagtgtatcatttaatgaattagctaataagagatatcctgaacatttataaagttttcattttcagggctttatttttattacactgttataaatggtcaccctgtatttgttcaaaaggcaaagaatgcaaatcgctccaatgttatttataaagatagaacgcaatgtttgaagcacaaatcaggaaaacattacaactgtgtctgaagtttcaagaaaagtatttttcaagctatcatatgttaaatagtgagggcacgctatattaagaataaacaaaaaaagcaaaaggcaaaaattctagagtataaaaaagcatagaggctagggaagcctcggaaaggtttcacccttgtccaaatttttcaaataaaggctgaagaaaatgttctcgtaaccaccgttgtctggttatttggcaagaaagatcccctgtactccatagttcctctccaccagcacaactttaagaacaaagggcactcatggacacctaatggagtgatggagaggaaccctggcatctataattgggagctaaacaagtacatagccctcatctgggacaatgggaagagatgtcactattatagcagtattcacaagagccagaggattctcaaatttcactcatgttttggccctttgctccagttcagcaatgctcagatataggatcaaaacatgccaatgttttgcggtcacctgttgctataatagagggctgaaattcacaaatgatttatttttaaaaagtatagatgagtggactcagggtgatgcctctaatagtgccactctcactgagttgcatttggatgtgctttcttggatgggagagaaaggggttggggttatagctagtgataggaattgggtacaactctgatcttataagcaattgtaataagtgattttcatatccatatgcttgtaaagtgattctactcataccatgggagggacgaagacttgcttatctttcccctctgaacgacaacaacaaaaaggaaataggaagcattaaaaaaaggagtcctggtattctcatatgagtaacatgtacatgttattcaaatatgtcggggccaaaacatttttttttcagaattatgatcttaatgattgctggtagaacactactggctgccaccaatctttctgtctgacatctaatgggctagtgagggagcctcctaagaagtatgagcaggaaagtaacaattctgtaggaaggacagagaaagttttatttcccctcttgcattcaagctatgcatatacttgtcttgtatcaggatgtgagtctgaatcatctttatatctcccacatacaacccataattttattcaagtttattattttgtttatttacaaatttaattaatttgagtgaattcaaaaatttaaagtttgaattcaatcaagttttattttataaaaaagttatagcaaccatggtgggtgagagtgttttatgatgccaaataacttatttgattgaattattcacattcctaacagctgttttggcattgtgtgggcacagcctgtatctgaaaagttttctgcttgaaatgttcattgattgattcattattacaaattttcatcttcttgtttttcaacatggcattttagtgaaatgttaaatagagctattttttgggagatatgccaaaattacaacctattactaagcctatcttataaactttgcttatgctaagctatgcatatttaagtcattttatttttccttcaaagtctgattcattctctcaattacattactgcttatctccccggactcactccaatttaactaggtctttatggttccccaaacaaaatgcaacattctggatgaacatcacccagaatacaaaaaagttatctgataaattcttttgtaatgatgtcttttcacatgtagcctcaaactatgtgtagattgcacttgagacttcattaactagaatatggctaatgaagttgtgagaaggcagctcaattaggaaatatactgatctattgatatagatgtgtctgctagtggatcaagtgaaatgtctatcaagcaaattaggccaggggtagtggctcaggcctgtaatcccagcactttaagaggctgaggcaggtggatcacctgaggtcaggagttcaagaccagcctgccaacatagtgaaaccaaactactaaattatgaaatttattaattttgtacaaaaaaatacaaaattagctggacatagtggcacgttcctgtagtcctagctactcgggaggctgaggcaggagaatcgcttgaacctaggaggcagaggttgcagacagctgagatcacaccactgcactccagcctgggcgacacagcaagactatttcaataaataaataaataaataaataaataaataaaattaaaaaaaataaaaacgcaaattagtggaatctgctcatatgatattagaatgaattgaacaacagtgaatgcaggtactcccctccagcgaaatgaacataatgtatagatgccttcagaaaatgaaaaaaattagctcatctcaaggggaagagagtcagcttgcataaacagaagaaaaaaatgagaacacatgttaatgaagctgtgaatatgagactgcagtagtaaatatagatggaaatcctagaaattaagaaatgatttcataggtagtgattgataaatatgtcctttaagcaagtattgggttggtgcaaaagtaattgcggttttgccatggaaagtgatggcaaaaacctcaattacttttgcaccaacctatctcttaagcaatttagttcttcgttaagctcattcaagtaagtttttcaaaaggtactcatgtaccttgtgaaaatacatatgtatgataggtgagatgctgagagggacagtagattaaacatacattacttatgtgaaacagtttctcagagagacttcttgtagtgcctgaagtcagtgaatgaatgcacagacgctcctttctgtgtattaacactggaggtctggaccagagcagaccacagagtgtgatctgggttcctggatgggaatgatgacaacctggatttgattcaagtttgcttttacttttcttgactcccaaatagcaaacacgtaccacaaaggatagaaatgaaattaaaatgcaagcatgtatacatggttcccttttgcttcccctgtacttcatggagacaagccctcattttctggttttggtagcccacacagagtgagctgtctccccctcagggtaaaagaacatactactatggaattgctctgttttatgctcctggtctcatcagcatttggaaactgcttatgtaaagcataattccattactcaggaagccattgtcacttaggcttactgaccagctacctgatcttcaaattcttgccctggcagcactagggcaatttcctcttttccatacttacagtacaggacttagatgtttcccattctgggtagttttgaacattgtgtatcatagggctttctagtgataaacatacaaaatgggttgcatgtcaaggtatacagatatatatatagagagagagattatatatatatatatttaaattttattgttatgtgtacagaataaaaggtcaagtgctgtctactactgaactatactcttctttaaagtagggcttatcctacttataacttacaaaataaatgatgaggaagccaaagaaaaggagaaattaacctaaacgtttagggaacaccttatatttagtagtagaagacaaagaggagagtgtcttagtttcatttgtttgttttcaataaggtgaatcaagtgtagagtactttctctgctactaatttacttacttagagatatcatctgtatataacttgtttaaattagtaagtacatcataacattttcgaatgacacaatggttaagttacagatattagaatcagacctatgtcggtttaaatcacagctctgtcatttactatcagtttgctataaaccttttcaagcctttgtttcttcatctgtaaaataaggatagtaataagcatctcaatgttttttgtaagaaataaatgaggtaatgtgtacaaaacacttagcagagtgcttggcacatagtaagcactaaataatattattaaatgaatgatcaattattgagctcaatgaaatctataaaatcaggtgccatctagtaagtagcctaagaggataatctacttgactccaagacacttgattacttaaaacttctgcattatagttgattttttttcacaattttcagttttcttattttcttctaaaagttctaagaagctattattgaagtcatgagtcaatataagaacagttgacacctttcttttcctcttcctccaagccacaccaaacactctctattgatcagcttctttattatgctgcaagtttctttcacttcagataatagtctctatttcatgatttttagttaagtactctgactgtgttcacttgcattttcctctatactaaaatgatctgggggtatacatgcatttctaaagtatccattgcaataacaccttgagactcagacattagagcaaaggatgtgaagaagagccatttccatgaatacaacattagtgctttgtatttatgaagcacctttcatctgcatctttcaaagactttcacaaatattatctgatgctttattcactgggccaagctgcaagcaaaactggctttcaaataattccctcacagtacgtcaaaccccatgagggaaggagttgtggataaccgtttgaagtgtcaggaatgctcagaaacatttttaaatagtatatacaaaaataccacctaacaaacgatgacgactatttagaaatgtggcgctttgtaggtataccgctcatagcaaataaacaggaactttatcatattggcattaagaccaacatccacattataaatgaaagctatctgctcaattttgtaactgtgtatcaacctaatttgggacatacgacttgcctcatagtgtatccaaatatattcattaaagcattgcatattaattatagtatatgtaaacagcatgggtaccagaccaggattgtatgtcaaatacttagcatagtgcctggtacatgtgacacattcagttaatgttagttactaatataattattattgtaattatttccagtatgaatttagattatgaaaccaattttctttcaaagaattcagtgatgacttacatatattcacatttgttgctgttgctgctactgctacaactattacttcttttccttatgcctgttaggatatatacttgcaaagtaggaagaaaagaaaaacatgtccccttcctctgttggaacagtagaccaagatggggagaggtaaggctacacagatgttaaggcctcttcccaccttccaactgaaaccatttacacagagtcttgttgtcatgaagactatggctgtgggtattccattaaaacgagtggctaatcatttctggggggaagacagaatcaaattagagactttttataacccaaatgaaataagtgacctacaaagttttagtaaattttattggtgccatgaaaaaaataacatgaatttagacacactgactgtggagatatcacaagtttcatttacttctttttagtgtttttatttttggccctctagtctctcttattttacattcttgttcacataactggtatgctgtgaaaatggactgtttgaaaaaaagagtcattattgttaagaatgtgtaatttttaaagttttctgaggctataaataacttccacagccttgaagaaaacacagtgtttcaacattcatatgctgtgcccattttagagatggagaatatgagtctgagagatgtggagaacttagtgcaaggccttgggtaccatagtattgcactgattccatttgttgccactcagccatctctcctggccttcaaaacaaacaacaccaactgtgcttataccaatcttgtcattcctctttattgcaaacaattaatataaaatgctgagtctgaacagctatgtaataacttataatgaaatctatgtagtgggttattttatttgtaagtccgattcaatatgctcaagcacacatcattaaatgtttccttttaattttgagtagcaaatatcttcatttcagtagcacctacataatttatgtaatctatagtaacagttgttagcttatttggtgtgtcattttatcccaagttgatgctgaaaatatcagaagaggctgcttgatgggcttgctttaaaaagacaactgagcaatttatgtatgctgtttttcttcctgcacattaaagtttaaccacatttacaaatgaaatattatgtacctaaaaaaaattcttatttaatacaataactggcattcatgatgaccatctctctactatgggaaataccaaattggcttcaagtaaatgttattacaataaaaagaattatcttaaactatgagtcacatgtagggattttccttctctaaatacatgttagattacaacaatagataattatgaggatagtttagggttatggtaattcaactagaaactctagaaatagtatcactacatatgtcactcagtataatagttcttttttcattttattttattattattatactttaagttttagggtacatgtgcacaatgtgcaggttagttacatatgtatatatgtgccatgctggtgcgctgcacccactaactcgtcatttagcattaggtttatctcctaatgctatccctcccccctccccccaccccacaacagttcccagagtgtgatgttccccttcctgtgtccatgtgttctcattgttcaattcccacctatgagtgagaacatgcggtgtttggttttttgtccttgcgatagtttactgagaatgatgatttccaatttcatccatgtccctacaaaggacatgaactcatcattttttatggctgcatagtattccacggtgaatatgtgccacatttacttaatccagtctatcattgttggacatttgggttggttccaagtctttgctattgttaatagtgccgcaataaacatacgtgtgcatgtgtctttatagcggcatgatttatagtcctttgggtatatacccagtaatgggatggctgggtcaaatggtatttccagttctagatccctgaggaatcgccacactgacttccacaatggttgaactagtttacagtcccaccaacagtgtaaaagtgttcctatttctccacatcctctccaacacctgttgtttcctgactttttagtgattgccattctaactggtgtgagatggtatctcattgtggttttgatttgcatttctctgatagccagtgatggtgagcattttttcatgtgtcttttggctgcataaatgtcttcttttgagaagtgtctgttcatgtccttcgcccactttttgatggggctgtttgtttttttcttgtaaatttgtttgagtacattgtagattctgtgtattagccctttgtcagatgagtaggttgtgaaaattttctcccattttgtaggttgcctgttcactctgctggtagtttcttttgctgtgcagaagctctttagtttaatgagatcccatttgtcaattttggctttcgttgccattgcttttggtgttttagacatgaagtccttgctcatgcctatgtcctgaatggtaatgcctagattttcttctagggtttttatggttttaggtctaacgtttaagtctttaatccaccttgaattaatttttgtataatatgtaaggaagggatccagtttcagctttctacatatggctagccagttttcccagcaccatttattaaatagggaatcctttccccattgcttgtttttctcaggtttgtcaaagatcagatagttgtagatatgcagcattatttctgagggctctgttctgttccattggtctatatctctgttttggtaccagtaccatgctgttttggttactgtagccttgtagtatagtttgaagtcaggtagcatgatgcctccagctttgttcttttggcttaggattgacttggcgatgcgggctcttttttggttccatatgaacgttagttttttccaattgtgtgaagaaagtcattggtagcttgatggggatggcattgaatctataaattaccttgggcagtatggccattttcacgatattgattcttcctacccatgagcatggaatgttcttccatttctttgtatcctcttttatttcattgagcagtggtttgtagttctccttgaagaggtccttcacgtcccttgtaatttggattcctaggtattttattctttttgaagcagttgtgaatgggagttcactcatgatttggctctctgtttgtctgttactggtgtataagaatgcttgtgatttttgtacattgattttgtatcctgagactttgctgaagttgcttatcagcttaaggagattttgggctgagacaatggggttttctagatatacaatcatgtcatctgcaaacagggacaatttgacttcctcttttcctaattgaataccctttatttccttctcctgcctaattgccctggccagaacttccaacactatgttgaataggagtggtgagagagggcatccctgtcttgtgccagttttcaaagggaatgcttccagtttttgcccattcagtatgatattggctgtgggtttgtcatagatagctcttattattttgagatacgtcccattaatacctaatttattgagaatttttagcatgaagggttgttgaattttgtcaaacgccttttctgcatttattgagataatcatgtgatttttgtctttggttctgtttatatgctggattacatttattgatttgcgtctatcgaaccagccttgcatcccagggatgaagcccacttgatcatggtggataagctttttgatgtgctgctggattcaatttgccagtattttattgaggatttttgcatcaatattcatcaaggatattggtctaaaattctcttttttggttgtgtctctgccaggctttggtatcaggatgatactggcctcataaatgagttagggaggattccctctttttctattgattggaatagtttcagaaggaatggtaccagttcctccttgtacctctggtagaattcggctgtgaatccatctggtcctggactcttttcgttggtaagctattgattattgccacaatttcagagcctgttattggtctattcagagattcaacttcttcctggtttagtcttgggagggtgtatgtgtcgaggaatttatccatttcttctagattttctagtttatttgcgtagaggtgtttgtagtattctctgatggtagtttgtatttctgtgggattggtggtgacatcccctttaccattttttattgcgtctatttgattcttctctcttttcttctttattagtcttgctagcggtctatcaattttgttgatcctatcaaaacaccagctcctggattcattaactttttgaagggttttttgtgtctctatttccttcagttctgctctgattttagttatttcttgccttctgctagcttttgaatgtgtttgctcttgcttttctagttcttttaattgtgatgttagggtgtcagtttttgatcttttctgctttctcttgtgggcatttagtgctataaatttccgtctacacactgctttgaatgtgtcccagagattctggtatgttgtgtctttgttctcgttggtttcaaagaacatctttatttctgccttcatttcgttatgtacccagtagtcattcaggagcaggttgttcagtttccatgtagttgagcggttttgagtgagtttcttaatcctgagttctagtttgattgcattgtggtctgagaaacagtttgttatagtttctgttcttttacatttgctgaggagagctttacttccaactatgtggtcaattttggaataggtgtggtgtggtgctgaacaaaatgtatattctgttgatttggggtggagagttctgtagatgtctattaggtccgcttggtgcagagctgagttcaattcctgggtatccttgttaactttctgtctcgttgatctgtctaatgttgacagtggggtgttaaagtctcccattattattgtgtgggagtctaagtctctgtgtaggtcactcaggacttgctttatgaatctgggtgctcctgtattgggtgcatatatatttaggatagtcagcccttcttgttgaattgatccctttaccattatgtaatggccttctttgtctcttttgatctttgttggtttaaagtctgttttatcagagactaggatggcaatcccggcctttttttgttttccatttgcttggtagatcttcctccatccttttattttcaggctatgtgtgtctctgcctgtgagatgggtttcctgaatacagcacactgatgggtcttgactctttatccaatttgccagtctgtgtcttttagttggagcatttagtccatttacatttaaagttaatattgttatgtgtgaatttgatcctgtcattatgatgttagctggtgattttgctcgttagttgatgcagtttcttcctagcctcgatggtctttacaatttggcatgattttgcagtggctggtactggttgttcctttccacgtttagtgcttccttcaggagctcttttagggcaggcctggtggtgacaaaatctctcagcatttgcttgtctgtaaagtattttatttctccttcacttatgaagcttagtttggctggatatgaaattctgggttgaaaattcttttctttaagaatgttgaatattggctcccgctctcttctggcttgtagagtttctgccgagagatctgctgttagtctgatgggcttccctttgtgggtaacccgacctttctctctggctgcccttaacattttttccttcatttcaactttggtgaatctgacgattatgtgtcttggagttgctcttctcgaggagtatctttgtgccattctctgtatttcctgaatctgaatgttggcctgccttgctagatttgggaagttctcctggataatatcctgcagagcattttccaacttggttccattctccccgtcactttcaggtacaccaatcagacgtagatttggtcttttcacatagtcccatatttcttggaggctttgttcgtttctttttattttttttttctctaaacttcccttctcgcttcatttcattcatttcatcttccatcactgataccctttattccagttgatcgcatcggctcctgaggcttctgcattcttcacgtagttctcgagccttggctttcagctccatcagctcctttaagcacttctctgtattggttattctagttatacattcgtctaaatttttttcaaagtttttaacttctttgcctttggtttgaatttcctcctgtagctcggagtagtttgatcgtctgaagccttcttctctcaactcgtcaaagtcattctccatccagctttgttccgttgctggtgaggaactgcgttcctttggaggaggagaggcgctctgctttttagagtttccagtttttctgttctgtttttaccccatctttgtggttttatctacttttggtctttgatgatggtgatgtacagatgggtttttggtgtggatgtcctttctgtttgttagttttccttctaacagacaggaccctcagctgcaggtctgttggagtttgctagaggtccactccagaccctgtttgcctgggtaccagcagcagtggctgcagaacagtggatttacgtgaaccgcgaatgctgctgtctgaaggttcctctggaagttttgtctcagaggagtacccggccgtgtgaggtgtcagtgtgcccctactggggggtgcctcccagttaggctgctcgggggtcaggggtcagggacccacttgaggaggcagtctgcccgttctcagatctccagctgcgtgctgggagaaccactggtctcttcaaagctgtcagacagggacatttaagtctgcagaggttactgctgtctttttgtttgtctgtgtcctgcccccagaggtggagcctacagaggcaggcaggcctccttgagctgtggttggctccacccagttcgagcttccggcctgctttgtttacctaagcaagcctgggcaatggcaggcgcccctcccccagcctcgctgccaccttgcagtttgatctcagactgctgtgctagcaatcagcgagactccgtgggcgtaggaccctccaagccaggtgcgggatataatctcctggtgcgccgttttttaagcccatcagaaaagcgcagtattggggtggaagtgacccgattttccaggtgccgtctatcacccctttctttgactaggaaagggaactccctgaccccttgcgcttcccgagtgaggcaatgcctcgccgtgcttcggctcgcacacggtgcactgcacccactgtcctgcacccactgtctggcattccccagtgagatgaacccggtacctctgatggaaatgcagaaatcagccgtcttctgcgtcgctcacgctgggagctgtagactggagatgttcctattcggccatctttgtcactcagtataatagttctaatggttggctgtattaaataaatacatagtgtagcacttcataggtatgccaaaatctagtcttaaaattcgagggatactagagagctgtcttgttaaaaaatgtgaattgaatgttattttatattttatggatttggggaacttcttacacgtaaattattgtattcttcataatgtaacatactaatacactcaatttgtataacatctccatttgaaagaactgaaaatgtaagacaaacaaacaaaagcattcgaattccctaaacattttaacagaagtttgtttatacgggagtataatgagtagaagtatctgaacaacagaatttttttgaaaaagggctttaaaaatgattgttcattttgtgcagcaaaggaaacaatcaaaagagtgaaaagacaacctatgaaatgggagaaaatatttgcaaaccatacagctgagaagagattaacatccagaatagaaaaggaactcatacaattcaatagcagaaaaaacaaaacaaaacaaaacaaaacaaacagaaaaactaaacaacttgattaaaaaatgggcaaaggacttgaatagatatctttctaaagaagacatgcaaatggacagaaggtatatgaaaagatactcaatgtcactaatcatcagcgtaatgcaaatcaaaaccaccaggagatattatcttatacccattaggatggccagtataaagaaaaatggaaaataaagtgttggtgaggatgtggagaaattggaatctttgtgcactgtcggtgggaatgtaaaaaggtgcagcttctatggaaaaaagtatgaaggtttttgaaaaaattaaaaatagaattaccatttgatccagcaaccctattaaagagaatatatccaaaagagtggaaaacaggatcttaaagagctatttgcattctcacgtccattgtattactcaggacagccaagaggtggaagaaatctaaacgtccatcaagggaggaacggataaagaaggtgtggcatatacatatgattgaatattattcagccttaaaaaaggagatcctgtcatttgcacaaaatgatgaatctggaagacattatgctaagtggataagtcagacacagaaggacaaatactacataataccacttatatgaggaatctaaatctaaaatagtcaaactcttagaaagtactaatagtgatttccaggagttgagaggagggggaagagggaagttgtttaatgggtataaatttttgattttgcaagatgaaaaggttccagatatttgctatacaaaaatgtacacatagttaacactactgtaccatacacttaaaattggagatggtatattaaaattaagatggtatattttatgtgtttttatcaaaataaaaagtcatgccatttcttcattgaatggaatatttatctataaataattgaataaataattcaatcttttattttacttaaatcacatggcgatagtgtgattctgtgggtcagcaatatcacagtggacaaatgaaagcgttatgaatagggcagacaagttataatggataattacatggtcatcaacacagattttgctggtaacccaagaattgtagtgttcttaataacgtatgttttaatagatagaaatagttttttaaaaaaaaaattatttccataagcttttggggaacgggtggtatttggttacataagttctttagtgttgatttgtgagattttggtgcacccatcactcaagtagtatacactgaacccaatttgtagtctttcatccctcaccccctcctgctctttttcctgagtccccaaagtccactgtatcattcttatgtctttgcatcctcatagattagctcccagttatgagtgagaatatacgatgtttggttttccattcctgagatacttcacttagaataatagtctccagttccattttaatgcactgaattgtgtacatatatatcatacagcctattccttaatgtaaataatcagttgtatttggaaaatttgggctgtgtcaagtaatgataaaagtaaaagatatgtgcttgctagccaacaaaacctggagatatacatccatatttctaaataaataaaataataaatagccgattatcttggtttaggttgccataacaatacgccattgactgggtggctaaaacaatagaaacttattttctcacagctcagagactagaagttcaaagtaccagtgatagagacaggtgacagtcaagagtccccggcaaaaccctgctttcaagcctataatagcctgaaggctgaaaaaccagactgctggtcccggatgaagcccaccctttcacgactaattgtctctgaatacagcccacctgtgcactgggaggaaggggtggagcctcaggaagttctccccatttgcagtggggaggagcccaacctctcctgttcctgtgtggtgacctgggattcaatctgtgaagtggagggcctgttagcatctcactttgctgagttttttttcctttttgcccagtaaattccactcctcacccttctatgtgtccgcaagcctcatctttcctggtcgtgtgacaagaacctgattttagctgaactaaagagaatgttctgcaacaccagtatggttggtttccggtgacggctctattcctagcttgaagatagctgctttaagagagctgcttcctcttttcctaattgaatcccctttatttctttcttttgcatgattgccctggtgagaacttccaacactatgttgaataggagtggtgcgagagggcatccccgtcttgtgccagttttcaaagggaattacactttatacaaaaattaattcaagatggattaaagacttaaatgttagacctaaaaccaaagaaaaccctagaagaaaacctaggcaataccattcaggacataggcatgggcaaggacttcatgactaaaacacaaaaagcaatggcaacaaaagccaaaatagacaaatgggatctaattaaaccaaagagcatctgcacagcaaaagaaactaccatcagagtgaacaggcaacctacagaataggagaaaatttttgcaatctacacatctgacagagggctaatatccagaatctacagagaacttaaacaaatttacaagaaaaaaatcaaacaaccccatcaaaaagtgcgcaaaggatatgaacagacacttcaaaagaagacattaatgcagccaatagacacatgaaaaaatgctcgtcatcactggtcatcggagaaatgcaactcaaaaccacaatgagataccatttcacaccagttagaatggcgatcattaaaaagtcaggaaacaacaggtgctggagaggatgtggagaaataggaatgctttttcactgttggtgggagggtaaactagttcaaccattgtggaaaactgtggcgattcctcaaggatctagaattggaaataccatttgacccagccatcccattactgggtatatacccaaaggattacaaatcatgctattataaagacacatgcacacgtatgttcacggcggcactattcacaatagcaaagacttggagccaacccaaatgtccatcaatgatagactggattaagaaaatgtggcacatatacaccatggaatattatgtggccataaaaaaggatgagttcatgtcctttgtagggacatggatgaagctggaaaccatcattctcagcaaactatctcaagggcagaaaatcaaacactgcatgttctcactcataggtgggaattgaacgacgagaacaattggacacagagcggggaacatcacacactggggcctgttgtggggtggggggaggggggagggatagcattaggagaaatacctaatgtaaatgacgagttaatgcgtgcagcaaaccaacatggcacatgtatacatatgtaacaaacctgcatgttgtgcacacgtaccctagaacttaaagtataaataaaaaaataaaaaaacatgaatgggatcatactatttccattgttttgtagcatgtttttctaagaaatgcatttggagatctttccacgtatgtacatacaaatagaccttaatttaaaaaataatgcttccatagtattctataatataaatggattataattttaaacaactttttgtgggtattctgattacaagtgaagtggagcatcttaaaaacagtttgttagccatttaaattttattttttcatttttaaaactgaatcgcctctttataacttctgtccattttaatgtacattggatgtttggtcttttacaattgatttgaaattattacataaagcccaatatcaatccttttgtgttaaatacattgcaaatattttcttccatgaaaaataaaaagatagctgcttcctcgttgtgttctcacatggtggggagaaagtatgtctcttcttagaagggcactaatcccatcatgtgggccctatcttcatggaatgatctaaacctaatcatcccccaaaggcccaattgctaaatactatcacattggtggttagggctacaacatataaatttgggggacacaattccatacatagcaccaactcatctagataatgtattaacactaaataaatgttttcttcaactcatgttttaaaaacttgtttattttctaccatatcttacattccatattatgtgtcatgctttctaagacagatggttttaaaacttatttcttactatactttgcatcttacactatatagcataaattgattagctaacatgcctttaaaattgttatgctcacttggaactaggatatctaaattccaatataatagaacaggtcaggtctcagacattctgagtaaatgatttgttactgtatttaatcattttcagctctcttatacacagagaggtgcaaatagcattccatttatatatcattccaatcatcattctcattataagatgtggtaagttattgtgattataaagttgctggtacaataaatacttacctttaaatataaggtaaggaaaatgaggcatggaaaatttatgttatttgttgaagattacatggtcaaccagtggtgaccattgagatgagtatgcctttactccaggtcataatcactttccagctttacacataatggtcagcatcatacttgtgtatgatgctgtagtctttactgtgtagtctttacttgtgtagtctttactgactaacctcattccaaagattacagaaataaatctgccatttaacccttcttcctcttcccctaacagatatatctgcctgaaaaatcaccaaaaggaatagtggatggtcatcagaaaaggttatgtaactgacatgggaggagggtaagcacatgcatattaatacaatggaatgatgagcaggtaattgtaaacagtggtagagttgaaaaagagagaacagactagtctacaaggtttcacagaaaagttgtatgatacacagggaagggaaatggccctaatgaaagggagcagggtgcctcagtggcttgggcaatggtacgagggaatggcagagcagcagaagtaaatataacaattaagagaggggaaaaattatagacatgctaatgctgatttaataattttcctagcccaagccagctatttaattttctaaacaaacatttttgtactgcttattaagtgttaggtatgctatgtgcccaagtataatggtgaaggtgaaagtcacttctctcaaaagcgcacacacacacacacacacccctttgaaaagcttagtcagtgagaagaaatggtgagacatgaggttctttgtgtctccaggagctcatctcctattctcagctgagttgcaactactaaatgtcgcattaatccattaataatcactccacaaatattctaggtttcatgtgagaacaggtctctattgtagagccatttatatgtgtgctttacaaggtgatcagtgctatgtcagtagctgaatcaggtaataggcacagagatatctctcagatttaggattaagttggaatgttcaccctagatatagtcttctatttctggagggcattccaaagaagcaaaatatacctttctatcccagaacagactagactttgttgaatcctattgtaaccgtgtcaccttggattagttaccttctatgtcctggagaattagcaagggaaaaactgttgctggtacatcttgattatttaacatataatggttatttgcagggtttggctaaacttgaatccaacgtttataaagaaatttatgtttaaagcccttattcatgttactttatcaaaggcaatcaaattttatcagtgatcattgcttgctcttctgccttctattaagacctcaggtcctcaaaggacaatattttccagtgacaaataagtttgcctccctggagaggagagcatgactaggtagaagtggtaaatggacatagtcaaatgagtgcaggcgtggggacagcaattggtagatggtctttaaacccaagaccagatatttcaattagagaaccaattaggtacctttttatgttgctgtgaagcttagagcacactgaggagaaaggaatctgaataggtaagcaaggaagccaatgagggagattgggtggtaatatctgggtatagtgtttagggagtgtgaaagtacttagtgacagctgtataaaaatacctgcttctgctacatttatgtttgtgtttgggcttgtctgtcttgtccctcaactaaatggcaaattctaagaacagggagtttcttattttatcaatccacacactgcctagtgccatgcctcactagataagcttgtcaatggagtgacaaatgtgttccagtttctgcaaaataaactgaagcaaaggccaatggaagacatttttgaggtatgctttgtttggactgttttttttttttttttacattggaaaactattggacatttaaaaaatacgtacacatgtagattgactatattacatttaaattcaaaagttttagaacactttttgaggggttaaaaaggtatgattttggcccagtatacctttgcatatttcctgtcctgcagccacactgcaacatttgccattcaacagacccactggtgctctctccatctctgaatctttgcattcatacttgacttcccaccttgaatgtcctttcatcccatattgtttgcatcctactcttctgaggcccattaccaatgttaccccttttattaaccattctttgaaatctaaagaaagaagctacagtaatctcttctgaccacctatagcactgtttcctattatgcccccaatacctcctaagacacatgaagccaggtggtggcagaaagagaacagacagatatagaaaaaagcagacaggaggcagttactgtgtcaggaatagcagaaccctggattgaaaattcacaaactcctgctgctgaaatttctagagcttggttcattttcagattttggacatgcacgcttataataaatccttatcatctgagctagtctgagtaagtctctgcttcgtgcaatcgtccaacaggcctaatgttgtgctttgtatttgtatacttgttttatcttccctaacagaggataaagccctttgaaaggtaatgactctcatagcacctgcagtgtggtacacagccagtacttagcaaatgtttgttgaaaaactgaatggagaaaaccagacaagtcatcctcaaatcatattgaatttccatccatttttagcaaggcaagaactgaacataggtagttcataataatattttactaaacaatgctttttcaaatgaatgatttgcctgcttccctcttcactgttatagatttcttcctattagtgttctgcaaatgcgtttatgacacgtctttgccaaaggctaacttcagcagcagcaccatgtatcaaaaaagatgtgtcacatatgcaaattacataatataaagccatgcattcctctcattgttttaactatcttttagtttaaagggtgctggtctgtttcacatttctttcagagaggccaaaaacatacactctacttgaacttatgtcatttactcataacgagaaacactttgtcaaccttattttcacatacatctggtgtgactagataccgtcacggaaattatttttaacagtgaatttgaaggattaaaaggttcacgaaagtcacatgaaatacataactatgaagtatagtctcattttatggatatcacctccttacacttatatagtgttttatggtttgcaaaacactatattatctcatttgctccttacaacaggagtctgtgagatagacatggaaggcatcattcccattttatatatcaaaaaccagaggagttaactgactttactaaggccatagagattgtaagcagtaaaaagaacccagaaaaagaacccaagtctttcaacttccaatccagtatcttttgacttcaaatccagttattttcaactattctatttataacaatgttttccaaatgtctggctatgatcaattgatgggttatgaaaccaattttgactaggataaaaaatgaaatagaatataatatatcctagaacatcacatttagtaaagattttaattgtttcatgaaacttttgtttcagttttgtatattatgatgcaaaatatattttaactgtgggaaacggtgagaaaaataaattaaaagtcactgttctataccatgttgcctattaaactaattaagtagttcaagagtactttgtgccaccaaaatgtccacattattggttttaacattaaaataattgtagataataaaaatatggtttctggcaatccttgagttaggtattgtttatgtgccggtaatttcattgcttgagtgcttttaagagttctactggaatattatataaaaatttgggtttttatacaggtatgatggtggttttattactgcttttgtggaaaaaaatgctaattgtgctttataaagaaatcatcttagaaaatcttcacctgacttaaatatattcaggagaatgtaggaaacactgactatagataataccctggtattcacagatctaattcttattaaattaggatatctgatatctctgtaacttattaacagcttatttaattatatgtattaccaatgaataatcaaaatgaataaatccacaactgttttcttaattacaatgaatacaatggctcttcattatatgtaacatatagtacaaaatcattagtagggcctataaaccccagcagctttatcccctatctctctactctgcataagccacgcacatctgtgtttccacagtactgtattatacatgcttcctttgctttgatgctattgcttctcacccttctcagtggagctaggtcttaaggcatgaatggaagtcttttaggcaatgttacctcttctgtgatgctttcttccattttcctttctgtgttctcacacaacttattatctatcagaaaccaacattatcatgagtatttgtgtgtgtgtgtgttgtgtcagtgaggcagtgagttgcttgaaggtgaggtctatttattattcatttttgaatcttggtgccctgcacaatgtctaggtcatagtaggtacctgattaaatatgtgagcaaatagtattaatatttaccttgaatttacttgggcaaatgcaaaaatacataatgcaattttacatgtggtcataagaatttttagatagatctatcaatctatctattcttttttacaccgaaggctttattgttctttactgaatgattacatattaaaatattaatttaggggcagaaaattatgcttaaacttattattctgtggttcatacaatagcaaaggagctggctgatttggtctgttcaagccaacacttaaccaaattgctgacatgattttattcgacgacgtgcataatatggaccaaggcatttttattttcccacaggctgagatggtggtttagagatatagcctaaatgttagaattttctctctataatttagtcatcattgtactatgaaaaaaacctaaaagataagcaaatttttatggatagttgggtcatttaatattttctgatatggtgctattaaaatttcatttatattcctatagggttttctcctcagtgtttcagctaatagactttgaagtcccaatgtgtctatctctcctctgagggattttaaaaattgttgctctgaaaacagagcactaactttcccaacagataaaacacacgaaccacagctggagaagtgtgaacgtcaatttatccttcatagcacataaaattagactctatgattgtagaggaaggcaatacttaattgaaagatattttaatacataaacatattagaaaaccatctgtctgaggactctactgttgtgtatctatgctacaaagtatttttaaaaatatggtaggctaaaggataatcctaattcacatgtgagtttgggagataagtattttttattttcctggcttgaattctttatacatttctcccatgtatgtgattgcttacatgtctaaccttcagctaaataataagcttcagatggtatccaaatctttctcatctccagattcccagagtggtcaacaccatgttggcacattataagtgtttagcaaatgtttactgagaaaataaatgacttattattaaaaccctgatgctttcaacattttccctaggagccatttgatattttcctttgtgttacaatgttacaaagatgaaaaccccacaatttctttctttgcctgttcaaagatgtggcagtaatgatagaggaagaagttggattattcataacatacaagataatctttcacggcaatctaattctttggcttccatgtgcaaaacatctgaaccaatggtgaaaaatgcaaataatagaatttgtatcttcaactaaaaatcaaactgctgaatagcaggaaacatctgggtgattaatccattcacatattcagtattgaacactcagagagttgcaagaatctaaatgttgtccattgcttttggattacttgtagaaatcacaattggctttcctgtgttttatttaaagttcagtgtaactgaggattcattatgattttgtattttgagatattagcaggtcatattgtacatttttcttattccctttttcaaaacctgtattctaggttattaaagtgcttttaaaataacatttttagaaaatagaaattacacctatctaatgttaaatacaattattattataacaaatgtaagaaaatattcagggaaacatactttgtcatctgattccaaccaacaaaatatttttaatgagtgcatgtctattaaaagaatcctcaagatgctataattattattcattttctagaattgtttcaccatgaagctttatgcttctatggggactttaatgtttatgttttgtgatggctacattgactattaaaaagcaatttggctgacattttaggtcttttgttgccagttttaattggattgttcatcaagcatcaactcccccgttaactgcaaaaatttcaggccaacgtcagtttacagtaatgactgtttaatgattttatcctgtcagtatacaagcttcgtatggatatatgcatgattagtttcatatcaagacctgtaattaaataattgaagcctaaacagaatggatatcaaacatgaacacatatttaataaagactcagaagcttatcaaaatactgattagcaattaaaagtcaatgttttgagttcatctggtgtcagtacatttatgatactttagtaaatatttgtatgaagattttgcgtaaagttaaaagacagaaattctttttggaaaagcagcaaaattgctttttaaaaaggtaatttatatccaatgtgtatctatctgactgagtgagaaaactcattttaagtattatttcatctggagaaaaaattagccaaagcagaagaactctagagtaccaataaatattcttatcaatcagacacaattccaatccttaaaaagttgacctatgtacacctaaactaagctgtcacctgtttgcatgttagaatgaaaggactgaggagggccttggaaactatttattctaacttacttattttacagatatcgaagtccagatgagtaaagtgacttgcctaacatcatatagctaattagtggcagagtcaagacaaaaaatccaggtccaacattttaacttatatattcctggaagaaagcagtttaaaacatcttttgtgtattggtaaatttattttcttcccatttcattacattaacatgctttgtaacaaaacaagctaagaaacaaattgtttaaagaggtgtacagtaagtttcactttgtcttttctccccacccacttcatttctcctccaccccctgtaaccatttttactagcttcttattcatctttccattatatttcacaccagtacagaatatcagaatatatattataatatcactctttctgtacacaaagcatagtatattatatttacatttttacaccttacttatttttgagatagggtcttgctctgttgtacaggctggaatgcagtggtgcaacctcagctcactgcaacttcgacttcctgggctcaagtgatcctcctacctcagcctcccgagtagctggtaccacaggtgtgcaccatcacacccagctaaatttcttagttttttttgtagagacagggtttggctgtgttgctcaggctggtctcaaactcctaggctcaagcaatcctcccacctgggcctcccaaagtgctgggattacaggcgtgaaccactgcacccagaccatttttttttttttttacttgacaatacatcttgagatctctccataccagtgtatagaaatctttcttgcgttctttttctttaagcctgcatagtattcccttcatggatcttatagtttattcaatgtgttggcaaattattgatcattatttgaaaatgttttatatgctaaaaattatttcacctacatataggaagtacatatttgcataactgaaacttagaaaatgtagatactgatataaaggctgaactccaatacaccgtgcacagcactaaggaactagaaaaaccattactttttctttgatttaaaattctagttctatatgtatagttattatttatcaattataaataaaaattaatttaaaagatcataaaaataaagttctagttctaaagcctgttgaataagatgtttttcagcatttactggcatgggtgagtgaaacaatgtgttattaattaaaatgtttacaatgtagcacacagaacttttaaattttaagctatgttcagtaagcacaacatttcaaaactctcccaccttcagtcccatagatcatactactttctttctgttcatggtaacccatatatagtcttcaatttaaaatagtttcattaaacattaaaatggaaggccagcctatgctgctatagtatagtgaaagacattagggagacagaccaattaaggtagaagcagatttcttgttaaatgacagatcccagattcccatttcatgaaacatgtattcctgccacatgccaaattcccattaacttcaagaaggaattatgcacagaaatacgtaagctgaagaaggcaggatgaattagtccagcgcaatccttaaatgtcagtttaaaatgcactggatgctttaaattatgtgtagtcatgttgtttgaattgaatattatccactcacacctactctctgatcacatcttcaaaatgaatggggcaaagaattgcttggaatagagaagagacatgaacagctcgatttggaattgtaagaaaagataaaattcaaaggtgtgagtcatgaaaatgtaatgattcctcaagaaaacagcttaagagaaagaaactactttccctcagcatataaaatatttacatttaagaaaatgtgtagaaagatgttaaaaatcctattaattcaggccagttggagagtcaagttgtattaagtgttaagtccatataatatttaaaatataaatgtgtgatagttactttcaaatgcactgtatgaatgttagtcactacttactagtatcctatagaagtttctagactcactggtttaaagaaaaacaataaaaatcttcattgtactactattgcttttaaagttcttaaaatagtttattctcttaggcaggtgaaccaaatcccctatattctttctttttttttttcttgagacagaggcttgctttgtcgcccagactggagtgcagtggcaccatctcagctcactgcaacctctgccttccgggttcaaacaattcttgtgcctcagcctcctgagtagctgggactacacgcacacgccaccacacccggataatttttgtatttttggtagagacagggtttcgccatgttggccaggctggccttgaactcctgacgtcaagtgatctgccctccttggcttcgaaagtgctgggataacaagcgtgagccaccgttccctgtccccctacattctttatactactctttccatggaatattccggggtaagattcaactagtactgtcaaaagtttttaaaattatgagacttttctatattaaatgaataaaaaatttgccccttaaatggcatataaaaagtgtaaacattttttaaaaatatggtctttaaaatagaatagatacttggtaaataataatctgaaatcatctcggtaaaaactctaaaataatattgtatactacaaatttttttctgtgccataaaagaagattttcattaaaaagctgatgttgaaagggctgatatgtcatactttgtcaattatgccaaaaaatgaaccttttcttattttcatgaattgtgcagacctcagtttgcaggaacatttgccactagatgggaccttatatctgtggtaataatctagcagccaacttcttttcatccagtttttataggactcaggaacacaaaccttcttaagaaaagtaagtctttattgacaaaataaaactttataacttacgcaactagccagctgggtcattgtaggattatttcctcactgtttctcagtagatgatcgaaaacataacatttagggcaatttccttgaatcaaacgatgtcctacactaaaaaagcagcaatgtgcctttctaatactctcaagcaagacctctgcttttcctttagtgatacaatggcaagcttggttaaaacattctctagaatttatctgcctaagcatgcctgtgacctcttctagttgccttggaagcactgcagttttctctgaaaccagatgtatcaagatttttttttctaatatcatgatttcttatgctataaagagaaggtgtgtggatggcaagtgaattttgctgtttgttaaccaaactaccctgaggcaatatagagtaggaattaagaattcggcttctggcaataatggtggactagaaaatgtaaaaagttttagcctacaaaaaaaaaaaaaacatgtaaaaatactggataaacattgcatgtgtccttttaaatgaaaaattgagctcacaatatgtggaaacaaaagcaaaaacaaaacaggagtcaaaaccaaggtgggaattttaaacctgagtggcatgttcaggagtctatgttgcagcttctctgcaagtaggtaacataaagatatgggttttaaggctaaggttgtcgaattaggaggtgatgactttggtcttcataaggtagggttttgcaaatgaaacccccgtatgttgccaatatatggacccccagaatgctacacttccaaaaagaatatactgaaagaaatctgcccactcacacaaagggataacaaagaagcctgtctgccctggactgggctctgggtgaaaacaatagaaaattgttattgagaatttataattatgggcctatatcaaggatggatttagagttgagtgtatactatccatgtgttctaatgactaccagtaagagaaattaacattaatacaaaggattagagagcctggcagaggcaaatgcaaataagatcacaacctaaagttaaaaattatataaggaaataatccaactgaaacaaaaggttcaccaaactataagattaggtccctaagaatttcagataacacagctcttgtttagagactgtaaaaaatgcatacgtttaaaatggttaaagaaagaatgaaaagcataagaacaaagcactatttttaaaaagagatcatatagacttaaaagaaagttgtcctaaaaatatatagtatcaaaatgtgaaactcaatggaaaataaaagctaaagggaaagttcaatagcaaatgaggcacaaatcaagcaagaattcatgaacttgaatgtgtatctgaggaaattacccagaatacagcacagagatataaagagatgacaaatctaaaagaaatgttaagggtcatggaggatagaatgaaatgatatgatatggatctaataaacattctagaaaaagaaaataaagaaaatgggaagaaataatgatgatggagaatattctaagactgatttaaaaatctgagaatctgaaaaaattttcagattcaggaagcatgacccgtcagtaggaaaaaggaaaattcatagttagattatctaaggcagctatgaaaatgcacctcccaatctatttatgtgcataattgaatgatagccccagctcctgaccttctgaatgtagtactggattcatgctgagtccacacttcttatgggctacttccagccaatgactgtactaatacaggccattcctacaagatggaggacccctataatgggtaactttggttcaaggggtctccatcagcctggccaaaactttcttggatctgcattgtagtctgaaactcttcctacttaatattccctcttatctccctcttcacaggtcagaccctgcatcattctaaaggttctccctcccttctcctgctccctctccattatccttcaaaggatcctccaaaacactctagcacatcttattccatcttggcagctgcttcttggatgatatgaactaacacagcaccatacataaagatataatagaacaactagatagaacagacagattagctacaatgaagctataattagttagaataacaacagattacttaatggcaccataaaccccgtctctactaaaaatacaagttagccaggtgtggtggcgtgcacctgtaatcccagctactcaggaggctgaggcaggagaattgcttgaacccgggaggcggaggctgcagtgagccgagatcatgccactgcactccagcctgggcgacagagcaagactccgtcaaaaaaaaaaaaaaaaaaaagtatggaaaactgttgtttgcttacctagcagccattaacctcttttgcattgctaacagaattcttacattgttcaggtatgaaacatgtgccccactccaaactccattactggtttaagcaagtcataatatttcattcttctttgccagtgactatattagtgggtgagcatgccacccaattctggctgagaggaagtctgaaaaaaggtttctggaaaagattatcttgtctgatagcgagagagagataggcaaggagaacttggctcttcctttcagcctttggacattatcatcgtgaggacatgatgtttgcagctggctgttatttaacaactataaaagaaaagccaaaagtgtcacagagaagctgactcagatttgtggtatattgagctgctcaattaaccaaccctagtactgcctagctctgaactgcttgttatggtagaaagtacaggtgactcttgaacaacacgggttggaaccctgcaggtccacttacatgctgatttttaaaacacagatagaaaatacagtattcatgggatgccaacttttggtatgtgctagttctgtggggcctactgtgggaattgtgtatgcaagaattttgatatatgaaggggtcctggaaccaatctccagcatttactgagctatgactgtgtacatctttattgttgaagacattattgttggatagtatgttacttgtaccaggaataaatctgttagttcatgaagtaatattttcaaaatgcttagagaaaacaactgtcagtattgcattccttatctagagaatttcttagtcaagactgagggtaaaatgaagacaacttcctacaaagaaggagactttaccactacagacccttgctgaaagaattatgagaggatgtacttcaggaagcataaaactgaacccagaagaaaggcatgagctgcaagaaaaaatggtaatgtaagtggtaaacatgtgggtaaatctaaataagcattgaatgtggaaaatattataataaataattttggggtgttaagaagaagtataatcagaatactggatgataattacatgtaaatgaagggataatgatcaaaattaaaacaatttaatttccatctgttgtttaggaaaagggtagagatactgatttaattttagactttaagacaagtaagaatgaaaacaatgaaaggtatctacaaaagtaataaaccttttcgatgaatatcgattgaaaagcataccaaaaatatttatctgtttatgtgcaaagtttaaagttttacaaaattttatgagtaaatattaaataacattttcagtatgtcataaatatttcataacaggaaaataaaggccaaaagaagtgggagatagcaaaaaagcataataaacttgtctggacatgttggaaattagatgggctggacacacaaatattccttttttgtgagtagccttcctgaatcactttcagtgatagtctgctaattgaaaatgcagagctcttcttcacagaggagacagacataaagaagagagggatccaagcaagcagaacttttaaatttagttttattattttattttttttaattccaagcaagcagaactttaacactcatccactctagcttcatcaacatcttcatttatttttggtttttgtatcttgggtttccgcttaaaatattgctttaagaaagggttctgcaaattaattctaagcagtcatcctccttctcatgtttcctcccagtattcctgacattaaactcctgaatctaaaataaaagttggaattatttaaaaataagtaaaataaaattaaataaaactcctgtatactaatactaactttctgcttactgctcttaacctctgaaggtcacaatgccaccttctgttagcttgagatcagtgttagtattccttttttgaaaaaaacgccacttagtaatcctatgtctgaattctgattgtattcaatgtagttatataaacttaacaggaaggaatgagtcccttctgacaaactgttgtttcacttatggtccttatagccctgagttttgtctttggagtactttgtcaagtattcaagggttctactgaaaagttagtactcagcttaccattggcctttttgactttgaagaattggtaaagtcaccactcatcattttccccaaatgtaagagtctcttccattattcagtctagtataaattcatttttcattctctgaattttattcaattccattttatgtattttgatgtgcagtgactggaagagtttaggtgcagtagaattgtgcaacaaggaagaaagaagtattctatttaattgccaatacctttcctgatgataattaacatttaaagtgtggaatatccttccttgtattgataaatttgctcacacaaacatatataatattttatttgccatttcaaataatttaatattgcaaaggtcagcaaaccttttctgtgaaggactggacagtaaatactttaggctttgcaggtcatatagtctctgtggctagtattcaactctaccagtttagcaccaaagcagccacagacaatgtgtaaatgaatgaacacagctattttccaataaaacttgattttcaaaaacagtcgataggccagatttggcccacaggccatagtttgctgacccctcttgtactgtcttggttttcattatccagtggattcgtttcaggaaacagagttcactaccaggatatttaattgttctcttaaattgcaaactacttttgttccagtagggacagttaaatgcctaggcagataaaacggggtccctggagaatctgcaactggcctgcgcactgggaggacgaggtggagccccgggaagtttgcgttgtttgcaggtgggaggagcctggactcctcagtttttatgtggtgacctgggattcaatctgtgaggcagagggcttgttagcaggactccatctcactttgctgagttttcttcctttttatccttttcgctcagtaaagtcctgctcccctcacccttcaatgtgtccgcatgcctaaactttcctggtcatgtgacaagaatctgggttttagctgaactaaggagcaaagctctacaacacaatgagtggaattttagtgcaaaaatttgcttttgaggactgaaataaaataatgttgctttggtttttcaatattctaaaggtatgtcagcttaatagtcaagggaatgcatttatatttctagtatattttaagccataaaaagtaaaagaaggaatttcatctgtcaatgtgagtaaatcatatgcaactcaatcacctcaaggaagattatttacaaattttacattttaattcgtagatagcacctaatctgcctataattttgttgacagctgaatttctgctattttatctgcctacagagaagcccttgaaattgtagaatctgtatggtttactgctttatttgaacttgatttctgaagcatctgtataaaaatttaagtgaaaattatatttttaattagctgccatttatatttaaccaaacaattcatctttattaaaaaatatggatatcagcagggtcatggtataatgtatgctgattacacactgtacaagagtgctccatttcagagtgtgccattcacattggagatactagggatcgtagaggataatgaaaatcaacagacttattaaaaggtttctggaatatagctgtagagagtcttattctaacaactagtattttacagtaagtttctgatggcagtaaagtgtcttgagggaaggctgtcattcaataattgtgggcataggttatagcctacctctttgacaatactgcagaaaagttaggaaatcatgaaaagtttatactgccctcctcaaagacgattcatttctcatgcttctttacagaggggtagttcagtaggcatagtgcacgattttcttataagtcccgattgcagtgctttttaccatacatttaatagaataagcatttagatcatacaaggatctaccaggaactatgcagtgctttcttagaaatcttgcttttcttttaatgtcatgttttaagttcccctagcacttgtaaacgtatgccactgagggaatggttttcaaattgtatttcatgagcacgtcttagggactaggatggggcctgaagctttgagtatctcacctttacttttacccattatatactttgaggtcacatataggatctttgtgcaaatgggaaaagttttaaaactgttatatgcagagggcagttccaaatacactttttcccctggaagttgactctaactgaaagatgccaacaacaatatttgtggcagtagcaattcccactctttaaacacctcatacatggtaattcccaccatataatctctaattctcacaaatatcctgcaaggggtagttgatactattctcattttacagatgaagaaagcaaggctcagaacatttaagtaacttgcttaaggccacccagttagtaagtggcaaattgggaactaaccttaagtctgtctgacctcaaatattcacaatcccatacttttattttaatataagttatttattagcaggaaaacacaaaagaggttttagataccccccattttaagaggatcattcttcccagtatagattagggattaggctcatggaaaattaaaccacaaggtctaaattacaatatacttatttagtgcataaaaacacatatgaggctagacagaaaaatgccaatgaaataaaattgcattttcaaactccttgcccaagcactcatttctcaacttattatcttattctgaaatatctccggttaaaattacaacccttcaaggaccaaagcgtgcttatacacttcaaacagtaaatttcactaagaaaatatggttgttagcttttaagaaatatagttctgctagagtaagagaaattcataccattggtgattcacatcacataaaactttatttgttgcctcaatctgattttgaattcaagatggtgtttggtgatactattatttcagttaggcatctctctttgagcagaaattgggactttagatggcttatatcagtgatggtttgcaactgtgatttaaaacaaccaaatatacctgcaaatgactttgtagcctcaggagaatgtaaagtgaggtcaccagcagggacaagcagagccttcagtcactgatggaaaaatcattatttcactacctctgttaattagttagatgtctgaagttgaagagaagtgtactagatacactcgccaggactacaagaaggcatataggaatagaatccattattttctgagcatctcaaaagggacaagtactatgcacaagggtacagatattaacacgacttggtccctaaattcagggaacactaggttcagggaacactaggcttcatctcttgccaacccactttccttgtcataccttcatctttgctgctgcattggaaagacctttcttctctctctttcatctttagtttgtgtggtcacttgtactgttattccaagacaagctcaagagtttcatgcttaacaaagatttttcttgaacattccttcctttgtgccccaaccggaccattctatcataccacttgttaaacattattgtactggttgtttacctttatgttaaccttactgtcccatattacttatttctaataaatccctcaaaagtaagggttattttttgtttgtctcattaaataactaatattttattcaacaaatattacttgagcctttttatgaaccagcagtacagttatctaagcacaccatacacttaatacatgtttgttaaatgaaagaataaaatccaacttccaaacttacatcctaatgatcccatgcattcttaaacacaactcttccaccaacccctctagcactcggattcagtttgtgttgaattaactcacatttactgatatacataaaagttgtcaagttgtcatttgggtgtattctctctcctcagatagattaaaaactccttgagggaaagggccatataaaatactctactttattttcctatagctcttgacaaagggctctgatctatcaaacactcaattattaccagtctaagtaagcaatcattttttttggatgagcattattatcatgatatagagtaatcaccattcatctaggctatcaacctattgctcaagtcaacaaactctggcccctgaattctcagtcatcaaatctggtctccaaaatgtatccctgtcttatccctgatgcaagtggctccttaagcattgcctttaggacctgactatctctcacttgcactatgaaaacagcctcttatctgctctcctgcttttagtatctcctcctacaatccatcactgacactgcaaccagggtgggctttctaaaaactaaatctgactatttgtgacagagaccaccaagttgttcactacattcctctcctcttcttccaaggaagaagttagacctcatttcccaggctttcttgcagataactgtatacatatgactgagtttagaaaatagaagtgttgagtaccatttccaggtctggtcaataaaatcttccactcatgatctttgctctcctcctttcctctagcttgatgtagacaaacatggcaacttttcaagccatgtgttaaagacagtggcgctacaaggatggaaagagcctgtgccctaagtcaagcccaggagaacagcctactaatcaggaattctccagttgcattttaggtgaatgagaaacaaactactatttttgagccattgtacaattttaggttagtttgtaacagaagctagcattgtcttatacaccatacactgtgctatttctctgggcaagatccttaattcactggctatcatattgtaggcaaatttcttggaacaacacctataaggcccttataaatccaaatgtgactcactctatagtctcattctacttttaatccttgactcttacccccctcccatgaccatatataccataccctatgcttcaaccaaaatgacttacttggtattaccagaaaaataaatactttcatgcctacatatacactgttctttcatcttggaatacatccccttccttcagtctcatacctgaaatttctttttatcattcatggaccaattcacctcatcatctctcatacatctctgattctctttgtcagaatcaattgtcctcccattgccactcccataacacatttaaaaaaatctatgtcatagcattaactacattttaaaagctagattgtcatcaccttgaagaccgatattgcatcctattcatccttataacctccgagactcttatacacagcagatactaaaaaatgtaggtcaaactgatattactcatttatttaacagtttaaactttttgaagtatttttcatatacattatttcatttttagtttcacaatgattgtatggatttaattgacttgacttaaataaggaaaaacagttaattgtagagtgcagtctgacaatattctgacattgggcatggttatggtttagccacctgaaggagaaggaaaagaaaattagttgggtaaagctacctaaccagaaaagttcgttcataaaaatgataatgcaaatttctctatgatatgagtgtactcagtctgcaagtttgtgtatgtgtgtgaaagttgtactagtagtagcaaatttatgttagataatttaagatttaagatgatttggaaagatacctatgatatattgtgagtgtgagaaaagcatattgcagaaagatgatatatagtaaagtttgacttgtgtaagaaatatcaggaagaatactcatctctcagagtagaatagtgggagaaatagaacttttaagtgtacattacataattctgtactatttatttcatgatctagttattatataaaaattgcttagaacaatctagcatatattgtgttatacacatactcgttatttttatgataagcatgtgttataataatttttaaaaagaactcactataaagagcaggaagtaatgtcgaataagtggtgagaagggtatagtttagtaagcttctatcataatctatctttctgcaggtgataatcactagacaaaattcaataaaaaaatcgatgacctttaggaactggagagtgaacaaaagaagcagattatggtggggaatcaacacttggaagaagggaaggcatgggttaatttccagtttttatttatttattttttatttttttaaaccagaaggtaggaaacaatgaggcagcacagggtggcagaaatcttgacagaaaactctcagtatctctcacataaaaaaatagggaacagagtttaggcaaccacaaccactggaaagtcaagggggcatcccccaaaaaagataagagagagaatgcaccccatattctgtatataaactctgcccaaatctctccctgacctggaatcatgcatgtgtgaggctgactgcaactgagaatgaagaaactcaactgagatttgagctgcagctcaagaaacagaatttgtcattggagtccaaaaaatttaattgccttctacatgaagagaaaaaaattaaaactatttagaataataatagaacagaatctacagtctccacaaaataacaatcacaatgtccaaaatacagtccaaaattatttaaaatatgaaaaacagaaaaatgtgactcattctcaagagaaaagacaacctatagagaataactccaagaaaaccagatattggaattagcagaccagggttttaaagtagatactataactgtgctcaggatatgaaggaaaataggcccacagtaaacagaaagaaaggaaatctcatcagagaaatagaaaacaaaaaagagaatggaaattctaaggtgaaaaatcacagtatttgaaataaaaagtgaggaaagacaagtcattcatgatcatgcctaagtctcattagtctcttcatatacagcagccaatttttagatatttgcttagctcaccttccctttctctgaaaactgcccactatccacagagataaggctcctgtggcagttatatgattcttcctctaatattctgagagtcaaatactctggcagctggcccctgatccaagttttactaataagatgatctctcctgggattttaaagttgggacagaatattagttagtcaggttttaaaatttgagatattatgtccattcatgatcagaagtatggccctttctggtcacatacagagggaaggagagttcatctgcagagagaataaaacaaacacacaagaggaatacatgaaaaaattgagggtgtgggagttactgatttctttccaattcctagtccagtccctcaattaggccttatagtgatttctgtccttgggttctgagatactcctatattctaataataaattgaatttctcacttttttgtttacatttctgttatataccatcaaaagaatctcaattacatggcaatgtatatttctattctttggctagtcacctattgaggaagcgttggatacagcaatggtttgaggctattgtaggcaatatggacatgaaagtcctcccaaatttaaaagtaaagaccattaattgagaataaaattaggaataaaatgtaatgaatgagattagttgtagaaggagcccattctaagtaataatctgtaactgagtggtcaagtattttaggaacagccagatgtgattaagctgatatggtaatagttacagtagtgggaagaaagaatgtgctattagaaacatgggacatagaaaaggagaatcatagaaagaatttatcattgttatccttacccatgctgtctagttaaacgggtcaccttattcaggaatctaagtatctgatgctgggccaggcatatcccataatggactactcagagtttggtcttccaactaacttcttttttctctcatatccatccttgtaaaggaaccttctggttatcatttggtttcccatgtagcttcccaacaggaaacaatactttgaccaaatactttgaccactgacaagaatattttgacttgctttgaagttatattttatattgtaaatgaatcagttgactgactggttttatacatcagtctcaatttggttaaggtaaggcagaccttagaggtcaaatcactttagatgctgtaacaagtgctaaacagaatggacttgaagtaacagataatggaaaggataatacttcctcatgagacccgatttgtcagccagtctcctggacaatgattctatcttgtcatgctgtgtaataaatattcaaaatggtgacatttcaaattattcacaaatattgtactttgctcaatagtgtttactctaattttgaataatccatgaatatttggagcatcttatagtagcttcatatggtgaatacatttgcctcaagtagcgtttatatagggcccatgtatttactattagtataataggtcaatgttgctcctgaatataacaataatctacatatatacaattttttggagaatttccaagtaaagctagaaaatatacatcgtaagaatgttaactataaagcataatatatattcactatgatattatcttatttggaagcaggaagataatactgcactatattctctatcttaaccatgctttttcaaattgggaagcagttgatatttgtacaggaagacacgaataaataggtatttgcttctgccattcagttttcagatatatctcttgcatatccatcatatgtgatctggcaaatgtattattatataaataactggtgctctgttaaattatattttgactacatgatttaaaataaacttgtagtaaatcgtttcacaaaacaaagagtctccctttcatatagactactccctctaacacctactcacacgaatttaggtttctggcatgcaggaggactgcgtggtcaacttcaaaggatttagtggtccatcagtcaacatttaaattattttttcaaacactgatgaaattcttaaatgaacactatccacaaattgaacatttctggaaataaactgtatccaagtgaaagggcttaatagaaccatatatatgcaattgtcacaaagcaggtttgaaaaaccaatggagtcttgctgttcccatgcctgagttttaatatggaaaacaatattattatggttcaacaatttgttagttttttactgagcaactgtttatatggacaaagctagtaatttctgaatgcttacccttccccttcctatccatgataaggcaaaaagcaagccagaaagacaaagcaaaggaatgaacatgacctaacaactcagtaaaaatatgtactcattctttaatatgtaataataaaaatatgtactattctttaaaaaataatgtaactcaatataaatatatgacatcaaaatctcaattcaaaagaggttaacagttctgtactcacgggagtcttatactttcagtattcatggaaacattagtaatttcattcaataccctgttttatcatttaaataaaaaatattattgcccactcaacacaactctcaaagtattatgcaacatttcattacagtgctaatttttaaccttttatgtacaaaagcagaggcatattaattggaactgatttgaggtcatcagctatagtactgctcagtcattgaagttaatattctgtgaaaatatctggaaagtgtattattaataacaatgtatctccagacacattttgtgtatactttcaccatatggaattaactcacttaaatgattttacaaactttgggaaagtttaccctcttgtaaatcttgcctggatgttactggctatacacagaatttgaaataagtttgatttgggcccctttcctttttctttaatcctttgatttcaggccctgcctttagcaatactcttgatgtaggtgatatccattgcttatggtatcagaatccacctccatcaaaaagatgttggaaagtcacaaattctcaacaggttatctcttgtccctagagagcatattcagataacagcattgaaatttgcctgtttggggagaaaggtattctgacaatggtgtaagcttttctattattttctaagattagactaaaatataagctcttaatattatctttacaaatttccaataaaaatattttaactcctccagttccctaaaggtgtgctaaattatttacaatgcttaagaatgctagagaacaatgaaatgagatagattctataatatagtatatgtgcttcagcactgtattagtctgttttcacactgctgataaagacatacctgagactggacaatttacaaaagaaagcggcttattggacttacagttccacatggctggggaggcctcaaaatcatggtggaaggcaaggaggagcaagtcacatcttatgtggatggcagcaggcaaaaagggagcttgtgcggggcaactcccgttttaaaaaccattagatctcatgagacccattcactatcatgacagcagcccagaaaagacctgcccctataattcaataatctccccccaggtccttcccacaacacgtgggaattatgagagctatatgatgagatttgggtagaacacagagccaaaccatatcaagcactaacataaactagcaggaaagacccatccccataattcaatcatctcccactggtcccctcctataacacacggaaattatgggagctacaatatgagatttgggtggggacacagagccaaaccataccattctgtacctggcctctcccaaatctcgtattttcacatttcaaaaccaatcatgccttcccaacagtcccctaaagtctcaacgcatttcgacattaactcaaaagtccacagtccaaagtctcatctaagatgaggcaagtcccttcctcctatgagcctgtaaaatcaaaatccagttagttaatttgtagatacaatggggatacaggcattgggtaaatacagctattccaaatgggagaaactggccaaaacaaaggggctacaggccccatgcaagtttgaaatccagcaaagcagtcaaatcttaatgctccaaaatgatctcctttgactccatgtctcatgtccaagtcacactgatataagaggtgggcttccatagtcttgggcagctccgcctctgtggctctacagggtatagcccccctcatggctgctttcatgggcttgtgttgcatgtctgtggcttttccaggtgcatgatacaagctgtcagtggatctacaattctggggtatggaggacagtggccctttccttacagctccacttggtggtgccccagcagggactctgggttggggctttgtcccacatttcccttccacactgccctagcagaggttctccatgagggcctctcccctatagcaagcttctacctggatatccaggcatttccatacatcttctgaaatctaggtggaggttcccaaacctcaattcttgacttctctgcacttgcagggtcaataccatgtgtaagctgccaagacttggggattgcaccttctgaatccacagcccgagttgtaccttggccccttttagtcatggctgcagtggctgggatgcagggcaccaagttcctaggctgcacacagcaggggggtcctggacctggcccaggaaaccatattttcctcctagacctcccagcctgtgatgggaggggctgctgtgaagacctctgacatgccctggagacattttctccattgtcttggggattaacatttgtctcctcattacttatgcaaatttctgcagccagcttgaatttctcctcagaaaatgggattttcttttctattgcattgtcaggctgcaaattttctgaactttcatgctctgtttccttttaaaaactgaatgcctttaacagcaccaagtcactcttgctgcttagaaatttcatccaccagataccctaagtcatctctctcaagttcaaagttccacagatctctagggcaggggcaaaatgctgccagtctctttgctaaaacataacgagagtcatcttagatccagttcccaccaaattcctcatctccatctgagaccacctcagcctggatttcattgtccatatcattattagcattttggggaaagccagtcaacaagtctctagggagttccaaactttcccacattttcctttcttctttggatccctccaaactgttccaacctctgcctgttactcagttccaaagtcgcttccacatttttaggtatttttttcagtagcgcctcattctactggtaccaatttactgtattagtccattttcatgctgctgataaagtcatacccaagactgggcaatttacaaaacaaagtggtttattggacttacagttccacatggctgagaaggccttataatcatagcagaaggcaaggaggagcaagtcacatcttacatggatggcagtaggcaaaaagagagcttgtgcagggcaactcccctttttaaaaccatcagatctcatgagacccatgcactatcatgagaacagcacaggaaagacctgcccccataattcagtcatctcccaccaggttcctcccacaacacatgggaattatgggagctatgagatttgggtggggacacagagtcaaaccatattaagcactaacaaataaactagcaattcaaaggtagcacaaatgtagctcaaattaggctaaggctttcatttggaatgtatgtggttgtactttgtcatatcttaccatattctcctactttttctaacatttgatgacatttgtatggcgctttatactttacaaaatggttccacctgactgtttttgggtacgaagtcactcagagaaagtcagaggctacaaaagctactccataaactatttccaaatacactctcattttctccaagagccgtgaggagtactacttctccaataactttttattgagaacatatctgaaaaaagtaaagttaatggaaaagaggaacatcaaagactattaatttttttagctgctccaaattaaatccaagttaacttggatgagtaaagacaagtttatttttctctattattcagcaaagaagagaaatttgtaagcaaaaatatgggagtagcatttaattttggctgaaagagttttataattttaccatttagccatgtattatttatataatactgatttatagaatacttatttatatgtataatattgacagccaaagaccaaaagtaggtaatgtccacaatagaaataaaaaaaatagtaaatgaatgggttagcattttacttaggcttctactgtgaagaatactaatttgttaatgtgcaaggtgacacgttaaagtgctaaattagcctgagcccttgttgtaaaatttaggcaagcagaaaagttcaaataccttatcacatattaattgccaataattacttgcatcaaggtaacttgtgttatttaaaataaattaacagatacagaaagaatcctagttaataaatttaccaattatctgccttggtataaatatgaatttatgttctgtttttagtcctattcacatatgactatgcattctatttataacgatttctgaaaaagcagcggttggctacatgacctgtcctattttttgtgaccatcatttctttatctcttctctcaatgctttctcatagaatgaaagcatcaaagcaaatgataacagtctacatatatacaaaatatatcactaggaaataatttcttttgaaaaaagttaccccatgaggtgcccaaacaatgccatacataaaagataaacaattcaagccagccactgtataatgagatttaattgtctcccattcttttaatatgcatggacaaaaaacgcttcttttccattacctcatcttaagtagttttttaaatcaaacacatactcacgctcatgctgtcactgataatggatctcatgtcaaagaaaaagagcagaaaggacctgataataagtgcaattatcaaacatcaaaaatgtagatcaaagtggatttcctgactcttctacatgcagtcacttcacagaatttcactattcatattatgtgaccctgacaggatatattaattttctccattatgggagcaatgggataggcatacttcagtaggaagctggcaataagtagagttattatttcactgtcttatttaatggcttgtgtgtgcataattgcgtgtgtgtgtgtgtgcatgtgtgtaaaatatgctccccagacacaccacactgtgtctccagagttgacagaaagccttcagggagatgttaaccttcctatgaaggatggatccagggaaggattttatttctttcagatagtacaatatttcctctctctgggaaacacccgacctatctttgggaggactgaattatctcagagggaaattgggagtacttctagaagtttgccattctgaatcatttcaataactcaagtaatcaaatttccacttctacccccaatcccatactccttcctttccccagaactttccttgatacattttttatttgaaaaataaattcattttcttttcctaccaaatgctgaataaaaatcatgtgctaggtgttctgtagtgaaatttccagagtctatacagcctacacagatttccagtaggcataggtcgttttgtttttagattgtgcctatcagttggtcagtgccttaaacatgccaatgtcacaggaatgaccatttctgaactcacattcatccgaagtattcttgaagattataagaagagagagaattttctagttcttttcacaaacatctacctataattccaagggacagactttgacagtaataaactctttagagttgtgttatgccatttctcacccagaaaaaaagctaacattgttacatatcttttatgaaaattcgaagcatatttgttagaagggaaatagaccatttgcaaaaggcaaagggcaagcccataaggcacaatgacagatgaaacctagccatgagaaaaaaagtatccctaggatgaaaaaaaacattttaataaagcaaaacactttcaaattagtaaattaaaaatcagttgattacagcaaagtttcaaggagttttaagtatttcgaagttaaaaaataactagacaatatcattatttttaacttaataattttgctttgttttacacatttcagtcaattaaacttctctgtatacttgggcagttcttgaatgttagtttgaaaatagactaatttctaaacatgggccctaacatatggctaagttaaattaaaaccctatcattaaagaaacaaatattacaatatatagattagtcaattaacatactttttttctatggagtaaaatgactctgaacctggaacagcagctggagttgttcaccacaatagtattagatgcaagtttctggaattaaatgtgccaggcaggaaaataattttatagtcttttcctcatgggaggaagtctggataaagagtgtgagatgtcagacctcatcaataaattatgatcaatataatagggttgaagaattgggtagtggtttctatgatgatcagtaaatactactctggtaattatttttaaggggcaaagggctaagaaatatgagaaaataaaaatgaaataaaatagaacaaaatcacagaatatgtagactggaagcaggtatcttaatattatacaaccatcatcataattattctccaggccataaaacatgtagaacttacaggacaaaaaataatgaaaactaagatttctctggtagtcttggtaaaagacctgcttattagaaagacaaaaaagacatttacaatcacatgttatattatactgaaactgaaatatatagtgtaatggttaagaccatgggttctggaaactgactgccaagattcaaatcttagcacaccaccaaatgccttggtgaatttagaaattacggaacttctctgtgtcttcttcttcatctgcaaaagtggccaaacgcatatttcatagctttctgcagagaactacatgagttagttatgtaatgtacttagatcagtgcttggcatacagtaagtgcttactaaatttttcatttttattaataaaaaggaactcaaaaatttacagaaaaatatctagtagcagacccggctctctccaaagttgtgaaatgactcagtttcttttacagcactatttccatctctttttaaaaacctctttccctttctatcttcctcctcttctcccaagtggccccttgccctctggactgtgaaatcccacccaaatctgccttcttaatagaactgcataatccagaccttttaaataaaaaccttctgtatcccaacggaactcattcaccctctggcacattgtctcgggtcagtctcaggaaacaatgtctaatatgtggaaccaccattgagatagtgctgatattttgagtagagccatcaatgcctgaatccaaaggaataagcattcgggaactaaaaagaactgtaatgactctaaatgtcgctgtttgctgactcctcccagtcagtagcaggctaactatgtgctcctcaagcctaggtttgtgtatccagccaaaattcaataacagtttggatatctcatagacaagtatttaacatacctaaaacataattcttgattcccctattttcactatgcccttttgctcatctagcctaagtgacaccacaaggtactcagttgctcaaacaagataatagaatcataccgatttctccttgtgccttaacttccacatgcaatacgtcaccacattctattggtttccttcagaaatatatcttctctctatccacctctctctgtttccaccgtcatctctcatctgaataagtacaatagtcagcttcctggtttccccacttccaatccccccgccaacctatttactgtacaatagtcagccctagaataaactttaaaaaaacaaaactgaacatcccaccccttgcttaaactccttcagtggcttcctattgtacttaggaaagcatttaagctcattgtaatggcctccaagaccttctgtgacctggttgctgtttagcttagagtttcctctgttgagctattctccccttagtctatcacatttttgacacacgggtctggttgcatttcttagatggggtcatcttcttccaccacaggccctttgcatatgccggaaagggtcttcctgccctcaccatccattgaatgattgattttctcttctcatacttcaggtcccacctcaattgtcacctcctaaggaaggatttttttcagctttccctactgttaacgtagtttccacaatcacctcccttattctctgaaatgaatggtattaccatatctacatatttctgttttgactttttgcttctttctcccactgggatatagggcagcattgttcaatgttacatctctagcatctggcacagtgcctagcatgttgttaagtgctcaaatatatactgaatacataaataagtagtagtttcaatacttgaagcctagtagtttcaatacttcaagcctagcatgttgtaggtgctcaaatatattctgaatacataaataagaagtagtttcaatacttgttgaatgcatgactgggaggggatgtcctttatctcctcaaatgaaaagatgtagatagcttataattcctgcataattgctgcaatgtataagactaacccattatctaaaaatagttacctcaatacaatgtccatgtggcattttgatcatacaaaagctaactatcttgcaaagagagctaatattttagtggtaaatatgatggtaagtgtaatatagcctgtttttctttgtcatactatgttccagttagtgcctactatacttgtgaagtgtctttgctttctattgaagtagtaagttcagtcacctcttttaattcagaaaaaaaccaccctaagagatgaaatgtcactttaacctaaggtggcagtttctttttttttttaaatttaggcggtggtttctgagtattcagtatgtaatgtgataataacatttttgacaggccaaaatgtggaacaaaagtgggtttaaaatgaaaggcatgagacagctctggactccagcttattttgaggatctgcttctgaaaatggcctgaaaaagcaacagaattgcttttcagaattgtaacttgattataggcactttccttttaaagattagtaagggttacttggttctattttacttggttctattttattctaataatactctaatgatgtcaattaaaaatcactctcatctactctcaagggctgagatagtctctcaatcaaactgactttattagctttcattttgatccatgccatcacattcaaagaggattttctttttacaagaaataatattaagaaaattcaaaaaaagagccagcaaaatactttcatttccagatttactctttaaatctaacgaaaatatgacaatcttatttgtgttacctttgcagtaccataattgttctctgtgagaaggaagttatttcttatgaggaattcatatccctaactcctttaagtgatttggtatcagattaaatattaatttgaagtacatctgtgcttattcagttcagcaggtcctgcttagaacacattttcattttgcagccatggccatatgcactacattgcttttccaccagggatcactattttggaacagataacagacccttatgacctttgcattatattttatgtacttctctatccaagtcaatttataaaatcgggacttctcgacttaaaaacacaggaaaatcttgctgttttcttctttctaaatcaagtaccttgagtacgactatcttgggactggcatcaaacatcagattttaaaaatattgttctctgctgggaagagctcattattatactaaatatagaagatatggtatatcaggcagaataataattttatataaaatatcaacctatcttttctggaatgccagatacagtcttagttacttaagcctcaactataagatttacacttaaggaatttgacatttattgttataattggcctctttatgaaaaaaagagacattttcctagattgtgaatgataattatatataactgaattttaccttggtgtttaaagcaaccatttgattacaatgagtatttctagatttctactagcttctctttcatgagaatgtcatggttaggaataaggaacatcagtctaatttgaatcaatttatctaggagttgaaagagatatagtcatttctctttccctagccacttcaccatgagctcacttccacgcttcttccaactctgaaatggattagatttgtatttgttccgtgtccaaaagtagactttaaactcctggcatttttgggttgtagcttactcaattttgtagcccatgaagtgccctgtatatagtaatgagtcaaatgtctgttgaactgaagttcgtgctgatgtgactgaactggatgggtctggctttctctcttcaatcaggcaagtagataaacaagggcaacctgcagttgattattctttgaggggttttccatagcacatagttccttggggctgcccaagatggattttaggataccttcttccactggctttttagtcactaggtattcctagagacttgtccatccagatataaaattactatgatgaggctgaaggattaaaatactggaattcaagaacttcctttcaaaggcccctattaacttggttgcatttttcagagacagtggcatgacttatttttccctggaaacataattaaagtgttaacattataacagagttagctaggtaataagagtctttgatgaaggatgggcttattagttgttcttaataaagggatttggttacttgataaagttagccgtaaaggttttttttttttttaattttactttaacttctgggatacaaatacagaatgtgcaggtttgttacataggtatatgtgtgccttggtggttttctgcacctatcaacctgtcacttaggttttaagccaagcatgcattagatattgtcctaatgctctccctccctttgtccccaccctccaactggcccaggtgtgtgttgtttccctccctgtgtccatgtggtctcattgttcaacccccacttatgagtgagaacatgcagtgtttggttttctgttcctgtgttagtttgctgaggatgatggcttccagtttcatccatgtccctgcaaaggacatgatctcattcctttttacagctgcatagtattccatatatgtgccacattttctttatccagtctatcatcaatgggcatttggcttggttccaagtctttgctattgtgaacagtgctgcaagaaacatacatgtgcatgtgtctttatagtagaatgatttataatccttgtagtatataacccataatgggattgctgggtcaaatggtatttctggtactagatccttgaggaattgccaccctgtattccacaatggttgaactaattaacactcccaccaacagtgtacaagcattcctatttctccatatcctctccagcatctgttgtttcctgactttttaatgatcgccattctactggtgtgagatggtatctctttgtggttttgatttgcatttctctaatgaccagtgatgatgagctttttttcatatgtttgttggctgcataaatgtcttcttttgagaagtgtctgttcatatccttcaccctctttttgatggggttgttttttttcttataaatttctttatgttccttgtagattctggatattaaccctttgtcagatgggtagattgcaaaaatattctcctattctgtaggttgcctgttcactctaatgatagtttcttttgctgtgcagaagttcttcagtttaattagatcccatttgtcaatttgggtttttgttgcaattgcttttggtgttttagtcatgaagtctttgcccatgcctgtatcctgaatggtattgcctaggttttcttctagagtttttatggttttagattttacatttaagtctttaatccactttgaattaatttttgtataaggtataaggaaggggtccagtttcagttttctgtgtatggctagctagttttcccaacaccatttattaaatagggaatccttaccccattgctttttctttttcaggtttgtcaaagatcagattgttgcatatatgtggtcttatttctcaggtctctgttctctttcactggtctatatatctgttttggtaccagtaccatgctgttttggttactgtagctttgtagtatagtttaaagtcaggtagcatgatgcccccagctttattctttttgcttaggattgtcttggctatatgggctctttttttgttccatatgaaatttaaagtagtttttttttctaattctgtgaagaatgtcaatggtagtttaatgggaatagcactgaatctctaaattactttgggcagtatggccattttcatgatattgattctttctatccatgagcatggaatatttttccacttgtttgtgtcctctcttatttccttgagtagtggtctgtggttctccttgaagaggtccttcacattcctagctagctgtattcctaggtattttattctctttgtagcaattgtgaatgggagtttattcatgatttgactctctgcttgttttggggctgagacaatggggttttctaaatataggatcacactgtctgcaaacagagacaatttaacttcctctcttcctatttaaatatcctttatttctttcttttgcctgattaccctgccagaacttacaatactatgttgaataggagtggtgagagagggcattcttgtcttgtgtcagttttcaaagggaatgcttccagcttttcccattcagtatgatattggctgtgggtttgtcataagtagctcttataattttgagatatgttccattgatatctagtttattgtgagtttttaacgtgaagggatgttgaattttaccaaaggctttttctgcatctattgagatgattgtgtggtttttgtcattgcttctgtttatgtgatgaattacatttgttgatttacatgtgttgaaccagccttgcatcccagggatgaaaccaattttatcatgctagataagcattttgatgtcctgctggattcagtttgctggtattttattgaaattttttgcatccatgttcatcagtgatattggtctgaagttttctttttttgttgtgtctttaccaggttttggtatcaggatgatgctggcctcataaaatgagttagggtggagtccctccttttcaattacttgaaatagtttcagaaggaatggtactagctcctctttgtatctctggttcaatttggctgtaaatctgtctggtcctgggctttttgtggttggtaggctactaattactgcttcaatttcagaactttttattagtctattcagggattcaacttcttcctggtttagtcttgggatggtgtatgtgttcaggaatttattcatttcttataaattttctagcttatttgcatggagctgtttatagtattatgatagttttcatttctgtggggtctgtggtgatatcccctttatcattttttattgtgtctatttgattcttctctcttttcttctttattagtctagttagtggtccatctattttgttaattttttcaaaaaaacagctcctggatttattaattttctttgaaggatttttcatgcctctatcttcttcagttctgctctgatcttcattatttcctgtctgttggtagtttttggatttgtttcctcttgcttctgtggctcttttaattgtgatgtcagggtgtcaacttgagatttttctttctttcttatgtgggcatttagtgctataaatttccctcttaacactgctttagctgtgtcccagggattctagtacattgtctctttgttctaataggtttcacagaacttcttgatttttgccttaatttcattatttacccagtagtcattcaggagcacattgttcaatttccacgtagttgtgtggttttcagtgagtttcttaatcctgagttctaatttgattgtgctgttgtctgagagactgttatgatttcagttcttttgcagttgctgaggagtgttttacttctaattatgtggttgattttggaataagtgccatgtagcactgagaagaatatatattctgttgatttggggtggagagttctgtagatgtctattaggtccacttgatccagagttgagttcaagtccagaatatccttgttaattttatgtctcattgatctgtataatattgacagtggggtgttaaattttcccattattattgtgtgggagtctaagtctctttgtaggtctctaagaacttgttttatgaatcttggtgtattgggtgtatatacatttaagatagttagctcttgttgttgaattgatcccttttccattacgtaatgcccttctttgtgttttttgatctttgttggtttaaagtctgtcttgtcagagactaggattgcaatccctgctcttttttgctttccatttccaaatcttcctccatccctttattttgagtctatgtgtgtctttgcatgtaagatgggtctcctgaatacagcacactgatgggtcttgactctttatccaatttgccagtctgtgtcttttaattggggcatttagcccatttacatttaaggttaatattgttatgtgtgaatttgattctgtcatcatgatgctttctggttattttgcacactagttgatgcagtttcttcatcgtgtcattggcctttatattttggtgtgtttttgcagttgctggtaccagtttttccttttcatatttaatacttccttcaggagctcttgcaaggcaggcctggtggtgacaaaatccctcagtatttgcttttctggagaggattttatttctcctccacttattaaggttagtctggctggatatgaaattctgggttgaaaattcttttctttaagaatgctgcatattggcccccactctcttctggcttgtatggtttctgctgagaggttcattgttagtctgataggcttctctttgaaggtgacctgaccttcttctctggcttcccttaacatcaaggttcttagcttctttgcattgggttagaacatgctcctttagctcagtggagtttgttattactgaccttctgaagcctacttctgtcaatttgcccatctcatcctccttccagttctgtccccttgctggataggcattgtgagcatttggagaagaggcactctggccttttgggttttcaacttttttttgttgttgattctttctcatcttcatgagtttgtctagtatccatctttgaggctgctggcccttctatagggtttttgtggggactttttttggtgctcttgttgttgctttctgtttgtttttctttcaatggtcaggtccctcttctttagggctgccgcagtttgctgggggttcatttcaggccctattcatctggttcactcccgtacctggagatgtcactcgaggaggctggagaacagcaaagatgggtgcctgctccttcctctgggatctctgaccttggggggcaccaactgcctcccttggctggggggctgggggctcccttgccccatatggctcccacatgggccaccacaccacactgttcttctttcctctctgtgggtcacaccagccgcctagtcagttctgatgacagaacctggatacctcggttgccattgcaggatccacatgctgttatggttcttttcgatgggagcctctgattgctgctggttttagttggccatcttggccccaccccccaataaaggtttcattctaagccccactgcttcagcctcaagtagctctattagtgcaaaaacaaactattgtactgcaaagtagggtgcagcagaaggatgtgcttgttgccaagttatttctattgataacatagtagtatctatgtcatcaatagataatagagtttgctaatagatatcagtagtggctaagggtttgaatacccccaagtaaaattcaaagaaatatttttaaagaggcaaaaatacattaacagtttttaactctttcttataacaaagcccagttcatactactgtaaacaaattttaaaatctactttctcacctctcattcacattttttcccagtgatcaaacattttaatcacatagaaaagtaccaagagtaatataacaaacatccataaatccaccaagggataataatgaatgttaacctttcattatatttgcttatattttttattaaagaattaaagtattacagttgctcttgaaacccccttcttactgcttctaaattctgttctgctcctttgctccctggaggcaaccactaccttcaagttggcatgtattctttctgtcaattacttgaagacagcaagctgtttcttgcttcaaggcctttctaagcgctcttatctcttgctggtatgctcttctccactctcttcacctggatatcacctgtttatccctcaagcttcagtggaaatgctgcatattcatagagagctttctatcctctctatccaaactgtactcatcctgctccatcatgaattctaatggcaccctctcattttatacaacagtacctataacaatacttacctagttgtatgcttatttgtatgtgtattgcttgtttatttgtgaagcccaactacactgtaagattcatgggggcagagaccatgtctgcctcattcaccattgaatacattgcacttaacccagttccttacacggagtaagaaatagaaaaattttttaaaggacaaatcaaaataatctgacaatcaatataatccataataaattctcaatatttggctacaatcataaactcagccaatgtacttttacatttcatttgaacctcatatgtggcattgtgcaaataaatgacaacttgaagcattgggtaattaagactacaagttatagtacatgccttgtaggaatctaaagcactaagatgtatacatgtattttaaattttataggtgatataactgtgttcccacagattttaatgttttaaaaaatcttaattggcagtaattgcactatttacatgttaatgaacaacacctggccccagctgagtataaagaggctgacaatgattttctctcttctccctggcaaagaactaagcatatgcaattttaaagagacctgcctgccaggaataacacattcataattggtaggacaatatgaaattagtttgcatatttcaccattctcaaaaaaatgcataacatttttcatgtttaaaaaaagctttatgattcaaagaggaccttatttcctacacttggtgattattcacaatcattaaattattcctgtcaatgaatgtgccagaaactggctaaatggaagcccaagtggcctcctataataacggcccagttcctggcttaataccttgaaaaaactgagtttcctttgaagtcattcaaaatctataattaaatatgttaatttcctggttctactatcctatgatattctaaatcactgcagttttgattccatttccccctacaatcctaaaaccaatgaaaaggttttcaaaaatgacttccaataacaaaaatttcttccactaacaaagaacgaaaattcttcttcctaaattttgtatatcatcacctgtgaaccaacagacattaacaaggaccacaagaagatgaaaaaataagaaccaagttctccaattgtttgttttcctagaattatattttaccaatagatataacaaagtttgacactgctattctatttcgagatatagacaaaccaaccaacaagtagttattgagtgcttggtatcctcagtgttataagaggtgctttgtggagggaataatggatgtacaagtagaagaattcacataaagatgtttataatatagtttgcaattaaaaatacaaaaaaaaattgcaaaatggcattggtttttgtgacctagggagtattttcaattcagaggagagagagtgtattcaggcaagtcttcataaaaaaccctgtggagtgagggtgggagaaaaaaatttagtgtcttccatgtgttggtaaatatgctagctgctttatctcatttatcttactcaaagtcgcacaattactaagacctagtaagagctgggacaggaactcagatatgacaatatgtgtattgctctctcagctacatgctagccttgaaggatggcaaaaacagataaggtgagaagaataacatgagtaatgggaggaataattttgaaatgtgttgtgctgaggagattgctgcaatagcaaatacgttgaggagtcatagaaaataacaacaaataggcattaatagaagcaatatataatagttctaaccttgagagcctggaaaaaatttgaaattcataaagtagaaattcaagtcaaatgagttatgtggtaaaatgggcatactagtttttcagaggctgataagatttaaaaaagtgaaagaggaatgaagtatctatggactaagcctccagacctgccctggcaccagatgggaaagcatagcccttgtgcagtgaactcaatgtgtgtccctgctggatatctacagtggccgtgggccctggataaatgtcagtggcaagcaggcctcagcaaccatggggcttctgctgcaccccagcactgcccccaactcagccacagtactacaccgactacagtggtccctggcatagggcactcccctagcaccacaacggccacagccatgccaggcttagggaccaggccagagggcctgctggagtctccggaagggcttattatttaaaagcattcccaggcaaagccaatttaaaaaaactggaataagtaactatttcttcaaatatgcaaatatcaacatatggccacagagatcaagaacaatcagagaaacaagacattattagggagacaaaataaagtgccagtgactggccataaaaaaacagagatatacaaactacctggcaaagaattcaaaagaactattttaaggaagctcagccacattaaaaaaatacagataaataattaaaataaatgagaaaaactgtaaagtaaccagaataagaaatttaacaaagagatagaaataatttttaaagaatcaaagataaatcctggggctgaaaaatacaatgaaaaaaacgcaatagagaacatcaacaacagaattgatcatgctgaagaaataatatgtgaacttagattatttaagagtatctagtcaaaggagagaaaaaaagaattaaaaggaatgaagaatgtcaatgggatttatggaacagcattgtaaaagcaaatatttgattcattggattttaagatggagagaagaaagatagaagagtagaaagcttagagaaatgatagcagaaaaacgtccaaaccttgagaaagatgtacatccaggtacaggaaagtcaaaggtttccaatcagattcaatccaaataacactacctcatgacatataatcaaattgtcaaaaatcaaaaacagagagaatcctgaaagcagtaaaagaaaagaagcaaagaacaaataaggaagttccaatacacctagcagcaaacttgtttgcagaaacgttacaggctaggtgtgttagtccacttttgcattgctataaaggaacacttgagactccgtaatttataaagacaagcaatttaattagctcatggttttgcaggctctacaggaagcacggcatcagcatctacttctagtgagggcctcagaaagtttacaatcatggtagaaggcaaaggggaagccagggtattatgtggtgagagcaggagcaagggtgggggaggtaccattttctgtgttaaatctgttcttgcattgctataaagaaatacctgaggctaggtaatatataaagaaaagaggtttacttggctcatggttctgcaagctgtacaggaagtatggcagcagtatctgcttctggtgagggcctcaggaagtttacaatcatggcagaaggctaaggaggagctggtgtatcacatggtgagaacagaaacaagagagggcaggggaggtgtcacagtcttttaaacaatcagatcttacatgaactcagggcaagagctcattcattaccatgaggatggtgctaagtcattcatgagaaatataccaccatgatccaaataccttccaccaggccccacatccaacattggggattacatttcaacatgagatttggaggggacaaatatccaaattctatcaccaggagagagctgtatgatatatgcaaactgctgaagtaaaagaactgcaagccagcaagctgtcctttagtaatgaatgagaagtaaagactttaccagacaaattaaagcagagggagttcataaccaccagatcttgtttacaagaaatgctaaaaactaaaggaaaagaatgtcaatgaataacatgatatcatctgaaagtataaaacacactggtaaaagcaaatacagagtcaaattcagaataatctaaaactataatggtggtgagtaagtcacttatactttagtatgaaggttaaaagacaaaactattaaaataatagctacaataacctgttaagtggtatgcaatataaaaagatgtaaatggtgacattaaaaaatcaaaatgtggggggagtgcagtaaaagtgtagagtttttaaaaattgtcatcaaagttaagttgtgataagcttaaaataatctgttatgactgcaagatattttgtaagtatcatggtacccacacagcaaagacacacagtagatgcaaaaaaatacaaagtaaggaatcaaaatatatcactagagaaaatcacttacacacacacacacacacacacacacacacacacacacacagaggaaggaaggtaccaaagaatctacaaaactactagaaaacaattaacaaaatggcagcagtaagtcctcaccttgaatgtaaatggattaaattccttagtcaaaaaacagagtgtctcagtgaataaaaaacaacattcagctatatgctgcctacaagagacatatataatctataaggacacatatagactgaaagtgaagtggtagaaaaagatgctccatgcaaatgaaagccaaaacagagcaagaggagctataattacataagataaaatagacgttaaggaaaaactataaaaatagacaaagaagatcattatataaagataaaggggtcaatttagcaagaggatataacagttgtacatgtatgtgtacccaacatcagagcacctaaatataaaaggcaaatattagtagagctgaaggaagagatagactgcaatacaacaataataggagacttcaacactccactttcagcaatggacggatcaaccaggcagaaaatcaataaggaaacatcagacttaaactgcactctaggccaaatggacctaacggacatatttagaacatttcatctgacagaagcagaatgtgcattcttctcaacttcacatggaacattctcctggatagatatgttagatcataaaaccagtcaacaaatttaataagactgaaatcatatcaagtatctcttctgacctcaatggtataaaactagaaatgaatatcagaagagactttgcaaaattcacaaatacatggaaatcaagcaacatgctctggaataaccagtgggccaatgatgaaattaaaagggcaatttaaaattttcctgagacaaatgaaaatggaagcatgaaacatagcatgccaaaacctacagcatacggcaaaataatttctaagaggaaagtttatagcaattgataactacatcaaaaaagaagaaagatctcaaataaacagcctaatattgccttaaggaattggaaaaacaagaacaaactaagtccaaaattggcagaaggaagggaataataaagaactagcagaaataaaatagaaattataaaaacaactgaaaagatgaatgaaacagaggttttttttaaaagataaaatcaacgaacctttagctagactgagagaagactcaaacgaaaatcagacatgaaaaagacattacaactagtaacacagaaatacaaagtttcatgatatgattatgaacaattatatgtcaacatattggatagcctagaagaaacggatacactttttgatacattcaattcaattattcatgaataatgaagtcatagaaaatctaaaccgaccaatagaaagtaaggacattgattctgtaataaaaagtctcccatcacagaagaacccaggacctgatgggttcactacaaaaatcaaacaaggacacagcaaaaaagaaaactacagaccaatactccaggtgaacacagatgcaaaaatcctcaatgaaatactagcaaacctacttcaaaagcacattgaaaatgttatttaccatgatcaaggggattcatcacaggaatgaaaggatgattcaacttgtgcaaatcagttaaatttgatacattacattaagagaataaaggacaaaaacatatgataatttcaataaaagcagaaaaagcatttggcacatcctttcatgataaacaatttcaacaaattagggatagaaggaaagtacctgtattaatcctcacgctgctataaagacatacctgaaactgagtaatttataaagtaaagaggcttagaggcttaatcgactctgagttctgcatggctgggatggcctcaataaacttacaatcatggtagaaggtgaaggggaagcaaggcatatcttacatgacagcaggagagagagagagagagagagagagagagagagagaagcaggaagcaccagacacttatcaaaatgaccagatattgtgagaactctatcacaagaacagcaaaggagaagtctgcccccatgacccaatcatttcccaccagaccactgccccaacatgtggggattacaattcgaaatgagatttgggtggggacacacagccaaaccatttcagtacctcaacagaagaaagaccatatatgacaaactcacctttacatcatactcaatgcagaaaaattgaaatatcttcctatgagatctggaagaagacagggatgcccactctcatctcttctattcaacatagtactgaaaattctatccagaataattagacagtagaaataaataaaaggcatccaaattgaaaacaaagaagttatgttgttcctgtttgtagacatgatcttatatatagaaaatcctaaagccaccacctaaaagctgttagaacaaataaaggaattcagtaaagttgcaggataaaaaatcaacatacacaaatcagtagtgtttctccaacttaatgagttatctgaaagagaaagaaaaacaatcctgtctacaatagttacaaaaaaatacttagaaataaatttaaccaaggaggtgaaagatctccacaatgaaaactataaaaccttgatgaaagaaatggaagacacaaacaaatggaaagatagcctgtgtccatggattcaaagacttaatactttaaaatgtttattctacccaatgcgatatacagatccaatataattcctaccaaaatactaatgacattctttacagaaatagaaaaaaaattctaaaatgtatatggaatcacaaaagaccccaattagtcaaagcaatcttgagcaaaatgaacaaaactggagtcatcaccctacttgacttcaaaatatattacaaagttacagtaaccaaaacagctcagcaccagcaatttcaaaaagacacatagactaacataacagaatagagagcccagaaataaacccatggatttatagccaaatgatttttgacaaaggcaacaagggcacacaacggggaaaagacaatctcttcaataaagttgttaagaaatctggtatccacatgcagaggaatgaaattagggccttacctcataccatatagggaaataaattcaaagtggataaactataaaatgaccaggataaaacacagggaaaaatctccataatattggcttgggcaatgatttgacctcaaaagcacaggcaatcaaagcaataatagaaaaatgagattacatcaaactaaaaagcttctgcatagcaaaggaaccaatcaacagaatgaatatacaacctatagaatgggagaaaatatttgcaaattatagatctgataaggggttaatatctaaaatatctaagaaacacaaacaactcaatagcaagaaaacaaattacctgattaaaaaattggcaaaaggtctgaatcagtgtttctcaaaaagtcacacaaatggccaacaagtatatagcaagatgctgaacatcactaatcatcagggaaatgcaaattaaaaccacaatgagatatcacctcactcctgttatgatggctattataaaaaaagacaaaagataacgagtgttggcaaggacgtggagaaaagaaaaccctgacaaactattggtgtgaatgcaaattagtacagtcattatgaaaaccagtatggagatttctcaaaaaattaaaaataagactgtcatataatccagcaatcccactatggggtatatatccaagggaaataaaatcagtatggcaaagagatatctacactcccatgttcattgcagcactattcacaatagtcaagatatgaaatcaacctaagcgtacactaacagatgaattgataaagaaaatgtggcatatatacacaatagaatacaattaagccatgaaaaaggaaatcctgtcatttgagacaacatggatgagcctgcaggacattatgttaaacgaaatgtgtggaatctaaaaaagttgatctcatagaagtagagagtataatagaatgaagactaccaaagtctgtgaggttgagaatggtttttccagaagtgaaaattgtattttctgagcagatgttggtcaaaggataaaaacttacagttagataggaggaataagttcaagagatctattatgaagcatggtgattacagttaatgacagtatcttgtattcttgaaaaatgctaagagaatggatatggtgtttttaccacaaaaatgatgactatgtggggtaatgcatatgttaactagctagatttagccattccacaatgtgtatatccttcaaaatctcatgttgtacatgataaatataattttgtctgtcaatttgaaaataaatgaataataaaaatttgaacaagctaaaataagatagcatttaatgtatcattatgaataatttgttaaaatattgatatgtgtcaggaaagaaaagaaacaagtaatctcaattattgctaaatatgaagatttattttacattcctatagatccatgcaactctaacgtctatctagcaaatgtcatgaatttgtcagtatgattagtgatagtatcattatcacaaaacttgataactttttataaatcacttttgggaaaagactttcaaattgtttctacaaatcagaaacagagatcacaataaaaaaaatgctgaaggacttcattgatccttcttattctatttttacctttatatgaatagactgtggtaacaaggaaaaatgtttttccttcctcatatgccagttttccaagtatacaatgagcacatatataaaatcatctttagaattaaaaaatgtaaattaaaaatggaaatacatgatgtaagaaagtagtttggattaaaataagtaaaaccactagaactttctcaactacagcccaaatgagccagccaatttagaaattcttaaaaatagaacttttttttctttagatttcttgattaacaggtatagcttgctttttccaggaggggcatttttaaattacatggaacatttaaaaaaacaattatacacactcacacatacccacagaaatgataaaagacaaataacaaactgggaaaagtctttgtaaatcaaatcccaaataaatgactactactttacttaatatataaatagtatctacaaatcaataataaaagaccaacaatccaacatagtaagcaatctgaatgatttacagaaaatgtaatattactgacttttgaacatatgaaaaatggctgcctctccttcataataaaataaatgcaaaataaaaatacagcaatattggatttagtgtttatcagatgggcaggattaaaaagtttgataacaccttatgtttacaagtatttgaagaaacaagtactctcacaaactgataatgggaattccaatttatcaaacttctatggagggcaatttgacaatatttgtccaatatcattaatatttatcaaaataaaaaatgcacagatacctaggaagaaattccacttctagtaatttacatgtgtaaaggcacacacataaatatattaactacagtatgtttttgtaataacaaatcaatgaagccaacttaaatttccattgagaagtactggttaaatacattatagtacagttgtgcaactggaaactcagcagctgttaagtgacaaaatgcaagatgttgaatagtgaatacagtttgcttctatttgggcagaaaagaggcaaatatctgcatatgtgattgtatatttacagaatatctctctaaaggtactttagaaaccggagggagtggtggctttcagagaaactggggtgagggagatatttgcctttactgcatgccctctacattaggttgaactataaaaaaatgccaatatgcaacttttttgacataaaaaagcagcaattccatatggttcaaaaaataccagaataatttctaccacgtgcatgtgctacctattacaaaaaaaaagaagtgtcttaatgaaagctgcattgcatgagaatgattttattatttcttaacagaattagtatagtgtcatcaaatgaatttaagacctagtcaattgtatagatggctgaaggatagaatggccaagagggagacagcatagtttaccttttgggaggcagttgtagtgcagaagttaacagcttcatttctagagtcaggctgcctaggtctgaatccttgctatgtgaccttggacatgctaaataactataccccagtttcatctgcacaatgaagatagtgcctaacttactaggctatgttaggacaaaatagacataatggataatgtgtttggaacaatgcctgatacagagtgctccatgagtgttaactgctgttatcgtcatcaccattattattgctattgtttattattattaacatggcttattcacttcttaggggttcaaactcattttcacacttttgttctctcattttccttacagtagcccactacaactgtgcttgttttgggtctgattgtcctcagatccatgtccttagatcatatttctccttctctgctccttatcctagctccccattccaaggtttccatatcagctgactcttcccttgtccctccaccctagatgcattggtgttgctccctgttgttgcttatagttaggtggctgcaatgtcccatattcagcttctcagttcttccatggcctgcgtaaccaagttccattagtctccctgttttaatttatatttccactttcctggttagacctttactgatagagtagggtaaacacaaaggggtgtgataaaggaaaagggaggggcaggatatgattggccaggaataattccagttcctgacctgccttatttaacagccctttgggtataagctaaagctgaaagtagcctccaatgccaggtttgtggtaactaagtcctaacagtatttaacattttcactaaatcaaacaaacaagttatttctgtctagatggtgtatatccaatgttttcatcagtaaatgctgcaaactattaatttaaagtttagagttggcctaaacagtactgaaagcaaatgtaagcatcagtagtaatgcataatcaattgcatgtatttatgactgttccctcattatttcctaatgaggagttcaagaggctatgcatggctgtggatagctggtaggctactgcatcaatatcttgggtctgtcagagtcagctcagggttttagaaatgcttatttatatacttcatgaaaccaatgtgcataaaataaaaggtttattctctatttatcctctatcaaattatatgctgtagctcaattgcaaacatattataaaacaaaacaatggaagtcatagtgttcttcagcatccaaaagacaattttcagttttatggaataaaacattgcattaaagaagcttacctaaaaccaagacacaactgacttgctctgctaaaactagggagtttttttccaacattgatttcattatacaacaaattttaatgttctaattgggactttctaaaacactagacaatattaaattttaaataacgattgtcctttgaaatagttgccagaaaaattatgggcagaagcaaaacagattctatttttttctttaaaataccctcagtatgtatacagcatttcatattttagagtcaattttcaataataacagaatctctgttcattaaaaaagagtactttagttgaataaagaaaaaaaattaaacactgtactctagaaaataaagctgatttaaaacattgcgaatggttcagtgaaacagaattattgaatgaaacaatctgaagagactctgtaaatatttatttaaatattagatagaatagaaagacttctatgcaacaaaataaggtaaaatagctgagagaaggattcctctgtatgaaaaatggtatttgtttccaattttaagcagttttaaagaaagtttctttaggggttaagtagatttggaagtaagtaaaagaattttaaaatattgtaaaagtgtgttgatgaaaaagaattgggtttgaagtttgaaaatgaatagaaaacgtttgtgtttcttcttgaatattttggaaattatttgatttgtgaatatattcaagagatgatcacaaagataatcatatagctgccataaagacaaaatcaatcattgggcataaaatggtagttatatcagcatcactgggaagaaaggagatgataaaataggtgttgataaaacaaaatacacaaaataaacttttctcagaccaatttgcaaaaaaagtttgtaagaactacagatcattaaaaaataaatgcataatatgtatgaatgcatgtatgtgtatatgaatgcatgcatttgtgtgtgtactcacaccatattcaaagtatacaatagttcaacataggctaataaaatatctttaagcacttgcttttggaaatacagaagaatgactcataatttgcatgttatttatatgtaaatgagtgcttataaagtgtttgaaaacactttagtttctctcaaacattttatactctctggcatcttatttcatgtctgaatttgcttatcaatccacagcttaaacagaacaaggagatgcagcccagccactgtactcataatcataaataattaatggtttcagaattaatacattttcctgtagaaaacttataaaatggaccatttgctctaagattcaaaaaaattaccttagattagtattttatcattgtcattttctacaaatggaacaaagtacctttctaattaatcatttgtatacattccatataaaatctgccattttcctctttttatttttattattatttttaataatagcttaatttattttttcaaacaatgttcctatttctttttttaaaatttaaaaaaaattatactttaagttctggggtgcatgtgcagaacatgcagttttgttacataggtatatacgtgccatggtggtttgctgcacccatcaacctgtcatctacattaggtatttcttctaatgttattcctcccctagcctcccaacccccaacaggccccaatgtgtgatgttcccctccctgtgtccatgtgttctcattgttcaactcccacttatgagtgagaacatgcggtgtttggctttctgtacttgtgatagtttgctgagaatcatggtttccagcttcatccatgtccctgcaaaggacatgaactcatcattttttatggctgcatagtattccatggtgtatatgcgctacattttctttatccagtctattattgatggacatttgggttggttccaagtctttgctattgtgaatagtgccacaataaacatacgtgtgcatgtgtctttatagtaaaattaaaatttgccattttcaaacaatattcttttacttgtgcatcatatttcatgtattcctgaagcaagttatatatttttaagttgccttcagaccctatatcctgggattctcacagtagtggcagcagctatgtcagaggacccttacatacaggaccttattcaatcgccataggaaatcttatactaagtggttttacctccatttcacaggagaggaaactaaggctctgagatgttaagaaacttgcccaaattacacagcagttaaatgacagaacaaagattctaatgcagtcatttcctgcttcaaagccttcgctttctccactatgctctatttactggctctccataaaatatgtacaagggaatgagagagttggcagaggaaaacaagataatattaaagcttcaacaacataatcccacccatacccccaggaaagaagaaaagaaaagaaaaacaacttctagagaatgttatggcattatttatacatttagtctaatgtattatattacacattttctgtttaagatactgcataaaacaattgatgcttggagtttcatctggggccctgagaaaatcttcaatcagctatcctaaaattcaagaatgtcttctagattctatttactgaggcagggctgtcactgatttttttttttaattgcaattaaaaggattaaaatttaaaaaattgaaatgtaacgctctgttaaccagaaaattcaattaattagtatacttcatttcctgaaaactgatattagtgaaagctttatttagcttggctctttcacagatttgtactgaatgtgataatgcatgtaaagagcttagagcactgcctgactcatcagtttgtcaaactgttttccgtaactgttgttcactggttcatgtaacaaaagtttactaaatgcctactatgttccaggcaaaatgctatgtgctggagatagagtggtatataaaacaacattcctgcccttgcgaaatttatcttttggaggtataaatgtgaggcggtaatgcggttgctattttattgttattttcaaaatcattatcattgtcatcataattatttctcaataaaccaatgtccaaggatacaccatctctgaacttaataccatggctatatatatcttctctcactattaggaaaatctattatatggcaggacatacactctttataattctcctttagagaagttgtctctcttaatctctaaagcacctgaaaggatacctgaaaggatagtgaactaggattttcttgagattacagaacaggttacatgaactgttttatgtactgaaatgctaataaatgtttaaataataaacatttgtggtaggatttggtttgagattttctttgactataaccccatagtgagattttggagagagtcaccctcaaccaccgtaagacttctttggaggttaccattatttatcaaaaagaacctaagcattctgcatgataaaattggttcaggtcagtacacaacagaaagctgttgggttgtgtaacattaaacattaaaaacaaactaaacaatttgcctaagagcaagcatagtaaacccagagtaaggttattgcaagggtatgcaccccaggccaatgtcaggcaaaataagacaatgatgacatgattctggggagaaaatataaatttcatataatccaacaaagatttaaaagttcaaccacaaatttcagtgtaatttaaattgactatgtgttattattgacagcaaaatcaagaatggctagcatgaaaataattattgaaattcatctgaatttcaaaccatctgggtgcttgaataagtcctaaatttaaaaatattttcattgcacagtcttatgaaccaagtcacttaaaataagaggaagaacagaaagaaggtacaagaaattagtgagtttctattgcaccttaaaaattccaaagtgattttaccccatgaagtgactgtcctcattgattaaatgagaaaacttatgtgggagaggtttagtgacttggcctatcattggcagagtatagaccagaatctagaattggcactagatcatacggtctcagtggtgtgacatctacagtcttaaactctaattatttctttactacaaaattgtgcaaatcaaactttaccaatagtggctcttcctcaggcaagaggcaagagaacatacggcgtgagagggtgggggaaactgtttctggcctacataattgtaggaaacttcccttctttagctactgctaatcttagccctctctcactcatcagcaccacgaaattgtcaagctccaagatttttaattaatctgaatgatactgggctatatgactttaaaatattccagtaacatttcctttcctttccttttttttttttggagacagaatctccctctgtttccctggttggagcgcagtggcatgatctgggctcgctgcaacctctgcctcctgggttcaagtgattctcatgccccagcctccctagtagctgggatcataggtgtgtaccatcacgccaggctaatcttagtagagacagggtttcaccatgttggccaggctggtctagaactcctgacctcaagtgatccacctacctcggcctcccaaagcgctgggtgctgggattacaggagtgagctgccccgcctggctctgttcccttttcacgtatgggtcaatgtgtttttgtcctagtattttgccttaatttcagttctccaacatgcagcccatcattttcatttcaattcttcccggtctcagacaacccattttgcttccttactggcttttacttacacttttcagtaagtcatacattactttcatgtctttccttatacagttttatcttacctaaagtgaaagaaatccttcctcccagccgcccccccaccacagatcttccatttttattcatttcatttgggttctctccaattcaactgatgagtagagacagacatgaaaatagcatccaatttagatcttctggggatttttagtgagcaagtgggatctcacattttaccaagaatcacaaagtcccagcattagaagggtccttgaagttcattgaatgcaatcactcaaaaatcttatgtaatctttgtccattaaggcttgtcatcagtgagaatgtgaactcctcacacttgtactgtttagtctcagtactctgcattctctcaatgtaagtaagcattttatactatgtatatggttacatagttcaaataatcacataatctgttaggggccataatccacttaattgaactccctcatagtgcaggtgggtaaactaaggcctagagagaagaagaaacctactcagggtcacatattcagttggtgatatccttcctgagaaccagatcttctgccttgcaggccagttcttgccttctgatgtaacctacacttaacatattgccttaccagtattgcttccccttttgttaagtacatgttgtcttctattagatgaaggcaaaggttaaccaaaggctgagctcaatctcccttctttacgtaaccctccacagcatctaccacaagatctgggacagagcagtactttagaaaatttcataaatatgctcttatttccttctcctaattttcaaatttctcaacacattaagataaaacagacttaccaatgacttactaaatacttcccttgtcatttatcaatatcttgtacttatcatttagttgactatctcactaactccaagactgaattagcattgcaattaagattccataagacaggtgatcactacagagaggtggcttgtccttccatttctgagtcacaaataaatcactatgttaacaggatagagaatgaaaagttgcttaaaaatagacatttcttccaagcactcaaaatccccaattggtacaattcctgagcttgggtaagatgatatggcacttcagattaccatgaaaaattagaacgattagaaaaaatacacatcatgaaagctatactcttcccatgatattattacccatgtaattttctacaaaatagttcatgaaaagagaactattatttgaaatgttgaaatgaacttgctgaagaggttttcttctggcaaatgactctttaaaagcaaaagagaagaatttagtatagaataaaaccgttcaaccaatcttcccttgacactctattgtgagaaatattcttcagaagagcagagaattcagtgcaggtggaagcactggttctgtaattcacacttttatcacccatttcttcacagcctaggtcacttaaggacaaatatatgaactttaagaagctaagagagttttactcagtgatagctttagctaggctttgggaatggtttgaattctattccatgggaatagtgacaagaatatcttgggcttaagccacttgtacagtagaaaattcactgtttggggagatgaactagccatcacagattactagggtacaattatggcctgatgatagtaacaaattgttcaagaatgataataataatagctggggcagagactattagctatccaccaaaatctgttttctttttcttccttggtaatggagttatagaaatcacatgactgctcagccagagaacacactttccagccccagttcaggtaggcaactacgtgctcaccaatggaagccttaacacatcacaagtatactcctaacactttttcccctttctccttgctagaattaggatgtggtaggaatcgtttcaaatactcagatgataacaatggttttagaggatgatggaagaacatgaagagatgaatcctggtccctgcatagtgacagactgtgtgcagcagtgtctgctcacacctcatggactgttacatgaaacaatctttgttgtgtcatttcgttacagcaactaagctttttactctaacaaatgtagctaatgcttattatataccagagactgtttaaagagtttattacatgtgtctgttgcatccattcacttgtgccaaagtactccttgtactgtaggtcataactgaaatggaacttctccacaaatcctttccaatttaccttcaagcttccactgcacttgaacttatttgcccctttctcaaaggacttctgattttctaacctcatattataagccctgtttttatatatcttatttcttctagcagagcaagcttccagagagtaagttcatatcttattctcctgtgtaacctgtaaagtgctggtactgtgcctctctcaagaagtgcttattgaccgagcgaaggactgggacatttgagcttcatgctgtttgtctataatccagtgttgcagctgaataagcctggagcaagcacacatttgtcatgggcaacagaagcagaaaagaatctaggacccagaatcggtaacaggttgaatgcaaaaaacttttacctacaatcctgctatcttatgtcttatgtttccagaatttcatagtaaccaagaagatataggaaagtaatggatgatagctgaagagcttacattctacttatgaccaagtcctaactgggttgtgggaaaacgctcattggtaacaacttttgtcctcttgcaaagtcttgctagagtcaaatgctaataggctaagtactattttgagtctaacacctacactgttatactaagctgcttgcttttcttttacttgtcttcatatctcacaactattcctataatatggtagacatctacatgttatatttggtactaaagggcaataggcattggtaaaaacggaaattcaagtgaaattttcagagaaattaattagacggatgtgttataacagagtctggcatgaggcagtgatcatttgagtaaagctgatcctcaaataaattatgtagaaacaaataaatatactgacaaatttgcacatgggatcttgggctgggatttattattattttttgcatatcattctaaatcaatgtaaaataggaaaattggagcaaagcagactacttaagtttttttgtctttgtgttttgatatatcattatcattaacatttcttaattccttttgcccggcaaaggagaaaattaaaatacagaagtcgaaatactaaaaagtagcttttaactatggaccccaaaagagtagtatgtgagtatactactcttatagatttagtttttcctcgtgaaaaaaatttaaaatttacaaaagtaatataggtttcacacacaaatttagaaacaatattaaaatgctatactaaagataaaatttagaaacaatattaaaatgctatactaaagataaaattctgtaatgaatgaaaaaaaatcttgtcatccagaggtaacaatcataagcaatcataatcataacaattgagtggatattcttctcattgatttaaaacataactatgtttttcaagaaattatgatcatcacatagatactgttttattaccagcttttttccacttaacatatcatgaaaaacaccccatgccagttttctaaagcatttcagctaatactgcataatgctgtatggtataggtacaccatgatttatttaaccagacctacattataggacttccttcctttctttatttgtcttcatgccttcacatttatttcatttacatttaactgcacaaaatgttagggtgaaatagttatcaatatttaataaaatattttatgaggaatttgcttttttgacaaaatttttcctaaaaacttttaagagaaaattgcaaactccaaactgaaatcagtttgattaactgtctggtgacaggaaaggaaaaaaagaaaaataattgctgtttatttaactcagctgattaatggtaaatgaagcaaatgtcatggatctgtcagcatctatttttcttaactgctctattcactttacacattttctttatgcacttcatagacagccacaaaaagacaacactaagtgtggttagtagccacctgatggaaggaagaaccaaacagcttaagtaaaagaaggagtgccacatacatgcctgtactcaggcagtctgcgatgaaaagtgtgctatacctaattcccaataattttatgatctttgcatccagcttgagaggtaataacattttccattttacagattaaaacacatttagtttccaagatgttaaactgtctaagatcatatagctggtaaaaggcagcagcaaaattggaatcatgagtgtttggcttcaaaatctaaccactcttaaccactgcaaagttgttcttaccatgtccagataaaatcagaggaggatatcattttgaatattaaaaacacaatccatatactgtgtagtactactaatgtgcaatattacttcttaccttttcacactttaatgtcagattcatgttcctctttagggtgggatgttggccaacttgaggatttccagaaataaattaaccccacatcctaaatcttgccttaccaaaaataaaattttaaaaaggacagagatttcttcctcattacacaaaggtaacttacactgaagtaaaaatgatgaaatgggaacgtgacgagacacaggaaagtaaggaaaataacattatcttatatattgattttggattgtatgatattctattagtagaaatcaacaaatttctttttcatacataagctgactttcttttttttttttttttttttttttgacggagtctcactttgtcacccaggctagagtgcagtggtaagatctgcaacctccgcctcccgggttccagtgattctcccacctcagcaccccaagtagctgggattacaggcgcccagcaccactcccagttattttatatatataatatatatatttagtagagacagggtttcatcatgttggccaagctggtcttgaactcctgacctcaagtgatccacccgcttcagtctcccaaagtgctgggattacaggctggagccatcgtgcccagcttctttgtctccttttaggtggaaaactggataggacatatcaatttcaaaagatgtaaacaattcagatatgctacttctgcacattttaagttttaatcctgtgggctataatatccatgattgaaaataaagaaaagaagcaagcattaattatgcaaatgtttttccttttgattctttctaatccccaattaaccactctttgcatttaacttatatatgtttgcataatatactttaaaaatattatttcaaacatgcatcgatacttaataggtgattcttactgtaaagaaagggccttgtctccttcagaagggcctgtggtgtaggatgtagccgtcaggtgtgccattgagtttacattagtttgaaaattattcaaagaaagaaatggtaattatgctcaccaaattaacacagttaaaaaaataaaattcagtgctggtgaaagtgagtaataggtcctctcatacactatcggttgtaacataatttagttaagtttttctgtaaattaatttgaaaccatatagcagaaaatttttaaatgtctattctgtctgacctattattttactgctggaagctctactgctgaaataatttgaaatgtaggcaaagatacatgcaagaagtgctcaatgtagaattatttagagcctgggcacagtggctcaaaactgtaatcccagcactttgggaggcctaggtgggcagatcgcttgaacccaggagttcgagaccagcctgagcaacatggagaaacccgtctctattaaaaattgaaaaattagcctggcgtgttggcagacacctgtatttctagctactcaagaggctgaggtgagaaaatcacctgagccagggatatcaaggctatagtgagctgtgatggtgccactgcaatctagcctgggtaacagagtgagaccctgtctcaaaaaaaaaaaaaaattatttagagtgccaaaaaattgaagacaccctaaatatccactgttaggggaatatttaagtaaattatgagccataatagagtcattaaaatgatttccaaaaaattatttacagatgttagaacttacatgtggcaagtgttaaacgaaaggcaagatgtaacattacataaataatatgatccaaattatgtaaaaaattcagaaatctgcaagcaaataagccaaaatgttagcagttgttctttctgggttgtgacagaatagtttccccccttgcatttttatatttttctgtacttttgaaatgcacttgtctgtactttctacattttctaaaatgatcatctattttctcaaaaattaggaaaaataacatttaaaaatgacttgacatcaacagtttagaatctgagttttattaacaggaccaatatttgggaaggtcacactttttgctcacttcctcatcccttggttgtttcttccattactggtgtttaaaaaaaaatgtttctaatagcaaaaatgagtcagttctctccaaattacagattctttgcaagagtaaagcaagccaagaaagatgaacttgctaaaacttttaggcaggtttttaaatttttgtttgtttgttttttctgagacagagtcttgctctgttgcccaggctggagtgcagtggcgcgatctcagctcactgcagcctccgcctccctggttcaagcaattctcctgcctcagcctcctgagtagctgggattacaggagtgcaccactacacctggctaatttttgtatttttagtagagacggggtttcaccatgttggccaggctggtctcgaactcctgacctcatgatctgcccgcctcggcttcccaaagtgctgggattacaggcatgagtcactgcgcccagttggtttttaaaattttttatcaagcctacctggattactttcacttttctagctgagacatttgcaggtactcaataaggaagtgtaaatactgctcaagcagccccacaacaaaggggcttctcatgctaaacctggcagggagtgaaaatgcctttattttgcagtgaagtgaatctgaggaaatcctgtgtgaaaattttgcttgagggccctaaacaaaacacagatatttggcttctatccaaggtctgtgaccttccctgtggtcaaggttcacattattatttttttttatatggaggaagccctgaatatgggattgccaccaaagtcaataaaaatatcttctgcttttgaaagaagtgtcaatcggataagcagcgtgtacccttattattccaagaagagcatagttataatgccaagtcagagcttcatagctttactgcataaagaaattaacatacaacttaaaatacctttggcctgagttaactattcacaggttttccctctttaagaaaactcaatatatttaacacaggcttaaagaataaataaaaagaggtaaattattatttacactgcaggtcaatcctttatatgtatatatttcaacagaagacaacctttaaaatatgaagggccccagtgctacaattttcagatgacataaggaaagtagagaattaaaacttatgataaacaatcaggagtcatggccaatttaagagtaatcagaaagaaatgtaacagatgttaaaactgaatataaaaaaatttaaaaacaggttttaacaaacatttacagtttttcaacaatgttttcatttctaacagtaaatgatcttaatctagggttagtttcagaaataccacaatccttctgctctgatattaatacctaagtatttataatagtcataggatacatgagaatatcatcttattgaaacacatttctttacaattcttagatctatttggcacaagcacggataatagcagtgcccgctctatgctatactcctagtatagttgttattatattgttttagccacaactaaataaaacataaatttattttctagtgagcatttgcagtttatgagtcaagaactctctgagaagataatttcatgtactttccacctgcccttttatcaacattaaacaaacagtatgttttaccacaactcatttctgacattaacagttgcttttatttctctgccaacctcagccttgtcagcaggacttcagtgtgacagcaatggcagctcatgccaattagatccttttcaaataaatttctttttagcactgtacacatttgaatagatcaaaaaatgtaaaaaatcattattaaagcggctgagggcaaggaactaatccatcctgtatatgcctgtatctctccttatttaacaacactgacttccagctaaacacaagaaagaaagaaagaaaacaaaagaaagaaagatgcaaaatgcatcctgagtgtaagttctttggtagtttgaaacacaccactatatttatatgttctttggaaacgatattgatgattagagtatatttccaggacttgaattaataacaagtggtagaactcattttttcatgaattattatggaagtagtagatgggaaatttttgtcctgaggatttcacccacactcttcccacacacatatgtacaaatcctctaaaaaatggcttcaagaaagtctcccctctcttttatttaacaaggcagctatgcagcctgccatcctgggctaacagccagaagaagattatggcaaaaataatcacctttgcaacattaaggaaaacatgaaactggcactatgattcaggggcttatttctttccctctaaatatgataacacttttaaatttttatttgggaaatggttttctgcaagatgtatctaaaaaaaagagttgttttcttttcaacaaatagctagaggtgctgagagatttcctgttaaaactgtgtaaggcatttgactacttaaaagggaatttagtgctgatgaaagatgccagtttgacagtcacggaaaatgaaggaagcattctttattcccagagcacgtcatctcaaaatgaggaatcatctcttatggttaagagggtcacaccctattttttaatattcgttgggagtacacacatgctagatgatggaaagatacacatgaaacacactctgtgtcctctaagatattacattcttcaagccaccatattcctcatctcaggggcatagtatacatagactagtggcctctactttaaaagggaccaaggcaacaaaaggtagtgggtgagagattcaaatgaaggacaaaagagagcttagtttggacaacttcactatttcctgtaagtgttctcactctaaacttaaaagttagacctgcttaggctcttagttgtatgttatctgtatttataatctgtgggcaatattcatcacaaaccctatctacgtctaccccatccctcccaaaattaaaacatcttcataaatatttattcattgtgtgccttttgatagttcataaaacctgggaaaaattattcagcccccgtacctcaaacatagtactatcggtggcacttgggacacctgtgtagttaggtggtcccggcttagtgtaaactaagagtgggcatggggaaatataacatctcccaggggagtttatttgcattagttaattgaatagaaagtagcaggaagaggtgtttgaggacatgtgtcatatgcaaatttgtggtgggaaatgtgtggggctagaaatgaagaaataaggacgtggcttggcatgacacatgtcctctgcctggctccctgagtccatacattgataagtgcagctgacaaaggttgaaggagttcatgaagaaaggagcataagtggtgctgcttcagaaactgagcgaaaacatttgacacagaacaggggagaggggcagtctccccatttctgcctggtacatagtatggctctggcaacacagtgagaactgagaagcagtagcaacgtcgtgcattgagagatgggtggctttgggagtcctgaataggaaagggttcactcaaagagggtatcattagttatggcaatggccacctggatttcttgccatgtagtgatcatcaacataatttttagaatggaaatcatgaaaagattgatcttgaacatgtgagatacttggtgatctcagaaataattgggtcgactcaggttgcaagaggctgtgatcctgcaaattgcaggggaaagactgtttactgggatgctaggtaagtctgcgtgtgaactcatttgttcccaaattaatgaagggctatggtattcgtataatgaagaaaaaaaatcaaagctttttctaaacaggttgtggagcctatctaccaccattcccacctcttatacacacaaagatttttacaaagtttggacactgaactccacaaaacctctgcaggggggctaagagcatcacatatatgtcataagccactggagttccatgctggcttttgtttgcttatgttccacgtttttaggtattttcgtttttagctcctgggggtaatgggctgtgatgatttagtgcagggccagtccagagttgtttttgccttagtcaaggacaatttttgaagatctgcatttcccttgtctttttaccttatcccgaaagcaacactctcacgactttattttctgtgtcttgagtgctctatctctggagagtgtttctttagtttcacaacccactgcacccttcctctttccctagcctaaatttcttctcagggctcaaactaagagcttcctaggcatcctctctctctgaatctcttactcaaaagttctgaacaaaacctcgagcacctgaaagttcagctgatttaagggagctcattgtacaagcatcccacgggctgcactaaatattgaagcatgtatgtgtgtgatgagaaacggtactcaatgactcttgcaaatttggaagcggcttctttttcattattttattttattcattagcaaacagaagactgagactttaacaaactttgtaccagcaaaatggtgttatgtaaggaaattcactcactgtttatccaatggtccagagaaaaagcaagtttacagtctattaaggcatgatgaagaagaacttcggaattatctttaaaacagagtggtacttcaaggattctaaaccttggaagtactttaatagaggatctgctgctgtttccaaacaatgaaacccaaagttgacatcctgagaactaataacgtaacacgttactctcaaacttcaaatgtcctggcatttattgcattattaaaattgtgccctctgtgaagtcaactgagtatagtgtggacaaaaaaaaaagaaaacattaaaataggtcatggtatggcagcagtcaatgactttctaccctctccaaatatatgtttgtctcagagaaatatttcaccgactagcactttgtcacggggctcgcttctcattaccatttcaaatgtgctttctgtgctctgaggtacctctcggctgctctagggctttgccgagacactaaaaagtttagttgcagtgcataatatacaatgcaagttactagtatgaatttttaacagtgttttgttttatcacatcccagagtccctcgagatacaagaagtgggggaggccttatttatttatttatccctcctccccctcttttaatgcaactcttgccattgccgtgggtgtatgttcataacaaaaacttaaacaaaatttgggcaaatgaaaacatatgcatcttaaggcaattgtcaaaacaaaaataactgcctgtatgaaggctttagtagaggcaaaatgagataaataaatattgttaagggaatcataattatatctgaatagaccagtgttgtgtaatgttcaatatagtgtcagtttcttagccagcaaaagttagaggttagtctgatgaggtggttaagagcttgggctccagactcagactgccactgcctgtgtttgagtacaggctctgtaattcacttgctgtctgatcacccataaagtacttaagtcttctggctttggtttcttctttcataaaataggaataaaaacagtatctatctcatgtaaagattacaggaatttacatatagaaagccctttcttgagacagggtctggctctgtcacccaggctggagtgcagcagtctcggctcacagcagcctctacctcccgggctcaagcgatcctcccacctcagcctcctgagtagaaaggactatgggccttcattaccacgctgggctaatttttgtattttttgtaaagacggggttttgccatattgccctggctggtcttgaactttcgggctcaagagatcctcccgccttggcctcccaaagtgcagggattacaactgtgagccaccacagccagccagaaagcctttgaaacaatgtctagcaaatagtaagtatgcaataaaccttagatgttattattattggtcattagtcgatgtaagaggaaaacaaatggttgcgtgcattttgaccattaaggcacatctttttttaataaaaaataactaaaaagagccaaaggaaggttcaatggaaattatgtcctgtaatgacaggtggaaattaacaaaagccaacagctaaaagttaggtatgcagtataagttaaactgagagatttatacaggagaaagttgaacttctaaacataagctaaatcagttcaagaggtgtttactaacattctttaatgatggatctacaattggttatcaaatgatccctctagctctgtagaagcatttcgtggaaaatcaccaccatactttcaaaaagtttctgcccagaaagataatgagttgagtgaacaacaaggtaggttttgtgcagcaatgcttacgttctttgcaagatactggagccatagtgttaactgaacataatggactctgtagtccatttcagctttagcatcctatgattttttgactcattatatttctcatattttattacattacttgcatccttgaaatcgttcattagctttcagttagaacctacaaagagtaactcctaacctccaactgtctcattaaccttgcttagcttttcttttttccctagttctctacctcacagtcacagcttctcctcctatttctaaaccatatccccaaatataaataagtacacaaataatattgtatactttttctcttattactgagaaacaagccatttatatcactcttcaacttatcaggggctttggctgccactgaccactttatctgaagggaaattatgggagttactgtagattatgtcctttctatcaacccctgcatataagtggtcaccaatctcgtatatcggaccatcataatagcatgctaaatacacactcatgtcagggactgtgccacatcactgtagcctcaaggaagttaataacttgctaaagccacagagatagatagtaaatggtattgctggtgagaaaagaaaaacagctccgaccaatctgagctctgtgaggtctgcaggtccagaaagacataagtatgagacttcagtcatgccccccgccatgcctggggcaattgttgtcattttgtttctcactagctgcctcaaccaatatattcgtattcctggaattttgatgcaaagaaaaatatatagtcaatccatagtgtattttatgttattaaattaattaattaattttgagatggagtgctctgttgcccaggctggagagcagtggtgcgatctcagctcactgcaacctctgtctcctgagttcaagcaattctcctgcctcagccttccgagtagctaggattacaggtgcctgccaccacgcccggctaatttttgtaggtttagtagagatggggtttcgccacatggcccaggttagtctcaaactcctgagctcaaagtgatccacctgcctcggcctcccaaagtgctgggattacaggcatgagccactgcactggccagagtatgttattttaatataaattattggtaaacagctcaggaactgcctctactttccctttaaaaaaatccacttgtaactgctgctaaggggagtgtatattcagggcaacttggatctatgctcccaagtgcaaccctcaagcttggcccaaataaactctttactggcccaaaagaactctttactaatattaattttgcctcagctttttcattttaggtcaatactggaattaaaagttatttctgggagactctaaagttcatgctcacactggtgatgcagcttctcccccgtcatcttgtttcatcttccacaattttagtaaaccaatatttctcatttgagccaatgaaataacctcttaatcaactaccttgtctccagatttaaccattcctcaatcaatctttatttcaggatgctgttagatttagcttgctgaaatgcaaatgtaatcatgtcacttatatgctccccactgccttcagaagaaagtctgaattctacagataatataagagggcccttcataaagtggtctctgcctacttctctgccctcaactccccaacaggcacctttcactctggttaaactaaactagccttagtttcttcaataattccacgctctctcatgcctctgggtttttgcatatgtgattcccactgcctgaaaaggtcaacctcattttgtgacctggccaacttctgtctgtcctttaaaacttctcagcacacaggaggtactcagtagacatcttttgactaaaacatttataagactacctcctttgtaaaattaagggatagagatgaacatgggtaaatacagtaatctgatttgctaaaatgctataaaaagtacatttggggcttacgcttctagaaattgttttcccagccttgacctctcatctgtgaaatgctgcccagtgagcagatcataattatgaaatataatatttagatattaggcagtagaatccttgctgtattcattaaatatatattagttgatatttataaatgttttatatatgtattacaaaatgttaaaatacatttctgctctatgaatgaatttgttacaacgttaggttctagcttttattaacctcttaccctaagtgttaatatttcccatcctattgggagcaataggacacatttcccacattagcttctaagaggtcactgatttgttttcagtttgtctggtcactgagagttggcatagagttaccttcataaatgattcaagttaatgggaaatattaaaatgaaagaaattacagcaaaaacaggactccataagtgaaaaatgatcattggaatatcactccacaggggagtcatcccacttagctattcgttaaaagtagcttcaaggacatagggaagaggtgtagctgtttcaggcccaataggaatgcttttcgaggggatgaagttgggtttaaaatatgtaagggtgggctatggaaaggctcatgacagcattgccaataaaataattttccgtggaccacaggtggcttagtgatttttggcttaaggaataagcaggtgagaattaattacaatttcatgtcataccattaaagcatgttcaacataatttgataccaagaactgctgtctaaaatatgctatatcattccctatgtctacatcaattctatgggagagtacatatatgcatggatgagaaatatatttgttattatgcaggaaaataagtctacccccatttttaaagtaccatctatcttcccccactcccaggtccccttttgctgttagtgtctaaacctctctttgaagtaggagaagttgtttcctaacaactcttactttaaaaactttatatcttccttctcattctctcacctctttcttccttcctacactgctcacttaagtactctttaccagtctgaccactatcttttatctgtatattataggcaaaataaagtcttgattttttagaagggaaagtttacttgtacttttctacctcttgtatgtccaagacctagaaaatttataaagattgaaaatgcagtacaaccacctaaatattctataccagtgtcttatttgcctgactgctggtctgcctttctcatgagactagacagctcccgatagcgggatttaacattagtcctctgtgttttcactttctagaatcagaatcaaaacatgttaaagctggaagagcccttgcaaataactgaatctctacattcttagatgatgaaattgagattcagagaaacgaaattacctgcttaagaaaacaaacagcctccacatcatttcttggtttgctactacttgatctttgctttcctcccacggctttgtttttttgagtttggttctttactgtcgctctcacagtatatgttttggatcttggctctttatctggatttggactcttacactaccaatgtcagtttgttaaccccatgacttatgatgtcattcaggttatgttcctgggcttctcatctgcttcaagctggtataatctagattcttgtctgagccctgggttttgtcatccaactattacatacagatcttattttctctgtctcttttttcttttgagacagagtttcactcttgttgcccaggcaacagtgcaatggcatggtcttggctcactgcaacctgtgcctcccgggttcaagtgattctcctgcctcagcctcccaagtagctgggattacaggcatgcaccaccatgcccggctaatttctgtatttttagtagagacagggtttcaccaagttggtcaggctggtctcaaactcctaacttcaggtgatccacccgactcggcctcccaaagtgttgggattacaggtgtgagctacgacgcccagcctttttttctctatcattccctaatcagttagttcagtgacacagacttctagaaaacagagtttaaaaaatgacttctttcactttaaggcaattatgtctaaagaggtgaatatggcttcatcagcataggaaacaaaggcagaaatgttctctgtttggtgaaaatcagtgaagtgtaaaatggtttatgttcaaaccatataaacactgcctctaaacatttcatattaccatccatccaggaaccttaaacattgacatctgagtgaatgtgacatggcctcctccacatctaaaatgtccactgggcctatgggatgacgaaaaggaattactgaaactcacaaagatattgacaatgaaaaaatattttaaatgcagcactattttaattctaggttagacagaaaaaaaaaacaggtagaaagagttttgcaatattgcagagatagatgttacctgctgcctagttaggtgtaaaaaaccaaaactgcattgccaaacatttttcattttatgaacatgtattggaaaagcatcctccctaatcttattcacaaacagaaaatacattgctcgcacttaaagaaaatgaaatcaaacaggataaaacatgagcagagaggtttcagacatgtcccccaggcataccagctctcagacttgtgagaagagcagtcctctagctagacagagattcttccctcaactgggcagatgggcttgggaaacgcataagcaattagcttttctgctgaagcagaaagaagactaagaggaaaagaaatgtgtcccacatcagtatgatcccaaataaatcttatcttgccctgtaatcatagaaatgcagtgatatttttagaatttgggcttgagttttaacaagtgtggaagttatatggaagaaaggaagagcacaacaattatatttacagaaactatctgactttgcctattaataaggcataaaactcagttttccataatttgtttttattttgaaaactgaaataaaataaaaatattgaaatagattagaaaagataaagtgaaaaggcaagacacagactgagacaagatattttcaatgtatataactaaggatcaatatctgtaatatataaagaattcctatgagtcgattagaaaaataaaaactgctccaaagaaaatcaagaaaaggacaaagtgatgcaattaaaagaggaagagactccaatgtccaatactgaaaagatactcaatcccacctgttacgcaaggcagtacaaattaaaaccaccacacccattagactgaaagaaaataataactctgttaacaccaagtgacgtgttggtgatgatatgggaaaaaagtgttctctctctgtctctccctctctctctatatatacacatacacataaacacacatatatacacacatatacatatatgtatatgcatatatacacacacatatatatggatatacggaaatgaatacaattactttggaaggccatctggaatatctaatgtatttgaagataaaaaccgaattccacttccaggtatctatcccaaagaaactcccatttgtgtttatcaggaaataggcataaggaagttcattgaagccctgtttgtgtggttaaaaaaaagataatttgaatgtctctcagcagaggaaatagataatctgcggtttattcatacaatggaatattacacaggaacaaattatctagatctgcctttatcgacctgaaaaaaatctcaaaaacaaagctgtttgaaaaaatctatttgtaaaacatgtaaaatatttatgcaaattttaggagtaaaaagagttttagtaatttatagttatgggtacttacatatatagtaacattatactatacatgcaaggaatgatacaaactatatcgactttaggagagcagttaactctgggaaggaaagaaggaagtgaagttttacctaggtcttttaaattttctacctttgaaaagaaagagtgctatgaagcaaatgtggccaaatgttaatatgagtttaatattggttgtgtgcacataaatgccatattttctgcactgttcttgtatgtttaaaatgtttcatacagaaaaagtgtatgtgtgcgtgtgtgtgtttagaaaagactagggaaagaaaatggaatactcagtgtacaaaagggtgatgaaaagtccctgattaaacagaagtgtcatcattagctctgttcttctgatgaaaatgtttattagctagtcataaaagttactatattaagatgagggaaattaacgaagcattatctttacagtatttttttctaagtgaagtacatcaatggtcatttaggcatgaaccaaaaaaaagttattttaaatcgtctggtccctgtccttcagatgcaatcagcttcagttcattttgttaagtgattggaccttatctctttggtacatcacaaatgaaggagatcctgctgcttttagttttgcttatagtaaatccttgatggcttcacagctgagtgacaggagtggatagggcacaggattggatccttgagaattcaacctccggcaatgacttcttataagttggacatgtggcttgacttctctggacctctgttctttcgtctttcaaatgacgataataatattgaccaccaaatattatttgcacgtattttaagcaggatctgattaacctaacactacttttaaaatatacttcttttcttagatgcccaccattagataaattcaaggtgctacacaataagcttataataatgatgtcattggaacttataacatgagattctcttatgggcaaaaaccacttatataagttcttttgatacacccatcaactaaagtctcttgggagaggctcaagactgatctgcttcataatgaaaattctgaaagcataatataattttaaagtattgattatattttaagattgatcatcacctagcttggagcattagctattcaatttgcaatgagacttagtaataaacatggcagaaacattgggaaaaattcaatcatttatttcactttgagaatgactgctcaggtatctgagtacaaattatgggtacatattgtgttagatggttaattttagaaacagctcaagactaaccccttgagagcacatttacagataaatgcacaaaaaaataaagagaggaggctgcttatgcatagtttagaagctacatgaatctgcaaatgtacatagcacaacatctctgaaatgccttatgttccaaaaagctgctgatctgttttcgttaggttaatcagatcctgcttaaaatatgtgctaatcagtactcaactgcctagttggccaccttaggtgaagctctaggtgctcattactaatgaaagtttgccaaagaaaagcttaaaaatacccacatatataaatatatcattttataatatacattataattttacttagacattaatatgttacagcaaagttaatatgccattttacttttacatttcagttcaatttctctagcagaacaggaatgaagttagaacatgatttgctgtgcttatttcaaggtgatttacacttttctgttgatcaaaataggcacatagttgccatggaaaagatatttctatgcctaaaattaccttcagaaagtttgtacttgagggctcagaagagtaaaaccttgtcatgtaactcgatactttttactaaaacaacaggcaacaaaaatagtcagaaaacagtactctctaaacattaccttcagttgggtggaaaaagtgttttctcccccatgcctttctccttcagtggaaaacacacacacttagataaacacatcatcttttgtccttttggttaaagaaaggcaaaacagggagcaaatggatcagcaatagaatttaaactaaacctaaacccagctacaatacttagggagcttggattctgtaaatgaaagcaaggactcctgcaaaggcaaaaagatttcctcggcatgcaacatgtgttccctgttattaggaaaaagtggacaaaacaaggcgcagaggagtaccaatcatgcacaattgcttctgtactattcctggtaacctggggtttctcaaaagctctgcatgcacagcttagtttgtgacccatcttggctagcaggtgagtgttgtggctgcctctttctgtgaatgattaaaaaaaaaaaaaaaaaaggaatggacttggagataatttgatagacatggaatcagcataccacctactggtccttttacctgtggtcaatgttcactatgtctttatcacctcagatgctctcaaaccactgtccacttactaaacaggaaggcatgtgatgccagcatcatcttaacagaaatagaggcccctcctggggattatacgaattctggaagatctctaaacgaagactacaggacacattaagaacatgttgagtaactttgtctctcatgcataatcaccgtaggttggctttttttgtggtttttcaatagcaagttatgtttgtaattgaatggttggcctctagaaagtcgaattgattccctagaaatattccaaagtttgcagcatttaatctcatacttatagtgttaccaggactgggtataggcaaaatcatgacaagtctttcccttcattttcccttagttttctatgtctcttctggtatttcttcctcatcaccccttgggatttctgtgctctcagtctactgcctagaactccatattaccatggcccaatacctagtgtaccttctgatacaaagtatatgctcaataaatatttctgaaatgagtaaatgaacaaatgaaaaacccctgaagactgacagaattcctcagggctctgctaaatgacaggagaaatcagatgaattcctgtgcttgaaacaatcaaagtcaatatgcgcatgtcacccacctttactcacaagcagcaggttcctttgctgatgctctatttatgaaaaggaaaccaagctggaagttgaatgacaattccactgggccttagcttaggatgccacaagaaaacaccacagactgggtggcttaaataacagacatttactttctcaccgtttttgaggctggaagtctgacatcagggtaccaacatgatcaagttttttgtgtggggtctcttctggcatgcagatagccacctttttactgcgtattcacagggtggagagggagggagcaagctctctggtgtccctttttatagggatacgaattccatcatgagggccataccatcatgacctcatctaaacctaatgacttcccaaacaccccatctccaaataccatcacatgaagggttaggacttcaacatatgagttttgggagggacataatttagtccatagcatactggtttcatttttaagctaattaccaaggatttctagcccaaaggtcagagtacaaggggactatattcctctgcattgaactgtacagaagtccttgacattataccgttagtcattccattcatggtcccttagatcaaatgatgcgatttcctacatcatcctacctcttctctcaaatctcaggtcctttcatcaagcatgaacaaacccgcagtgatgaacgccttaaatgtactttctgctgtcattcagagtatcatttttgccttgtccgagcttgaatgcaagctgtaaaaagcgatcatgtactgggtatttttattggcacatcacccatgtttgaattagataatcaacagtgcacctgtaataaaaaattaaacttgttctctttaagcactgtttctttcaaaatgagatcctgtcattcaagatgcattattttccactttttcaaacccatgtcaacttcattaacctcctgagcagctttgccaagcattctgctcatctagagccacttgttgttactgctatttgcaatagcttcagtacttgagagtttacagaatgtgctgcttgccactctattcagagcctagaagtatattaactacagctgattcccgttgcctccccccctccctactcctttcaccagatcactcatttaagagatctgttcctcacctcaggaatcctccttagtggttctttagccagtttgaacaatgcatggagttgttcatttatgagtagaattaatacatttattcttcacgtatttcataaaatactgcaacagtccattgggaggaaatgcagagttttagcaccttttctttcccaggaaaattgctgttgttttaaaggaggggtccaaacttgtttgtgttcttcttcataaccccacagaattcctgatgcagatttcagctgggcttcactacctcttaaagagtatcatttggtgcttgtagttccattaactgaggggcctactttctttagtgttttcttcattttgtgtagtttaactgcgttgaggttttatattttatgttcctttcctccttctatgccgtaggaatgcaaggaacagatgcattcaatgattcattatcattaacagccagggtgaaatcaagaacttcatctacttctcggcttccttgttttgttcacaggggagccacattatgcatgagtggctcctctcaccctcctctctagatgcacactttatgtaagagactcatctttttctacttcagtgctgtgtggaatcgttagttagatacaggcaaagccactcctttagtgctttctctagagttgatggcactagatcttttttagccaagtagaaagcaattttcaagggcataaaaataagtgttttcctatttatagcacacaaactattgttaccttgtattccagtttatcatttccaatgtatttaattaatcaattccagaatctattgccaggcaaatagacacataatagacccaagtcattctcaagttcttataaatgcatgggctacagtctagagagctacatttgatccctaagaggaagttccccttccgtaacactgcctttggtgctcccagcagtagtctcttggtcttgatggactgtgtggttgacgggggtggtaatcatggtggaggggaaggggtgatcatatttttgtgctatgttttgagtgcttccagtagaagattatgtacattgatagctaatgataggtaaggcttttaaccacaggcccttccacagaactaatatttcatgttgagaaataatatgtcactgattgtggaaactcggcaaacatgaataaaagttgcactgaaggtaaaatatgctattcacctggttccctgaaaaagactgtcaactggtgttgtatttttagggacgtaccttcagttaagttgatgcagatggtatttattttaatatatttacatttcattctgtctccctgtcactcctgaccccctactgtttctcaaaatgaggtccatggaccacctacatcagaatcacttgtgaagcttgttaaaactacagattcatagacctatcacaggccatgtaatatacaatttctggggctgtggcctagagatttgtatgtataagaagcaccccaggtgactagtagggccattattactggagaatcactgcatccttggaggagatggggtaaaaacaaaagaaacacatttaattattctaaaatttaaaaattacatattctctaattttcaaaacacttagattaattttggacttgaggttctaaaaaagtaatgctatgccaaataaataaaaggtaattccctttcagtctttcacacttttaactaagacacatatccagcacagtgccagcattttttctagactgctgcttctcaaattttaatgtgcacacaaatcacctgggactcttgttaaaatcccgactttgattcagtaagtcttcagtgggccctagattttgtatttctaacaaggtctcagatgatacagatgctgctagtctgtggaccatcctttgagtaacaagatcatgtagcatgtaaggggactctttgggcttttaggttgtgtaaatttgcagaaactctgcaatatgtaatgtgtagtaacattattttctgcaaacaaaaagctgcattaaggtcctgtattccgagcatcagataagtcccttggttttgtctttctctaacacaagtaacctagagagacgtacattgccttgaatgccctgagtgattaaggattacaaaatatatataggaccttagagcaaagcaaggaaaatacaccaggacttacctccctcccactttttaagataaggtagggaaattacagggtgtgatggggcatgtacggaagcgggtagggtagatatcctagagaaaagtctggcaggctgggagggttatgggtgagtggatagggtgggggtcagggagaagagaggagagtacaatgttccaggcaccaggaacaggttatacaaaggcttagaagtaataaaagctttgcgtgaatatgcacctggccaaattgtagccttcatagagaatatatttaatttattcagatccagaggggaggctactatggaatttcaggcttcgtggcagtagtacaaatatttcttcttagggggagtggggtagttggaaggaggttaggaagagatatgccccacatcatgctaggtataagccttgcccatgatacaacgcagggaaaaaagtaacctttagtacttttgtcctgctaggaaattgctgacctgcttttctttgattgggaagaaaaacgacatcggtgggtgtcaagcagcaggtggtgaccactgtttctttaaagacaacatatgaaacactgaaaatttatttcccaataaacttgactttctgagctgaaccgcaaaaaaactgccatataataaaaggataaggaacaaggatatttccaattgccattaaatataatccaagtgaagtgattcaccgtggctcaggtgcaggttccccatcaatacaatttataagggttcagcttccaaaactacacttccatttgacagtaatttccttttttattttgttttgttttaagttgactacaattttcaatcacagttatcagttcatcacctggatgaaggtgacccagcagtccttctttatctaattcctgagatgtccttagattatctttcacaagcaaaattaacaatgataacaggaaaaataaattaattcaaagatgaagctttatcaaatgccatcttctgagggctgcattttttttcattaaacatgattcaaataatcttttgaaaaaagagatctggttatccagaattatcttcttccccactgcatgactaattccacaatcttaataagtttttaatgatgagttttataaataaagctgccatcagtttgccagccaagtgtattctttcaatatttttgagatacatgtgtatttttaagaggaattaaaattttcatcaaattaattaaaaggaacgatataacattagcacggtaaacactgaaataagtattttacagctaagtaatgctaatgctaggaatgatatctcttaaatttacatttctttatgtgtggaaatgtcagtgagagttttaagagaaaagagttctcaatacaaataaatttggagaactttgtgttgaacatatctgtacaggtttctttattaaaggacttctcagagcctttaaatatgctagtatgtactctcagtcaccaagagtgggctgtggtaatcagcacttcctgaatatatgggctattttgctttggagtctagtacaaaactagggcttcactataacatattttgggaaattataacatatttgaaataataatttacttctaaacgtaagaaataatataaatcttgtttaatcattccctttaaaaattgcttgtgtacaaaataccttcgaatctttcaaaacactactgatgttctataatcagcaactttcagcagtggcagtgtagtgtgtctgtaacttctgtattggacatgcaattcagggtgattaaaccaattggtctaagccaagattaccactttacatgatcgatccataaattgtagacataattaattgaatgtgtgtgtgtgtgtgcaaaacagaaagcatggagtaaggtctatcttcttgttgtcttcctctcatgtattctcattcaaaagagaataaataaatgggagtactcagaatatatctgtcagaaattggataaaactgagtatttctgcagcatttgtaattactttcagaagactggacaagaaatgcaagtctccacaaatcacaatggttaggattgagccttaagattctgagtaggctttgtaatcagcaaattgaagaatctccatgcagctccagcagtggcattctacaaaatatcctttggcattattatatattatcaagacaattgtatttctttggcaggggtatgaatggtgacttattttatgacagctatcagcgggctttttagtaatctgatagataacctagtttacagacctattttacttgttttaaggggtctctaatcatgtaatcacaggtgctttggaaatggctttgaagaaggactcttagagctgttgagttaataacacgcattatcaacattccctgctatatttttatacttctaaaatgttcactctctaaatgagctattctcattctctctttcttcctccctccccacacatgcaggtatgtgtgcataatgtgggctaaatctgaatgactactctaatttatacatctcttgatatcatacagccttggaagtagtttccaaattttttagtgtatctaaattttctgtggtcagccaaatggatactgcccctgtcaatagtttccagggatctttcactcctactcatccccatctgcaacgacctctattgcacctcctatcacgttcctaagagtaacacattgctgattttggaaaagaccttaatgtggacaaaaatgagactcttgaataaacactgttgctaggattgtaaatgtatctggtctttttggaggacattttaccagtatttaaatatcagatagcttccattgttttcctgtcaaaaattaaatgtgtataccctttgacccatcaattccatttctagggaatctattactgcaggataattcccacaggtacataaatatgtacatacatagaattcattgtagtgttgctcataaaagtaaaaaatgggaaatctcctaattgctcacacatagtaaaaaaaaatcaagcaacagaggcagatctatctatactgtcatagatattcaagaaacattgtttaaaaaagaataaagcaagttacagaacgcacatataacatgatctcatttatgttttaaaaatattacagaagaataagtatcaaactatcatccttgagcacctctggataggggaaggggtaaaggtaaggaggaggtgcagaataaattactttttcattttatattgttgtatggtttaatttttcttgttttacaaaaagaatataatcatgtgttacttacgtaattaatatttttaaagtaaaattatccttcaataatctccaaaatattagtttcaagagtcatagattcaggaaaaagaaacatgaggtatttgcatgttgaattaggcatgttaaactattatcaagggatactacccattatttctcttaagacttaggccagtgaattgtctattatttctttgagtattgtggcacaaagaccctaagatggccaccatatttatgccattttataatcccctcccttttagtttgagtacaacctgtaacttcattataatcaatagaatacagcaaaggtggtgggatatcactctcacaattatattaccatatacatataggactcattttactagtatgtagtaaaattctgcctctctctttctttttttctctctctctctctctctgttgctggcttagacaaagctgccatgctgtgagtagacctatggaaagggccacgtgacaaaaactggagaacagtctctagtagttgagagtgacccctggctgacagccaacaagaaaatagaaacttcagtcctataatcaagggaactgaattctgccaagaagagcatcatcagatgagacctcagtcccagctggcatcatgatttcagtccagtgagaccctgagcagaggacccagtagatgtgtccagacttctgattcatagcaactgtgagataataaattgctgttttaagtccttaagtttgtgataattttttacacggcagtgaaaaactaatacaagtaccttgttctaatattctgtctgatgtcatactaaccagtggaagataagagaaagcactcaatcagctattttgtttactactttctgatactaaactaccaccaaatgcagacacctgaactctataaatcactttctatatgttaggcatcatcctatacatttacagttcttactcacacaacttatcctcacactactcctgtgaagtggccatagattaggatattgtggctttaagagggtacaaaatttgcccaaggtggcaaggctggtagtcagctataccaggatttatacccaaagcctgtgtttaatgggataaaaaagactgaaaaagaaacaatccaatattttaaatcccacttccctttcagaaaatacttcaaaaatatagtagatctaattctacctcttttcccccaaatctgttacattttccagccctcattttcagtgacttaaaataaaaacccagttcagagttattatgctagagcctcactacaatgtggctcattatcacacagctttatatattctgccattcacataatttcctttttgatttatacctgaataaggtagtggctggaaacccatgttataggtagttctgttccttaatatgagaagattggtgactttttaagttcatacaggctttctattaaggaagtaaactctacaaaactaaaaagccaggagcacagagccgcacactaggatatggcactatcaatgtaatcatcaataggcaggttgagataaacatcatactgacaggatatgtgctgaagaaggccagaggaggaatgactcgattttatttttcccatgggcaaaggcagaaacggtgtcatgatgaacaaattaaagtcctaccacaaagcatttgtacaatgtgccatgccagaaagcaaagggcaaaccactaatctcagcggataataattagaaaaaacacaatagaagaaaaaaaaacaagaatactaggatgaatggatgttaggaaatatcactatcaattgtgatgactcttctagaatatgcattttgaccgattttatagagtgtgatttttctaaccacaggcatttagaattggcattcaaacactatgagagccaagtttaattaacttaaacttctgaataaagagacagccagagagcaagaagaacttccaatgctatagctacaatttgctgcaatttgctgttcaaactgcagaatcatatgcactgctgtttttattgcctcttcactttatcagccaaaaattgttgacacatcaacaaaacgatctctgtgatcaaagttttatcccatctatgactttctctcttcttttctgttttcctgtctgaatcagtacaatatctaatttggcccctgagatcagagactgaggtcaagaggaaaatcttgacctttataaatcactctctgtatgttgggcactgccctatgcatttacatcccttatctcagtccttatttacagggctccaggagaagtcctttgaatgatataggataatacaagagtataaatcagattattcttgaggaattagaaaactttcagtttagacttggtaattttaggataagaatgggtagaaaagaaaagtatctaaggggcatgtatgtgcatatgcatataaatacacaacacaatagcaaacttatgacatttaggaaatccacaatcaagctcaaatctccctgtcccaatgtccatctcactattctacttgagctatcttttcatattggctcagagcataatcctcaagtgaaatactgggtccttgcttcttgacttatccaaaaaccatttaaccttgagagctgcttcctctgtgcagccttccctgatgatccaaccccatgaagtaatcctgattgcttccatttctccattcacagtccatttctatcatatgatcatcatatcataccttgcactatttactcttttaagtaagtgtgctatctccttagctagactatcttaattacttgagggctgggagctcacagttcagtgaaaagataaacatgccaacaaagtttttgaaacacaatgtaaatatgtttttttcatagagataaacgatacagaatgctctaaggtaaaaaaccaaggtgacttaccttgtgagatttagagatctacagaggagctgctatctgaactggctattgaatagtgcttagaagtttgccagatacaaaggaaagaaattgacattctgggtaaaagaagctgtcggtctggagttgagaaagtgtgtggtgtagttggagaaaaatgaataaagttacctgtagagttttaagatgttggaaaggtaggttgaagctaggctttatggagtaaaaagtttatctgagagtacaaaggatagtcgttgagtttcaagaggggacaagtatggaaagatttgcattggctaaggtatttatggtgacagtataaaagcttgattggatttgggcaggactgaaggtagaaaaaaaatcaggtaactattattatatcacatgtgaaaaattatgagggctggaggtaaggcagaggtgaagaagatggagaaaaaggaatatgttagaaatggaattaggaagtagagttattagaatttggaacagaattggaggcaggggagaagaagaagcctagaataaataaaaaaatgtatatatcttgagagactgagtagatgttgatgccattaactaaaacaaggcattcaggaagaagagagggtactgaattaatgctggttgtgttgagtttgaaaaacatacaagccatctagtagatatccaatatgcagttagaaacgttctggaaaaaagtagggactagaaatctagactgggaagccactggcagtgtttaaaaaacatagatacggatgatacttctcagaaaaagagtgcaaggaagaaaaggtccgaggacagatatctggtgaacactgatacctttcaagggtggaatgaagagaaaacatcagtgaaggagtctaaaaagactggatagcccagataaatcatttttcttaagggaacaattgtacaattacacaaacttctactaaaagtaggatgagacctaaaatgaggactggatttagccataatctcaacgatgatctttaggactgtaatagcctggtggaaatagaagtcaaattacatttaatttattcaacaaatactcattttgttcctgctatgtgtcaaacttcgttttagttgataagaattcaggcaaaatccttgccctatggagtttatattctattggagaaggcagataattaataagaaaaataagtcaaagcatgttagatattgacaagggctaaagagaaagttaaagcaagaaaagagaaaaggaagtaattgtgtggatacagtatctgaagctgtgattttaaataatgtgatcatggaaggcctcacagagtacgtcatatttgggcaaagggccggaaaaaaattagtagcaacccatgaaaactgaggactaaatggtaaatgaggaagtatttatgagggaatagagagattaataatgcaagcgagaaggcattgaaagtgtaagctccagaggaggtggggagtgtatgggatcaaaaacacagaatgagagttgacaatgaaaaggggaaaggacatttcttactgtgaaacatgtggtaagactaagtataaatagaggtatatttagtgtagggtggcagggaatagaggggacttcatgattgatggcctttatttttctatgaggtagaaagcaacattttctgctgtctgcgaaggtgtgcgtggagtaaatatttcagagacaatatcattagtgcagtaagaatggggaactagaatgggaactgacttaagaacaaaaatcgagacagctgggcagttttaagggcttggctgaagttggatattatgaatttgcactggcaccagtcaatcaggtatgtgattttctttggcagaagcagtataatgaaagaaagaagaagaaggaaaaatgaaagaaaacatcaaggaaagctgattaatggttgaggattggcaagatggtgcaactacaagagtgtcaatgagttcacggttgaaatagggtaagagagagagcctgaaaaggtttacgaaatagataggtagctagggaggtatgagggccttgatgagaccagaagtgattcagtgagagtgaaggagggggagaagaggaaatgaattgtggaaatggagtgaaggcaatgattattggccagagagaggtcaagaaactatgaagttagggtttcagatgagctgcctgtcagaaaatagaggcagataaaatggaaagaaataatggtatttgcaacaacttggatggagttggagaccattattctaagtgaagtaactcaggaatggaaaaccaaatatagtatgttctcacttataggtgggagctaagctatgaggattgaaaggcataagaatgatataatggactttggggactcaggggaaagggtaggaggtgggtgaaggataaaagacattgggtacagggtacactgctcaggtgacaggtgcaccaaaatctcagaaatcaccgctgaagaacttatccatgtaaccaaacaccacgtgttccctcaaaactactgaaattaaaaagaaagaaaatggaggcagattatttcagacagatatttttcctaacagaaaagtagatttatcagtccaaaccaaaaataaggatgagtataagtctagcacatatagtatcattcttttggcttaagaaacattaaaataccaattataaaaagtttactgcaacaggacaacagaaaatatatttcataaatactatctgggaaagaaatttcaaaatcttaagacataacttcaagtaaacacaatactctaaactgttgtttggaaaaatagtggaaaacatttaagtttaagtaaagattttcaaaatagaaaaatgcacttactccaggcaagtaggaaaaacttattcaataaacatgagttcaactgtactgcattaaactctgcctggtaggataatagaaaaatgtaaaattgaattggattaaaaattatctttttcgcaaatggacatgtaataaatattttatacttggagactgaatggtagccaacatcctctaaagaaaacaaaatcatttattcaagtccagtttatagtcttattacctatataattttcattattgttattttgagatgttctggcttaattaaagttattagtgcccgtgaataagtgcaagtgtatttggcatttcataggtctgtgatactttcatatgtttcgcatttgacaacagggatctaagcttttatgtatttactttcataagtcataattcttaattgaaataaggataagccttcactatagaagtatattctacacttttatttataatttttctgtcttttctcttttcttacctgatttgggaattatctatttacaaagtatatacacaaaaccaattttctgagccattattgggcatgacttaagtgtactactttgtgtgaaattctccacccacggcattaataatcccacacaaaaaagaccaaaatgaagtgcttgattgagcttttatgattaaccaggctggaaacatagacttaaaaaagaatagcatttgaataaataaaatagagatgtgtaacaagaaaggttctactactttcactttcttcctttttagggttccttgaatccttcattgtgtgtggttattgcttgatcttcattttgcaatctacaattaagttctctgaaagtgcagggtaacaggtaaagaggaaagaagcaaagttgaagtttctgcccgtctctataattcagtttggtgtttcctgtcaattgtacatcttggattcttctggaaatgacagccacaagtacaaaagagacaggaagattgtggaagtggaaaaataaagaaaagaggaaaggaagatttgtgtatagaaggtaggaagatactttggaggagttttcccaacttgtatgtgtttgtggagaagtgtgggaagagaaaaaggaagaaagtcagcaatgaagtcaccataggaagagaataagagtacccttctatttaggagttatgaaggagtgttgggtacggtggtgggagtttcagtttgtttttttttaataggtcaccaacacatgtaatattatcatattgtgtcctatagacacattttattcactggcatttcaattccgactgccaattttccttccttctagaatataagctgttaaagccaaatttagagaagtgagtcatatgagaaatgagtctgaactgtctttcatgttattctatcactctccatgggaatattttgcttatacttccttgggacttgtcattctagagaaatcatgtcaccttaaggcatcctttaaaatacagagggaaaggtccatttaagttatatacattagattaaaagaccttaaactattagatgaaaacattagatcaaaaaacttaaacattatattaaaatgccctaaattccttataatgccttatatttaagtggtacattttacattcctagtacaaaagaaatgttatgagtcataataggaaagttaattcccaagagaagggaataatattcatagcacagttactcttactgttctgaaggtaatgaactataccagtaattattcttttgcttctaaaggtcagtaggttaagaatggaggtgtcaacataggggctttttattattcaccaacatttgatgggtatcaaccaataaaataaaataccattctttagtcattgcctcagaaagatgagatgaatatttctggacacagaatgtgttctggtctctctcctataacagaacttcagatttgaaatctgaagtttacaaaatttcagatagtgacgtggtagtgggttgtgaaatcaatgtatgggtcatgtaatgtacatttaaaacaatagactataatatgacagggtagattggatagggtagaatagaacagaaaaggttaggatagactagaataggataggctatcacagtgcactgcatatagtaagcataaacactgttttgtgaaacttttgtttaatacatacacataaattatgtatgtactgggttgtgatgaaaaatgtatttcttatgagccctggccataaaaggtcggaagtcactgtcttatgagctgcctctacatctcacagatagtagagaaaaatttttcttaggaccacagatatgatcagattattttcatctgagggaaaaccacatttatcatattctcagtagaacatataattatcagcggggaaaaataatttttatccaagatgataaaaaaattgacaagatggaacattagaaaattaaaagaaaacaaatagaacactctctgtgaaatcagaagggcaaaagtggaaacaatccaaatgtccatcaactggtgaatgaacaaacaaatgtgatatctccacgcaatgagccattatctggcaattaaaaggaatttaactgatgtgttatgacatagacaaattttgaaaacatgcaaagcgataaaagccagacacaaattgacaaatattatatgatttaatttgtatgacatctccagaataggaaaatctgtagagacaaaatgtagattagtgctacttacagttgggggataaaggagtaggaagatgacagctgagtgtaaagggtttttgtgaggtgatgaagatgttctaaaattgattgtggtgatagttgcaccactctgtaaatataataaaaaccatttaattttacattttaaatgagtgaattgtatgatgtgtgaaatctatctcaataaagctgttaaaaaaaaaacccaaaaccagaagcaatcaaatatttaccttttcctagtcactcacaaatgaaagggtagtaactgatatacatactaatgcatgtgcatgtgtgtatacacatgcacaaatatagaagaaaataaagaaaaagacaaaatattcatatccatacttcaagataaaattcaaatattacattctctgtgaaatcctcctagatttctccagcttattttctttgtgcttctaatgcatgcattttacatacacctattacaaggcttactacattgcactataattatctatttatatgtctactcccttactctgcccactgattatgaacttctcaaggtcaaggaaaatgtctaattatttatttctggattcttagtcctttgacaaatgtttgtacaataaaaaattgtagttttgaaacaaattctaatacatgctaacagatgttttcactttaaattttagaaagcatttttttcgactttatatcttccagacccttcaaatgactttactcactgaatcaattctggacatgaataacgacttgaagaaatcatctgatgagcttgctcttatagaactcttccaccacttggcacttgctcactacctaactggcatttggtttctctcagtgtggtttatttcagtaatcttacctaatgaattggattgaccatgccatgatccaatcaaagccatggtgattggctgtcttgacaactgggaaaaaatattgatcttattctggtcaattggctgagttatatagagataggttaataatgtcatcagaattactcttatcagtatcattaagtccaagtaagcaagctgctaagctgtgagcacatctgtaatccttacattccccttatcttcccactgtctctctcctataaaagtgccttgttcacagaaggaatttttaaatgtttaataacctaaaaggtctcacaaaatggtaatgatatttcatacgatatctgaagcaaagcaaattcaaatatttcagttagttatttttaagtcatcaaatgattctttttttttttaacacactggcatatgaaacatgctgcacatttatacagggaaatcttgtcataatggcttgttctatagatgattaagactgcaacatttatatttaatagtcccaatcatatatttatgatgaattttgctattttagaaaatgttttccagaagaaattccttcctcttctgagtcagtggaactaagtttaaccgaatttcttagaaaaattcctcttttttgtaaatatgttaatcatttccaatttaatgtttttatcctttggctagaggtacctggtaatttaaatatttttggagtctagatgagcaattaaacattttaaggcttggatttgatatggggaagagtatgtagggaaacatttattgctatttagtatgtacactattctcaaaatgtgttaaaaatgtttgaggttggccaggcgcggtggctcaagcctgtaatcccagcactttgggaggccgaggcaggtggatcatgaggtcaggagttcaagaccagcctggccaagatggtgaaaccccatctctactaaaaactacaaaaattagccaggcacggtggcaggcgcctgtaatcccagctactcaggaggctgaggtaggagaatcacttgaacctgggtggcagaggttgcggtgagccaagatagtgccactgcactccagcctgggtgacagggtgagaccctgtctcaaaaaaaaaaaaaaaacaaaaagaaagtttgagtttatttctttattatcctgatgataactgtggaagtgtaatgacaatataataacattttaggttttgcaaaatacacgggatacatataaccagtaatttaagtcatattcataatgcagttccttgagaaaggatcctgcctggagcaagtgtttatggttttcttatgtccatatccctcttgggttaattaaaagtgctattttatcatatccaagttggaaaatgtgacatttaacatgaccaatttatttaacagaaaaagatgaacaaattgctgacctaatatttgtgagtcatatttcacatatttgtattacacacctatcacatggaataagagttgtttgatgaaacaaaaaccacaggaaattaggaaagaaataatgctaaatatttttccttcagtaaacacaaattccccctttcctataaatgaagtaagctttaactgaataagagagagagtccaccttaaataaacccaacaagcaaaaatctcgagttatgaaaatcgtgaaatttaggggcagggtaattattcacattataatgtgacaagattttctaaaagactcctctacatagtgacctcacacattaggtaaagctataaaattatttgcgtacaggactttaggaacataccccatgtatgtaatgagagacagctgaatctcaactgagcacttaacccacattcttataccagctggcaagttctcaaatgtacaatggaagagagtagtgctacggcattaaagttacaagacctgtaaccatattattggagagtgcttttctggagcaaaacaaaaattgaactggcataaagaaggagagagccagaacactgaagaacatgcagcagtcttttctcatccatatcaggatggtgtaataaattactctcttctctctcatgctgtcaggagaaaacgatgtttagattaaacctcgctaaggactaaaaggataatttgtcagtattttccagtttactaccaatgcagtattgatttgctagggtccttcttcctatgttatttacactaattcaatctggaacaactgaaacccaagttgttggaaagcaagatatttctttaaatctcccagacccaaggtataaagtacaaaaaaattattatttctagttcttgtgggtaaagaccaaccgcttcgttggaggcaagttattagagaaaaccacttttctcctgagatttaccttgggctaatttctttttataaaattatgattcttgggagaacgtgataaaaaaaaattctgaatgcctgcccaatttagcagactcgtgactctagttctaggcagctgcttagaaacgagaagtaaaacagaaacatcttgataaaccttcttgtggctgaagctgataaaaatgacagtattagtttgatatacaaatgacagagcttagggacaaaactacactgaggcacaagataaaattacttcccaaatccttacttctccctatgcaagttatacaaatgagcaaacagtatcctataacatccagaaataaaacaaaagcaactaaaggttaaaataatttatgtattgagggcgagtaaaaatatatatcaagtacttaatccatggagctagcattgtctgtctaccttccttatctttctgttttttggttgtttttgttttgttctgttatgttttgtttttgcttcctggggtacctaaatgtcagctgtggcattgttttgactgcaaataaatatgggaggactggtaaaaatgtcatgagtttatgggtttatgattcttttaaggctgaagtgctgaacttccatttgccacacttttcaacctctacagatatttcctcaaactccgacatgattcaggattagtaaaatctcactttaacaccttattctttcttattctagtcttactttaggtgtgactaccctatagatccacatttattaaaaactttgatgggattgattgatcattctaattggaatgctttctaaaaaatcaattgatgcattattggataaaatatgattatatcttcataaactaaaatttcaatagtttttactggaattactagggaatttagtcagatgacatattaatttaggcaatgtcttatatgaatcgacctatttgacaattttgatcaacttgcttattttcataaatcactcaaaacaatacatgcatgtgcttatttatttatttatttatggacattcaatcaattggtatttgctatttccttgtcttaaaatgaactatgctgagtataaagttcttctacaacactcatttgactaattgtgattgaatgtggttgtgtctacatgcattgatttggcatatcaattgcaactatttctccatgcacaagttagcttgaatatattaccataagggccagtatagtcatcataaactgaaacggaacaaatccaggaaaccagaaaataggtttcactgattcaactattaagagtttaaaaactactgacttcatcgagctgattgaccaagtctttcagaaaccaaactggcttacacatataaacaaagcctttaaaaatcaattgtgcaagaaatagggggaggatgtggaggaagcagaatagaaagttccacccattgccccgcaaaaggcaccaacttaacagctatctatgtagaaaaaacaccataagaaccaaaaatcaggtgagcactcatagtacctggttttaacttcatattgctgaaagcggcactgaagagatagaaaaaacagtcctgaattaccaatacccccctccccccattgcccgtggcagcagctgtgtggtgtagagagtatctctgggcgctgggggagggagaacacagcaattatgagacactgaactcagtgctgaactgtttgttagagcaaaaaggataaccggaccaaactcagcagacaaccacccatagagggagcatttaaaccagccctagccagggagggaatcactgatctcagaggtccaaacttgagtgggtacaaacctcaccactgagggctacagcattctgtgcctccaagtaaacctgaatgacaatctaggccataaggactgcaactcttagttgagtcctagtgctgaagtaggcctagagacagtggactgggaggggcatgtaacatacttgagacaccagctggggcagccaagggagtgttggcagcaaaactcccctaaccccaggctgcacagatcacagctccaaaagagaccccttccttctgcttgaggagaggagaggcaataatgaagaggcctttgtcttgcatcttgtataccagctcagccaaggcaggatagggctctggtcagagtcatgaggcccctgttccaggccctagcttccagatgacattactggacaaaccctgggccagaagggaacctgctgccttcaaggaaagcacccagtcctgccaacagtcatcacctgctaattgaagagcctttggaccccaaataaacagcaatgatacccatcaaaagccttgagtgagcctctgagacttgctggtttcaggtgagactcagcacatgatcagctgtggtggcaatggggcaaaacttctgcttgagaaaagcagagggaaaagcaaaggggacattttcttgcaccttatataccagtatggtgaagtggggctagaacaccaagcgggctcttggggtccccagttccaggatttgactattgaacagcatttctggacctgccctgggccagagaggagcccactgctctaaaggttgagttccaagccaggcagtattcacaaaaagctgatttaaaagaccctctgccttaaatgaacatcagcagtagtctggcagtactccctgtggcctggggtggcggtaactaccaggcgaggttcctctgtcttttgaaaggggaaagaagagtgggaaggactgtctctcgtgttctgagtaccagctcagctacaatacaatagaacgccaggtattcttcaaaggcttttttttacctctagtccctgactcctggacaacacttctggaccttgctgacctgaagggaaggacacagagctggctggcttagacaccagccaattgtagagcccccaggccttgagcaaacataggcagtagccagggaatggttaaagccagccttgggtaaaaccagtgttgtgctggcattaggtctgaaacagcacagtcatagtggtggtggccacagaggtgcctgtgtcactccattcccagctttatgtggttcagaacagagagatagactctgtttctttgagagaaagtaagggaacagaacaagaatctctgcgtgataatccagagaactctcccatatcttgtccaagaccatcaaagtggtacctctacgagtctgcaagaaccacagtattactgggcttagaatgccccctaaagcatatatcacaacacacaagtctttttaaatgtctggaaagccttcccaagaaggttggctacaaataaacccagacagtgaagactacaataaacacctaactcttcaatgcccagacaacgaagaatattgattagcatcaacactatctaggaaaacacggcctcaccaaatgaactacataaggtaccagagaccaatcttggagaaacacagatctgtgacctttcagacagaggatccaaaatagctgtgttgaggaaactcaaagaaattcaagataacaaaaagaaggaattcagaaatctatcagataaatttaacaaagagattggaataattcaatagagtcaagcagaaattctggagctgaaaaatgcaactgaaatactgaagaatgtatcagaatctaacagcagaacggatcaagcaaagaaagaactggtgaggttgaagacagtcttcttgaaaatacatagtcagaggaggcaaaaataacaagaacaaaaacaagaacaataaagcatgactacaggatctagaaaataaccttaaaggggcaaatctaagagttattggccttaaagaggaggtagagaaggacaaaggggtagaaagtttattcaaaggaataataacagagaacttcccaaacctagagaaacatatcaataatgaagtacaagaagattatagaacaccaagcagatttaaatcaaagaagactatttcaaggcatttattaataatacaactctcaaaggtcaagggaaaaaaaggatcctaaaagagaaaagagaaaagaaacatacaacatataatgaaactccaatatgtctggcagcagagttttcagtggaaattgtacaggtcaggagagaatggcatgacatgtttaaagtgctaaaggaaaaaaaagtttaccatagaatagtatattcagtaaaaatatccttcaagcacgaaggagaaacaaaggcttccccagactaacaaaacctgagggatttaatcaataccagacctgttctacaagaaatgctaaagggagtacttcaatcagaaagaagaggacattaatgagcaataatgacctgaaggcacaaatctcactggtaatagtaagtatacagaaaaacacaaaatatcgtaacactgtaactgtggtgtgtaaactactcttattctaagtagaaagactaaataatgaaccaataaaaagaataactacaacaactttttaagacatagtaagtacaataagatataaatagaaacaacaaaaagttaaaaagcagaggaacaagattaatgtgtagagtttttattatttttcattttgcttgtgtgtttatgcaaatagtgttgattgttatcaggttaaaataatgggttataaggtagtatttgcaagcctcatagtaacctcaaaccaaaaacatacaatgaatacacaaaaaatgaaaagcaagatagtaactcatatcaccagagaatatcatcttcactagaagaagacagaaaggaaagaagaaagagaagaccacttaacaactaaaagacaaataacaaaatggcaggagtaagtccttacttatcaataataactgaatgtaaatggactaaactctccaatcaaaagacacagactggctgaatgggtgaaaaaaatattgatctgttgcctacaataaaaacacctcacctgtaaagcacacatagactgaaaataaaggaatggaaaaagatattacatgccaatgaaaaccaaaaaaaagagcaggatttgcgatacttatatcagacaaaatagatttcaagacaaaaactataagaagagaaaagaaggtcactgtttaatgataaaggggtcaactcagcaggaggacataattttgaatacatatatgcagccaacactggagcacccagatatataaaacagatattgttggagctaaagagagagataggccccaatacaataatagctgcagacttcaacaccccactttcagcattggacagatcttccagacagaaaatcaacaaagaaacatcagacttaatctgcactatagaccacatggatgtaatagatatttacagaacatttcatccaagagctgcagaatacacattattttcctcagcacatggatcattctcaaggataggccatattttagttcacaaaacaagtcttcaaaacattcaaaaagttgaaataatatcaagcatcttctctaccacaatgggataaaactagaaattaataacaagaggaattttggaaactataaaaatacatagaaattaaacaatatgttcctgaatgaccagtgggtcaatggagaaattaataaagaaattaaaacatttcttgaaacaaataatgatggaaacacaacataccaaaacctatgggacacagcaaaagtagtactaagaaggaggtttatagctataatgcctacatcaaaaaagaggagaaacttcaaattaacaatctaaccatgcattttaaggaattagaaaagcaagagcaagccaaacccaaaatcagtagaagaaaagaaataataaagatcagagcatacatttcatttaatttcaatgaaactgaaatgaaaaacaatacaaaagattaatgaaacaaaagtttttttaagttaaacaagattgacagacaaagaaaaaaagagagacgatccaaataaataaaatcagaaatgaaaaaggacacgttacaacttatgctgcagaaaatcaaagtatcattagtgtaatatctgcaactatatgctaataaatcaaaaaaatctagaagaaatggacaaattcctagatacatataacctaccaagattgaactaggaaaaaatccaaaacctaaacagaccaataatgaataacaaaatggatgctgtaataaaaaatctcccagaaaagaaaagcctggtggtttcactgctgaattctaccaaacatttaaagaagaactaatatgaatcctactcaaactattccaaaaaatacaggaggagacaatacctccaaactcattctataggtccaatattaccctgataccaaaaccagataaagacatatcaaaaaaagaaaactataggccaatatttctgatgaatattgatgcaaaaatcttcaacaaaataatagcaaactgaattcaacagtatattataaagatcattcatcatgaccagagggatttatccctgagatgcaaggatggctcaccatacacaaatcaatcaatgtgatacatcatacaaacagaatgaagaataaaaaccatgtgatcatttcaattgatgctgaaaaagcatttgataaaattcaacaccacttcatgataaaaaccctgagaacactggggatagaagaaagatatcccaacattataaaagtcgtatttggcagacctgcagctggcatcatactaaatgcggaaaaactcaaagcctttcctttaagacctggaacgtgacaaatatgtccactgttaccactgttattcaacatagtattggaagtcctagctagagtaatcatataagagaatgatataaaggacacctaaattggaaaggacgaagtgaaattatcattgtttgcagatgatgtaatcttatttggaaaaacataaagactccacaagaaaactatcagaactgataaacaaattcagtaaagttgcaggatacaaaatcaacataaaaaatcagtagcacttctatatgccaacagtgaacattcctaaatagaaatcacaaagtaatcccatttacaatagccacacagaaaataaaatacccaggaattaatcaaagaagtgaaagatctctataatgaaaaactataaaacactgatgaaagaaattgaagaggacaccaaaaaatggaaaaatattccatgttcatggactggaggaaacaatattgttaaaatgaccatactatccaaagcaatctacagatttgatgcaatccctattaaaatcccaatgacattcttcacagaaacagaaaaaaaatcctaaaatttatatggaacgataaaagagccagaatagctaaagctatctaagcaaaaagaacaaaactggaggaataacattacctgacttcaaattatactacagagctatagtaaccaaaacagcatggcactggcataaaaacagacagatagacagtggaacagaatagagaacccagaaacaaatccacacacctacagtaaactcatttttgacaagggtgccagtaacatacactggggaaaggacaggcacgtcaataaatggtgctgggaaaactggatatccatatgcagaagaatgaaactagacccctatatcttgccatatacaaaaatgaaatcaaaatgaactaaagacttaaatctaagacctcagcctacgaaactactacaagaaaacattggggaaactctccaggatattactctgggcaaaaaatttcttaagcaatactccacaagcacaggcaaccacagcaaaaatgggaaaatgggatcacatcaagttaaaaagcttctgtacggtaaaagatacaatcaacaaagtgaagagacaacccacagaataggagaaaatatctgcaaactactaatctcccacaggattaataaccagaatatataagaagctcaaacaactctataagaaaaaacctaataatcctatcaaaacatgggcaaaagatttgaatagacatttctcaaacccagacatacaaatggcaagcaggcatatgaaaaggctcagtatcattaatcatcagagaaatgcaaattaaaactatagtaagatgtgatctcacccggctgggcgtggtggctcacgcctgtaatcccagcactttgggaggccgaggcaggtggatcacttgacgtcaggagctcgagaccagcctggccaacatggtgaaataccgtctctaccaaaaaaaaaaaaaaaaaaaaattagccaggcatggtgatgtgcacctgtaatcccaactactctagaagctgaggcataagaattgcttgaacctgggaggcggaggttgcagtgagccgagatcatgccactgcactccagcctgggccacagagcgagaccctgtttcaaggaaaaaaaaaaagatgattttaccctagcaaaaatggcttttatccaaaagagagacaataacaaatgctggtgagaatgtgcagaaaagggaatacttgcacactgtttgtgagaatgtaaaatagcacaaccactatggagaacagtttggagattcttcaaaaacctaaaaattgagctaccatatgatccagcaatcccactgatgggtatatattgtatagtatatagtagcagtatacccaaaataaaggaaatcattatatagaagagatagctgcatgcctgtgtttgttgcagcagtgtttacaataggtaaaattttgaagcaacctaagcgtctatcaactggtgaatgaataaataaaatgtggtaatatacaccatggagtactgttcagccataaaaaagaatgagatccagtcatttgcgacaacatggatggaactggagatcattatgttaagtgaaataagccagtcacagaaagacaagcattgcaacttctcacttgtttgtaggatctaaaaatcaaaataattgaactcgcagacacagagagtagatgaatggttatcagaagctgagaagggtagtagggggctgtggggggaggtgggggtggttaatgtatacaaaaaatagaaagaacaaatgagacctactatacgacagcacaacagggtgactatagtcaataataacttaattctacatgttaaaatagcttaagagtgtaattggagtgtttgtaactcaaaggataaatgcttgaggggatggataccccattctccatgatggacttatttcacattgcgtgcctgtatcaaaaaatctcatgtaccctctaaatatacacacctactatgtacccacaaaaattaaaaatactaattgtgcaagaaataatagttcatatcaatcaaaaccagttattcagttctgtgtaaagacatagacataaatcatataccaaaagttacattctatattcattctttcaaaagtacttgttgaacacctgctaagtcctagaaactattctagggcctttaaggacttcagtgaacaaaacacacaaggatcctagtcctcagaatttacaattaatgtagatggaaacagacaataaacaataagcatagtatataagtaaattatatagaggttcatacatgctatggaaataaagacaaggtagagcagggtaaaggtattaagagttcagggattatggtgcaaactgcagtagtgtgtagaatgggtcaaagtagacctcactgagaagcagacatttaagcaaaagcttgatggaggtgtaagagtgaaaacatgcaatacttggaggaagaagattccaagtagaggagtcagccacagtgaagtacctaaggcagaagtgtgcctcaagtattttttttttttggagattgacaaagatgtcagtaacaatgctgcagagttaagaaaaaatgtagaaggaggtgaggtaacaaggagctagatcatggagggtattttagatcactgtaaatattctactctgagtgaaatgagaagccatttgcaatatttttagcagagtcgactcatatattttgtctactcttttattatttttaaataattgacacattataattgcatgtttatggggtagtgtgatgtttcaatacatgcatattttatataatgatcaaatcaggatagttggcatgttcataatctcaaatctttatcttttttttgtggtgatatcttgcaagatcctctattctatttatcttgaaatatgcaatacatttttcttaaccagctatggtccctctactgtgcaagagaacaccagaatttatgtttcctatttaattgtaactttgtacccactgaccatcttctcccttttcccccttcctcctcccctgtttggtctttggtaaccactattccactttctacttctatgataccaatctgaaagaaaaggatgctaacctgtaataagaaaatattttaaaaagatcactctgagaagcatagagacctgttacaaggctgtatgatttaacccagatgagagatgatggtggcttggacaagggtggtagctgtggagctggaggtacagtgaacagagtttgctaatacagtggatgtaaggtattgcaaggaagagagctttcaggatgactccaaggtttttgacttgagcaagtggtaggatggagcttccgtcaactgaaatgggaagtctgcaagttttgggtaggagggaaagatcaggagtttagttttgggcaagttgagtttaagatatctattaaacatccaaatgaaattaccaaataagtaattgaaaatggatgtcagaagagaagtcttggctgagaaataaatttgagagtcattagtgtattagatggtttaagcctcaggactataagaggtcactgagtgggtataaatggtgaagacttgaagacaaaagctgagcactggtgtacaccaaattaaaaggttagagagtcaggcctgtaatcccagcactttgggaggctgaggcaggcgaatcatgatgtcaggaaatcgagaccatcctggccaccatggtgaaaccccgtctctactaaaaatacaaaaattagctgggtgtggtagtgtgtgcctgtaatcccagctactggggaggctgaggcaggagaatcgcttgaacccaggaggccgaggttgcagtgagcagagatcgtgccactgcactccagcctggcgacagagcgagactctgtctcaaaaaaaaaaaaaaaaaaaatagaaggaaggaaaagaatcagcaaataagacagagaagtgaccactgagataagaagaaaactgagagagcatgatatcctgtaagccaggtgaaaacagtgtagagaactcagaatttcttcatggaatgggatatgaccttagttttatactaattttgttttggtccatgtttagcactagtaacctgggattataaaacatgtggtataaggaaaattcttggattatttcacaaggctacaaattttcgcatggtaaaatggatcaaacaattacacagcatttttgtgcaggctacacaatctctccaacttcagaagaattatttcagcaaatataaactttgaaggaacaatgaaaatacgggacaattttttaccaacaaactaacttttcacttacaaacatcaaaataaatgaaaattatttaagcagaaatttccaattgaaaacaaaacgttaaaagtatcaactttggtgaataaggaaactctatttaaaatcaaccatttagcataatagtcatttgttcagggaaacacaatgatgtgtacactgctgaaattgttaaatgaaaaatacatgtttttggtttcaaaggaaaatagcatggtatatattaatatgaaaagtttgaaatttgcagctgtgttcttgttttacagctgctaattttggcaaacaattttgaaacataaaactgcttgtccactagataacaatacttccatgccttgcttcctctgtaagacagaaacttgatctccaaacatagttctttcaagcaaacaagaaagtatatcccctctatacatggggctgtaatttcattaggacaatcaatatgagcaggtgacataatagtaatgtaaagagcaaaatattatttgcagtataatagatttgtttcccactttattttcagaaggaatatacacatacaaagctacgttaaagaaattttaaatttctatttatgttaaatttaaaatttaaaacattggaaggagccctttaagcagcaagtattggctattttaaaaagtggccaagaaagcaggtgaattggattcattaatctatgacatcattttccttttattttgaaaaattatgttaaattaaaaaatttaatagcacattatcaaagtacaaacgggacaaaagagcatgcaggaaaaaaaaatctccctccaatccctgtcccacagccacttacttcctctccacaaatgcaatcaaaattattcatttattgtgaatattttcagagaaattctatgataatgtaagcatgcaagcatatagcttcattaaaaatcacacataaagtgtagcacagtggacatcatcattttcaaacttcaggttgtgatctattagttataaaatgaatttactggatcacaattaacattacatagatatgaaatggaatcgaatagaagagaaaatgtcagagcatgttgtttcatagtaagggtagatatcgtcttatgaaatttttgtttttgttctttatttatggattcattgtgaactgggttagaatgtaaaatatatttcttcaactgggtcatagacaagaaaatccactactatcgacaacgattcaaaccctgtggcttttgtttaatgatgcatcttgaagactgttcaacttcaataaatacagagttgtctcattttgtttgtgctagatttattttaaaaatttcagacacccataaaagggtataaagagcaatattataatcaccatgtaccccattactgagcttaagaaataaaatatcataaataaatacatatacaaatagtgtcaatggagttaaaaccccctgtgcaattccgcttgagccacccaacttttcttcctacttatatgtcttattctctttaaggctgcagagtattccactgcataaattactcaaattattataccataaattattcaagtggcttcctattgataaacatcttgattgatatcactgattttttgatatttcaaacagtgctaagtgaatatcttcatacataccactgcatgctcattcaatatctgtaggataaatttcaagaagagaaactgctggatcaaagaagataatttgtctttgctagatattgtcaaatatcttttcatatcgactgtatctatttttacttccataatcaatatttcatacacattttccaaaaatgtatgttataaaattttaattattgccaatattataggtgataaatgataaaatttagttcagttttaatatgcatttctcttaggagtgagtttaaacattttttttcatatgtccaagaaccattctcatttcctttactatggcatatatcaatttttttctattacattatttggatttttttcttattgattataagcactctttatataggaggaaattgactgtctctgtatgctacacatattttaatatacatatatatacatatgtatataattttgtgtagtcaaatttgacagcagttttatttatggcttctagttttttgggctatatctagaaaaggttttcctactttaaggttggaagaaattctcccatattgctttatagtacttattttcacatttaattttgggtcacctagaatttattctggtgtagggagtgaggtacggagggaagcaactttattgttttctgcatggctacataattgtctcaacacttttcataaacaatttatgccttccagacttatttgaaaggtcatctttatcatatactgtactcctgtttgtatttggaaccatttccagtcttcttccatcctaacactttgtttattcatataatagcaccccgctaatttatttacaatgaacttaaatatattttaatatctggcaaatctatcatcattatattatgtttttccccatatattttcaaagtattcttatgtttgtttttcccagttgaatattagagctggtatgttaggctttttataagaccaattgatattttgttattgaaggcatgttaaaatgatagattaaggggaatttttatggttctgagacttatttaagaaaaaagtatggctttctacttatttatgttcttttctatattcctcaatagcattatgatttttgtgtgtgtgtgttgtactttttgcttgtttattctcaggcattttgattgctgttgttgctactgtaatcatttattcaactatattttctaagtaagtattgtttgtatggaaggaaactattaatttggtgtgctaattttatacccaactagcttactaaattctcttatttcttgtattagtttcatgtttggtcttagattttttttttttagatatacaattatataacctaaaaataataaaattatacctcatttttctaattttattcctcttctattttctaatgtggacagttgctacttcataagtttaaagtagttaattagagcggatatccttgttttgttcttgtctctaatagaaatccttctagagccaggtgtggtggctcacaactgtaatcccagcactttgggaggccaaggtgggagaatggcttgagctcaggagctcaccagcctggtcaacaaaggggacatccattctctacaaaatttttttttaaacagccatggcatggtggcatacacctttagcctcagctactccggaggctaaagtgggaggatcacttgagcttaggaggtcaaagctgcagtgagccatgatctcatgactgtactccaacctgagaaactgagtgagactgtctcaaaaaaaaaaaaaaaaaaaatccttctagtgcttcctcacttcaaataaaactggattttgtgattttacatgatcttattctaagaaattatatatatatatatacgtttgtatgtatgtctatcaaaaattgatgcatgacagacagtataatatcatgggtaaatgcaaggattgaactgcctggtgtaaatactgactttaccacttaccagccaaatcattttatgtatccttattgtgccttagttttctcatcgtaaatgggaatatcatttgtacctcagttatggagcggttatgaatattaaactcaatatttgtaaaatacttagagcaatgtttggcacagaataaacacatttgttaaataaaatgttggtttttatcaaaacccttttgaaaatctccgccgtttttaaatttggtttatctacattgatgtactcatatggtatgttagagtaacagagtttttaatattgaataatccttgcattcttagtatgaactgcacttacttgtagtgtattatttttctgttatattgctggaccttgtgggctagtattttatttaagaattttgcttcggtattcagaagtaaaattgatttgaagatttatttcgtactttccttttttaacttttagatatcaattttttttgcttccaaaaaaatctttaaaagatttggaagctttcatttaattatgctgttaaaacatttaagtagcattgaaataatgtgttccttaaagatgtagcaaattttgcctgtgacactgcctaattacgctacttcttttggtttaagtagttctttggaagttttatttctattttacaaatcagatttctttctctactgagaaaattttctctcccttctgagaccagttttagtcatttgtattttttctatgagattatccattccaacatggttttcaagggtaccttaaaagaggtgcacaaattggtctcttatgaatcattcaatatcctctgtctctttagttatttcgacatactcacgtcttattttctcttcttttcctgattctgctattttactgcttatgcctataagaattggttcttgaatttattagttagttctcagattttatcatagtttccttaaaaaatcattccagttcaaacgaaaatttaaagtcattataaaaattgttaaattccagaatcaataaaggacatccagttaaaaaattataattatttattttgaaataggtgatcatacagaggaaaaaattccaaattatacaatatagcattcagagaaagaatatttgttcaattaacgcactgcagatcttcagatttccactttcctccacagaggtgaccatgttacccattcatagagacaaagtattaattgcagtggcagttgattttcatttgtaattttttggctgcagttggtaagtaatgatattctgctcttttaactttcaacccctgacttgaaagaggttaatcattttccattggttcctaacagtgcttatttttccaaaacaaaataaactctctctagaatataagttgtgacttctgaaagtgactggtacctcaaagcttggcccacatactcattcaaggaatttaagataatttgggggtatttggaggtagtcatggactactttataatctaatgaaggacatggatccttgccagaggactgcatatctatcagagtgcattcaatattacatgcaatttgaggcattcacagactctctgaaacccattcatagaacttcttggaactgatttatttataggtttattagtacagctgacgcttgagcagtgcaggggttagagatgccgactaccacacagtcagaaatccatgcataatttttgactccccaaaaacataactactagtggtctgctgttgagtggaagacttgccaataacaaacaattgattaacacatattttgtatgttatatgtattatatacttaattcttacaataaagtaagctagaaaaaagaaaatgttatcaagaaaatcataaggaagataaaatatatttactattaattaagtggaagtgaatcatcataaaggtcttcatcttcatcttcatgttgagtatgctgaggagaaagaggaggaactgatcttgctgtctcagggatggccaaggcagaagaaaatgtatgtataagtggacccctgtgcagttcaaaactttgttgttcaagggccaactatatgttcatgcttcacacatttaatgagtttttaccttgggccaaaatttctttacatacatctgtgatcagcttgttttatttcaatctagttgggggatacttacaattaaagcccagtgtgatgcagctatgacgaggctagtccagagaaccacagaactatagaggaggaacaatctcatccagaggtctgagggtggggatccagagtcaaactggagaactgatcatatagttttgcatatttgtcccctccaaatctcatgttaaaatgtgatccccagtgttggaggtggtgcctatagggaggtatttgggttatgagagtggatctctcacgaatggcttggtgccctcccggtggtcatgagttcacatgagatctggttattttaatgagccaggcatccctctcttactctcttctggcatgtgacactctagctccccttccactttgccatgactaaaagcttcctgaggcctcatgagaagccaagcagatgcagatgccatgcatgtacagcctgaagaaccatatgtcaaataaacctcttttctttgtaaattacccagcctcaggtatctttatagcaacaaaaacagacacacagacaaatataactgatttagatggggctagtgtcctaggtgcctaaccctacaagttgtcatcccctcatggccaaggatgagctgcagagtgaaggctggctcacggaagaccagaaacaactaaacaatctaagcctttctgtcctcttaaagtgttcctcaaggctgccaggcttgattaatatttttatagcttctgaattttcttctggatgacatttatttttttaaatgtttttattgagaaataaaattttcatatttatgggatacatgtgatatgttgttacatgcatagaatgtgcagtgatccaatcagtgtatttgggggtatccatcatgttgagtatttatcatttctatgtgttgggaacatttcaagtcctctcttccaggtattttgaaatatacaatacattgctgttaactgtaatcatcctactctgctattgaacattagaaatttttccttctatctaacagtatctttgtaaccgttaataaacctttcttgatctttccccatatctccttcccatcctctggtatctatcattctaaactccatctccatgagatcaacttttaaacctccacatatgggtgagaacatatatcattttttattctgtgtctggcttatttcacttagcataatgatgtccagttccatgttgctgcagatgacaggattttattctttttatggctgaataatattccatcatatatatgtaccacattttctttatccactcatccactgatggacacttaggttgattccacatcttggctattgtgaatagtgctgcaataatcatgggagtgcaggtgtccctttgatataccgatttcttttcctgtggataaatgcccaagagtgggaatgctggatcctatagtagttctatttttagtttgttgagaaatctccatattgctttcaatagtggttatactaattaacattcccaccaacagtgtgtaagagttcccttttctcctcgaccttgtcagcatctgctattttttgtctttttaataacagctgtgataagtgggataagattatatttcattttgatttgtatctacctgatgatatgtggatttatgtctgggttctctattcttttcaattggtctatgtgtctgtttttataccaataccatgctgttttggttactatggtcttgtaataaattttgaagtcaggaagtgtgatgcttccagctttgttctttttgctcaaacttgctttggctactcaggctttttttggttacttaagaattttaggattttttctatttctgtgaaaaatgacagtggcattttcataaggattgcattgaatctgtagattgtgttgggcactatattaattcttcctattcatgagcatcggatgtctttccacctgtttgtgtcctcttcaatttctttcatcagtgatttggtagttttcttggtagtggtctttcagtgccttggttcaatttatttctaggtacttatttttttggagctattgcaaatgaaattgttttcttgatttttcctcagctagttcattactgatgtataacaatgctactaatttttgcaaactgattctgtatcctgcaactttactgaatttatcaaatctaagagttttttgttgacgtcttaaggattttctaagtataagataatatcatctgcaaagacagaacatttgactacttctttttcaaattagatgccttttatttctttctcttgcctgattgttctggctaggacttccagtactatgataaacaggagtggtgaaactgggtatctttgtcttcttccagttcttaaagaaaaggctttcagcttttccctattcagtatgatgtcagctgtgggtctgtcatatataacctttattatgttgaggtgtgttccttctatgccttgttttttgagaggtttttaattttttatcatgaggggaatgttgaattttatcaaatgcttttctacatctattgagatgtccatatggtttttgtccttcattctgttgatgtgatgtattatgtttattgatttgcatatattgaaccatctttgcacctctgggataaatcccactgaatcatggtatattatgttttgatgtggtattagacttgttttgttgatgttttcttgatgatttttgcatgtatattcatcagggatattggcctatagctttctttttaaattgtgactttcgtggttttagtatcagggtaatgctggccttgtaggatgagttagggagaattccaccttcttcaactttttgaaatagtttgaggagaattggtgttagttcttagaaggttcggtaaaaattgtcagtgaaaccattctgtcctgaacttttctctgttgggaaacattttattactgattcaatctcattactcatttttgatctgttcaggttttctatattttcctgattcaatcttggtagggtgtatgtggccaggaatttatccatttcctcaacgttatccagtttgttagtgtatagttgttcatgacagtctctgatgaccttttgcatttctatgatatcagtttttgttatgtctcttttttcacttctggttttatttacttgggtctactctctttttttttggttaatggtttattgattttgtttatctgctgaacctacttttcatttgttgttcctttgtattactttttatagtccatatttcatttagttctgttctgatctttattattgtgttctttctactaatttggggtttagtatgttcttgcttttctaattctttggggtgcctgattaggttgtttgacatctttctacttttttgatgtgcgcatttttttcccataaacttccttcttaacactgcttttgctgtatcccatagtttttgttgttgttgttgttgttgttgttttgttttgttttttttttttagacagagttttgttctgtcacttaggctggagtgcaatggctcaatcttggctcattgcaacctctgcctcccaggttcaagcagttattctgcctcagtctctggagtagctgggattacaggcacctgccaccatgcccggctaatttttgtatttttagcagagacagggtttcactgtgtcggccaggctggcctcaaactccggacctcaggtgacccgcccacttcggcctcccgaagtgctgggattacaggtgtgaaccaccaagcccagcaaccccttaggttttgctatattgtgttttagttttcatttgtgtgaagagattttttaaaatttcctccttaatttcttgtttgactcaatggtcattaaggaggatatttaatttccatatatttgtacaatttccaaagttccttttgttactgatttctagtttaattccactgtagtataagaagatacttgatatgatgttgatttttaaaaacttgttgagtcgtgttttgtgtcctaacatgtggtctatcctggagaatgttacatgtgctgataagaagaatgtgtattctgtatctgttggatgaaatgttctgtagatgtctgttaggcctatttggtgtaaagggaagtttaagtcccatgtttctttgttaattttctctctagatgatctgtctaatgctgagagtggggtgtctaagtcaactattaacatatgtagtctatcaactattaatctatgtagtctatctcccttcttaggtctaataatatttgctttatacatctgagtgctttggtattggcggcatatatgtttagaattgttacataattctcgctaaagtgattgctttatcattatatgatgacatttttgtctatttttagtatttttgacataaatctattttctctgatatgagtaatgtgatgcctccagcttcattaggattgctttggctactctggctcttttttggttccatataaattttggcatagtttttttcctaattctgtgaaacatgtcattggtagtttgacaggaacagcactgaatctgtaaaactgctttgggcagtatggccattttaacaatattgattcttcctatccatgagcatggaacatttttccatttgtttgtgtcatctctgatttctttcagcagtgtttttaattctcattgtagagatctttcacctccttgtttagctgtattcctgggtttttaatttaatttaattttttgtctcactgaatttaatatcattattttcccaggatttcataaattattttttcattagaatctgttgatagataattattgtgttcttttgaggtatcatattttcttgctttttaatgtttcttttgtccttaacattgatatttgtgcatcaggtataacagttgctccttctaatttttttgtatttgctttggtaggggaggactttttcctgaacacatacctatatgttggttgggtagaaaatttttgctttgcttctgggtgccgtgccgtagtgtcatctctgtgtgactcctttagctgtaaacaacatcagtagtgtctatgatgtcctcagtggcttagtgtgcagtttttagtgaaggctaaagcaaagttttgctgcagatgaggatgccagctgggcccctccttgagctgcagtggtggcagtggcaggccaagtgtgcctgttcttgggcccattcaaggcagtgcatgctggcaccagtcttagtgggtccaggcaggttgatcattgggtttccagaaagcttgctcaagtgctggcaattgcagcagtggaccaagtgagtgggtgggcccttgggctgctggccagcaggtgtggcatggacagtagcagtagcagtgacaagacaaccttctattttccaagtgatctgtgcttgtgttggcagtggctgtggcaggttggacaggccaattcccaggtctgtaggtggtgcatgctgacgggtacaagctttggtggtatcaactggttgtgttggcccaacttgaggcttctgggaggagtgctcagttgtcaacactggtggactgagcaggcaatcctcactctcctggacaatgagcttggacactggtagtggtggtgctgggccaggcagatctgtattaagggcctcctcttgtggtgcatgcaggtgctgactgtggtcggcaggggtagggtgatcccagacctctggtggaatgcttgggtaggggtatcagtggctgcactgtgtccctgatatcagggagccacaggttgttttcagtggcagcagcaattgtcaggcaggtagggagtgtgcacttttgccctgggtagtagctacagcagggtagcctgtcattagggtgcttgcaaatgcaagaggctccactgctgggggcagtggggttgcttccaatggctcatactttgaccctggtagcagcagccagctgcggtggtggctgtaggcagaggatgttcattgtactccagggatgtgtagaggcagaggatgttgacccccagggcaggatgctgtctattggagaccgagctctcaaaatggtgtcatgctgtagctgtttaggatttgggggtgggtggggggtgagacccaatgtgacatctctctctggagcaatgccgtcacataatctccaggcatattccctatgttagtctcagggcccacatggatcaagggttctccatagctaggactgcaggagttcacagtgagactgctggggtctctcacttatcctttcatcatattggggatcttttccaggtccccagcccattccagctgagcaggctgccttgcttccctctttttccttgccttaggtacttcctgtcacttctttgctgaattctagcattctcccatagatgatgtatttgaagtgtgattactagctattttggttcttctttgtggaggaggtaagtaccagatgcctctagtcagctagcttcctttctctctctaatgacatgtaattttaaacaacatacagtcatgcatttcttaacgacacggatacaatttgagaaatgtgtcgttaggggattttgtcattgtgcaaacatcacagattgtacttacacaaacctggatggtatagcctactacacacctaggccataggtgtagcctattgttgctaggctacaaacctgtaagcatgttattaatacttcaccgaatattgtaggcaattataacacaatgctaagtatttatgcatctaaatatatctaaatgtagaaaaggtacagtaaaaatatggtattattatattatgggaccattctcatatatatggtctgtcattgaccaaaacactcttatacagcacatgactgtagttatatttttcacatttcaaattggtgaaaaatattttaaagtaaattatctagtatcagtgagggtacactaaaatggccactatcatgctttactaatgggggagtatgaatcttgatataatttgataatatatatcttgaactttaatgaaaatattttagaacccagtaattttatttgtagaactctactaataatgaatagatcagaaagagacctatctttgattacaaagatgtctattttagtctttttgctctagtgaaatactggaaatgttaatattcaaaaatagtgtatagttaattatgttacatctacctaattaatatatttaaaataacatttaattaagacttagtaatattggaaattgctcacattttaatttaagtgaaatatcaggttgtatggatcctgataaggacacatgatgcacggaaagaaaaaggtaagatgctaattcatgagagaatatgactaatattttattttggagagaaccttaaggattttttcctgtttttcagtaatttcccaattttctttaataatctatttattaaaaaatattacttttataacaaaaaaactactgaaaagatagtcaacttgcctctgaagtagccaagatgattccccttttctctaaagatattatttcaattatttcaaaaaatgatcaactaggatatatgaaaacaaattcaactgcacacattcaaattgtgagctattctgcattccactttaaatacctacccaaaaaattaactctgaccagcaatctcatgaatatctatcaaaagtgaaaagatggacagtgcaaggtaacacgaatgacttaacatgagcccattcccaaaccagaaaagaacaaccaaaagcataagtcctaactatggcaattgaaacattattttcaaattcagatgacaatgttgtcattttatttctggtgaatataggctcagccatatttttttccttcattttctaagctcttttttaaaactctgttgataagagcactttaactcattttggcttctttcacagtaatatactaaagaagtaagagagtaaataatatatcaagatcaactccaaagactaacttctaaaatactaattaattttaatagctacgttatttgtactgtatttaacttctacattcaagtttgctttcatgtaaatatatccatatgtatgtattatatattacacatatgcataccatacattcacatttattatttatgtgtagatatttatattctgtttttaaattaaatttttaagcaatttatttttcaaattgtggaaattatagtactgctagcaaaaacatatacatatatatatatatatatatatatatagagagagagagagagagagagagagagagagatccaccagctataaagtacaaatagttgacttttaccacttaaaaatgtaaatcttatcatatacacacacacacaacacacacacaatgcacctacttaaaaagacaaatatcacactaggaaaaatgcataatatgtagtgaaggtttttttttttttttttttttacccttaatataggaagtactctagagaactaataagaaaatataaaaattcatatgggaaagtgggcaaagtatgtcaacaggaaattgagagaagagatggaaatgggccattaacattaaaaagatgaccaaggtcacccataaatagaacaaataatagcaagaagaaatactgtatttcatattgcagattgggtattagaaatctttctcatcattgccagtgttgataagtatatgggaaaacaggcacttttatatagctttagtaggtaaataaattggtaggtcttttttaagggggaaatttggtaatatctaaacaaacattaaatgcatatattttcaacccatcatttctacttctaataaattatacaagaggtgtgtaaaagatgtgtacaaggatattaagtgcagcactgtttttaatatcaaaacactggaaatctagatgtccatcaacaagggactggctaaaaaaaataacacatatataaacagaatcctatgcagtcattaaaaatgacgaggcagatttgtactacaaatatggggaaatatccaagataatatgaactggaaaaaattatgagactttttgtagtatgtgatcccatttgtacatgcgtggaaaatttggggaattatatataatacattattaacctgactgtgtctcaagagtgaaacctgaaggatggagagggagggggatgatacactttattcactttaaacctgtttttactattaatttttaaatcactggccaatattactttaacataaagataatagtagctaaaattacctactgaaaaagaaaatatgagcttgttatatctaccttgataatggcttgaaattcagtatcatcaaagtggtttttaattttgaatatcacagtcaccacagaagtgtctcacccacacataaagtaatcccaatcacttccacacttcctctgatagtgtaacatctccaaaggagctgttacagagtcaactgcactgtctcacacacgcctaatgggtccaacagagccattaggatgtcagttatatggcagggctcctgctgaagctattaccaagtcattgcattgtttcatacacttcctttagcaatcagatggtttctgaggaattgttatcactgctatgtaagggtcctatataacttacactaccaggggaaaacaaaaaaaaagcaaaggaaagaaatggaaaacaaacaaacaaattccctccatcaaatgtacatggtcaaatatcagaagaaataactcatcatttgggtataactattacatgtcattcaagaaacccaggcattaggctagccatttttttcacaactccagcggtttccttgaatgaatttagggtctgagaacagcatatgcatggctatgatggtatgtttattggtagcacataccgcactacttaggttctgtggtatgcagtacagaagcaacagggagcagtactaatggatttcttggctgttatgagattgtatcagatattcccttacctgtaaagttgctgaacagaacaacatagggagctcagccgcccaacagtcaaggaaatcaacaggacttctgagtactaattaaaatcccacctctcccttaaagggttactacaatgacaacgggaaatacaacagcacaagttaacctgcagccaggtctgaagtgcctcagggaacttcctctcacagtcttctaagtttagcagaacaaggttgttgcctattaataaaatgttgtattatttaaaataagacaagtgcaaggatttttacctactttaaaatgagcagaaagtaggctgggttctgctaggctaaagagttccctgggatattaggtgtttcagaagctatgctgcctctttgtctaatacgtgataacaggtaccttacctgatagcatctgtcccataatacgtgcataataaattaatagtgataaacaacaaccacaactgacatttatagagcatttcattttaacagacacactgtaaagtgctatatatccattttctcatttaatcctcaccacaaaaactcccaagactttgcagtcaccatttgacagataaagaaactaagacttggagatctttagttacctgtccaaggacatatagcaggtaaatggcagaactagtgcaaaaacctaggtctgtcttacatcgtggttattcttaaccacttactatacagaaaacgttgtttatttatattgtattaatattaccacttttacgttactaaatggtttcacatcccttgtgctctcagagcaagctaccgtatctttatcatggtattaactaaagtgtattaaaattagctttcaatcctctctagtagacctctttgggtatacatatccatttgacactgacagccctgcattgggaattgcttcgagaatcaattgggtaggcttccagaaagcaacatttgtattactgaccttacccctcattgtagctgatgagaccagtggtagacagctgactcaagttgagaaaattattctgtctccttggaatttagaaatggcactaaaaaaaatctggttaatcttagcttctttcctgaatagaagaaatatgaactaaggttttatggggtatggggtttttatacctgtcctgtagatggaaacttagagaaactcaacctgcagagacagtgttgaaggagatgggtttcaaaacaaaaagcaaggtcttaacaattcttctgagaattgttaagggactgcaacaagtcccttcttgtggtatagccacactcttgccctgagtccaatggagcattctcacgtactttatttttttaaattgtatttcttgtgggtacctagtaggtatatatatttatggggtacatgagatgttttgatataggcctgcaatgcatattaatcacatcatataaaatgaggtatccatcctctcaagcatttatcctttgtattacaactgatcatatttcactattttagttatattaaaatgtacaatcagactattactgactacagtcaccttgtattcttatgtacttttaatacaattgttttcagtttaagctagctcaagttgattcctgttacccataataggcgatcttaactaatagggcatcaatctctcccagtagacggtaaattccttgacattggggaatgtgtgttattcatctttcatatattcccaatctctagtacacagtttggcaaagagaaggtgcttaataaatatttcttgaacagaaatatcattatcatcaaggctataactataaataatttatttgcaatttatattttattaaagattacaatactttttcactacctagaaaatgtgtttccatttagcttcttgataaacaatttttattttcacattttatagttcaactgttccattcaggccacatgtgaaaaacacattcttggaaattgattattcaaatttagctgttgatactgttttttcctccagttcaatgtgtagccaaatgtaactgctgaggggtaccctaatcactgaggttgatacttaagtaggactgtcaaagtcttctaagaaatgcttattagaaagtaaagatgggagaaaatatttgcaaactacccatctgacaagggattaataccagaatgtataagaagctcaaacaactcaataggaaacaaaaattaaataatctgattttaaaatgggcaaaagaatagacatttctcagaagaagacacatgaatggccaacaggtatatgacaaaatgctcaacatcattaaccatcagagacctgcaaatcaaaactacaatgagatagcatctcaccccagttacaatggcttttacccaaaagacaggcaataacaaatgctggcaaggatgtggagaaatgggaacacttatatactgtcggtgggaatgtaatttagtacagtcaccatgaagagcagtatggaggtaccctaaaaaaaactaaaaatagaactaccatatgctctagcaatcccactactatgtatacatgcaaaagaaaggaaacatatcatagcactatttacaatagccaagacatggaagcaacctaaatgtccatcaacagatgaatagataaagaaaacgtagtacatatacataatataatattattcagccattaaaagaatgaaatcttgtcatttgcaacaacatgaatggaattggaagatattatgtcaagtgaaataagtcaggcacagaaagacaaacgtcatcttcttactgatttgtgggaactaaaaatcaaaacaattgtacttacggagatagagagtagaaggatggttaccaggggctgaaaagggtagagggaagtgggggaaaaggtggggaaggttaataggtgcaaaaatatagtaagatagaatgaataagatctagcatttgatagcacaacagggtgactgtagtcaatgttaacatcatatattttaaaataactaaaatattggaataggaatgttcctaacaaagaaatgataaatgcttgaggtgatggataccctaattaccctgattacacattgtatgcctgtatcaaaacatcacatgttgtaaccccagcactttgggaggccgaggcaggcagatcacgaggtcaagagattgagaccatcctggccaacgtggtgaaaccttgtctaaactaaaaatacgaaagttagctggatgtggtggtgtgcacctgtagtcccagttacttgggaggctgaggcaggagaatcatttgaacccaggaggcagaggttgcagtgagccacgatcgcaccactgcactccagcctggctacagagcaagactctgtcaaaaaaaaaaaaaaatcacatgtacccataaatatgtacacctattatgtacccataactaaagataaaaaaattaaatgaccattagatcacctgtcagagacagagttgtatattagatgaccagaggtctgacacactgtagcacttttatccttatgagagtcacacaagacaagatcaacaaaaaatatattttacccttagaacaatgcatatttttcatttatttagtgcctactgtgctctaggtccccttgctaagtactgaagctacaaaagtgaataaattagaccctttcttcaagtagcttccagtctagtgcttattaacaatgattgttaggatataaaatacacaactctagtattagtctatgaagagtagtaatgttgttagtaaggtgaaatgggaataaaaatgacatagaataaagcatgatggttgatatcaaagtatcacctaggtattgactgttcacaggtcccagaatgaagctaacttgaatgaatctgcatctttcttgacagacaattcagcatcaacagatgatgaagggtttacttaggacaaatttgagagaatggaaacataatgcattagtgctctgatacccctgtgaaaggctccagatccccttctgtcacctgatgatttcccttccagtacttcaggcctttaagttcaagtgttttagtgttgaaattaagggttatttcttataatccttcatgagttataaaatgtcagagacataaattcaattaagggcaaccaaacagagttaaggaaatgaggaaaaaaattctgaaaggcttggccaattaatgaaataaaagaaacaagtccttataaacatgattttggaaatgtaagtagaaaaccaaagtaatattctcctaggatgaatagaatagtaagcatctttgaaattacttctcagaatatttctcagttggacaattcacctaaattaacaatttcctccatcttcactttttctaacattcagagcaagtgaggctcaaatgttcctaagctgatccatgatatcatgcccactgcctcatcgataatctaaaattcagaaagtatatgaagacagaaacaaaacaaaatgtcattaacattaattgagccacagggatgggctggcatggagtctgaggtagcaaaacatatacataaaaaatattctaagtagttttactttttcagatataacatgtataaactcaaattaataaaatagatgccttgataagcatgctttcatgaatggataaagtcaatgggaaataaatagcaacatttccacacaaacaccaagttcattcattggaaataacttgtttcctcaaattaacatgcttttggaaaagccatttacactcttatcttaactcaaaccaactcctcaaggatctatggaaatgctgaaggcaggccaggcatggttgtcatcaattaaaatctgtggaatccacattggtaaaatcttaccataggtgataaataaggacccaaattatatactccttattgaaaatattagtaggagtcaaagtaagacatacagaacagagcagggaaaagttgttcaagtttacatattgcatacacacatgatccaaaggagaaagcaaagcatacttggaaaataatccattgcattcaactagattgtttctgaattgctgttttaatacttcctcatatgtaaaatggaaataatagaatttgtttcacagagtggtcataaggatgaaatgggataaagatatgaaaagtgtgtttggaaattttgaaatgctaatccaataataacagtgaacattcatattcttcctacatgttaaaaacactgttctaaatccttatatactagtttcatcccatttttgagtcactgccctgtggtgggatgcttggaccctaccacgaggtgttagagaagggcccagcacaggcccagttgtgaaaaccatttataaatgttactttcagtagtatccctctccaaaggggcaaaacccaatgaacacaatgaaggcaaaagtaaaaatatacaccaatgcccccttactaaggaatgacacagtgtaaatataggtttacagaagagaatgaacatttttttttcatttgaaagtgttatttatgattgatgacatggataaagtgtgatgctaaagccaagcatgaacacctggaggaagagaccaaggccaactgctaggcaacatctgaaagttatgacaatacctaaactatactgagttaattatgagagccatgtaaaacatggtagatttgtagaaagtcatgaagccaaatccaacccaacctgatttcagtctctcctcccaggttaaataaatgttttctcatcctacctggaatcctgttttatccttctccctagctcccccttcacctcctcttcaccaccaacattttcacatgaaattttcaagaagaaaacaaacaaataagctgccactgtattctctgacaggttcattgagcaggcttgtatgttgtttgtcagagaagcagggttccattttgtgggggtagggtgccagggatggggtgaagtaaaaataatttgtgatcaaatatttgaaaacacttgccttgagtagacccagcttgagcctccatgtcacaacaaacaggagagaatttgaaacctgtaacagtaaacatttcactagttaagccttgtccaagtcatctgcaattcctcaaacttcaacccttacccttcatctagtggtgcttaaaaaaaacccagctttattgcaatataattcacatatgtaatattcatccttttaaagcatacaattcagtggtttttagtatttttgcagagttgcacaaccatcacatctatctaagtctagaatattttcatcaccccaaaagatacctcataacaagagacttgcaaaggtagaagaatagcagagcccagtggggaaacttctttcattttaatgtttcaacccagtgaatatgtccagagtgagatgaaggagaagatgtcttgccaatataagagatcacctaccaccccatttcatataattttgatcattgtttttcccaactgaaagacgaaacccagaaaactgtagtgaccagtcaaaggtctcctaacttctatcctaatgcctttcacttacatgaatatgctacatatgtcaaatatgttcccctctcatttccgtacgttacttcctatactcttggccaaagtcaacaatgcatacatgaacacatacatatatgaaaataatctaaaaaaaatcaagaccccaaggatacttggtgatattgtaaagtgttatggtctactatttaggacgtgatattctaactagtaggcaacctctaattcctgattatatggccagtatcacctttggattaaaggaggcagaagaggacaaaatagaaaaaacaaactgcaggtacagggcagctggctatctctctgccacctgaaaaagtactaattaccactgttaacagagtaagccttgtggtcatggtaatggggacttataaaatgtacacaaacagaatgatggagagactaatgtgtttaataagcagtaatgtgctttttatgaaaagattttgttctctggtaggagcaaaagaacagaaataaaataaattaacccctttccaacaaatcaaaaagacaaaattttccttttataaaagttgcaagaaaatcatatatgattatgacataatgatactgctgctagtccttattgtcaagcaaatggatgatgttcattcaccttctggttttttaaaccacttcagtccaacctggttaatttgcgtttgtacattcaacaggttaatctgaatccaaatagtaagcacatacagaatatgcttgctacacaactgttcatctcactgttcatttattgatataaagccaaaatacatgaaatttggacattctataataaattctactagtattgccgtggaaaataaagatgaaaataaaaggtgagtaataaacaaaacatgcacgatattatggattacatgagattatttcccttgggggctcaccgaaaatgaaaagtattttgtctgttattataaataaatgtctatttgccagatacttaggtgcatgccttgtccatgagtccctgctaacttgtatttccattctgcatattaaatgaaagaagggcagatatagggaaggagaacaaagcaaaggctaaaaactgcattctttctgtgttttacttaaacaattcaagtagtttattaccattttccccatcagacttcctttcatggtcagtgtcagtcaaggataatgcagagttggcccggctggacaaacaggaactatgctctgatttcattccccttatccacattcttagtgcatggtcaggtgaggcagcaccttctgtctctgtgtccacatcagatcccatctctagctggtagccatgccgagaaacgctgtgcatgtctgtttggtagccagagcacagagtgtgagaggtttcacagaattccatctctgagaagaaacaaagttcagagaaaacgtttagaagtatgaagaaatcccccagaaaattctactttttgttctcattcccctctcccccattggtagtaattacgtgtttttgcaagttagaattctggccttttattcatggtagctaggactctgtgcttattttgcacttctgtagcttaaaattatgctcctgttgattcttacaaggttctggaaaaagcgcgcccaaaatagttctatagctacaattttaggtttcacaaaatgtaatgaaataagtgagtgcagaggagtataaagtgtagagaggtgtcctttaaaagatatttcttttctaggaagaatatatatgatctgcagagtgtacctatgcttaaaatattaaaatgatttgcttttctaagtattccatacacattggatttaagaataaataattcaatgtgaaaactctgagaaaaaagcattaagttcaaatgcacttttctaaagtatttttcctaaaacatgttaatttaaactctaaatcatcagtacctaatatcattattttccattgattttaacggagttcaaggctgactttatgctaattattctatgtaattcatttttttccaataaatacacacaaaaatttagtcatatattgtaccttggcagtggttcatggattggatttcctctcctttccccctagatcttagagttataaaattttcagaaccttaaagatgatgcaacgaattccttctttttatagttgaggaaaataaactccagaggatagatattattttttcatagctcacatcagatagcaacagagccctttttcctaaaacacccatgtaggcatggtttctggtatacaacaacgatgccccatcaacttactgcatgaatatcaggcattcagtcttacagtcaattttacattcagttatagcaaggtgtcaaaaaggggaaaagatgatttaacaattgctaataagttaatgaaaaatgaccacatgccaagacatatcatctgaaatgtccatgtaatacttagataaggtaatccggagatgtagtacaccatacaggattttctcagactgacatcagagacaggatatgtcatttggctgggaaggagcttaactgagtgcatctaatccttagcacatatcaataaaatgcaaactctaacatgaatttaattctctgaatacagaaagtactggattttagaccatacactagaggaaagcaagcagaatatgaatatatttttaaaataactatttttggggcatataattaccaaataagggtttaacaaaaaattcttattgtttacttaataccactaggtgcatagcactgtgctttgtgaaacatatagtaggcaaataaagctactataatgtattagaaatattcaattaaaaattaactctttcagggttataagtcactgctgagtatgttaccttttgatttccatgatgaatgtatttaagagtaattccctttttctacaaaaacttggctaaattccaaaggagtagtattcaaaaaatagtcgtggtttccacttgtcaaacataacattttatgaaaccatgcttcttcctgccataaggctaaaagtaaaaatccattttgcccaatataaattttagcaatctagaatattgggatcagctaatattcatgcctcttaatttcacaatgtttcattatccaatcctactgtgcagttgttgctacagcaacctggtaataaacctttcagcttgaagctgcaagaaatgaattttatataggtctgtaacaacttacttcactcccctagaacagtggctctcaaacttggctgcttcagaatcacctagaaggcttgttaaaacatagattgctgcaccccactcccatccgtgccttccaatttaagtttctgattcagcaggtgtggagtagggccaaagaatctgcatttcgaatgacttccctggtgagacccatgctgttggtccagggatcatactttgaaatcgactgccctagagatttacttgaagtggatgggatccagggaatgggtagtagtgagggtgcaaacttatcatggcattaccacagattttgctgcatcatctttaattctgtttaaagatacaagaaagggagtttttgctctgaattgctgtgaagtgtctccatttatttcccctggattcagggcactaactagaaaatttacttccaagagcacagacttgcatttagtttcactcatacaacggcatatgagatgtggctttccaaagattttaatatgagcatctgagtcatggcattcgttggaaaaggttgagcaaataaaaataaatgtaggtccaatttgtcattccagattaataaaacaccagataaagttttttaaaaagcactgacagatgtaagcagatttcttttttattaaagagatatttttcccattcaaaaggaaattagaacatggatttgctcccttctaagaaaatgctgtgtaatctgattaaaaattacatagaataaacaatttattttctattgtaactatatcctgctttgcctacaaagactgactcataaattctctaattaaatacagtcagataaaagtacactttcttgtcaatctataattagaaaaagtaacaatccaaattagctatcagttgctcttcttttttaagtggtaaagcataaaaaaagaaaagagaaaaagtttcacttacttatagtaaccgatgtttattgaaatgcctcatttccttttcttgaaatcaatgtcaccattgtaaaatattttcctaaatacacaaacgtcttggtggtgctcaaaattcccaaaagatgcattatctataaagcacttacaacgcaccacaagtagttgttttctagccttgtacatataaccttgttacctaaagtactacatattctctagagaagataaagttcagcagcgtgatcagggctcactgcagccctgacttctgggctcaggtgattctcccacctctgcctcctgagtagctgggattacaggcacatgccatcacacctggctaatttttcatattttttatagagatagggtttcttcatgttgcccaggttggtctcgaactcctggactcaagcgatcttcctgccttggcctttcaaaatgctgggattacaggtgtgagccaccacacctagtctgtaccacattttctttatccaatctgtcattgatgggcatttaggttgattccatgtctttgctattatgaatagtgctgcaatgaacatctgagtgcatacgtctttatggtagaatgatttatattcctctgagtatataaccagtaatgggattgctgggtcgaatggtagttctgcttctagctctttaaggtattgccctactgctttccgcaatggttgaaattcaattttttaagtgggcaaaaagtttaaagagacacttcacaacaaacaatagaggtggccaataagcaaatgaaaagatgctcaacatcactgttaccatgaaaatgcaaactaaagccacaatgagataccactacatacccactactatggctaaaaaaaattctgcccacaagaagtgttgagaaagaatgtggagcaattgcaattctcatacactggtggtgagaaagtaaaactgtgcaaccacataagaaaaaagtgtggcagttttctgaaaagttaaagccatacttaccaaaagagcaattggactcttggacatttatcacaaagaaatgaaaacttctgtccaaaactgtacaaagttgttcataccagctttattcaaaaatagctaaaaagtacaaatgtcccaagtatctatgaacacatgaatggataatccacctgtggtatatttacataatggaatattactcagtcctaaaaaggaatggactattgatgcataacaatgttatggacttcaaaatgactctgctaagtgaaagaagacagacaaaaatctacatatggtatgcttccatttatataaaattctagaaaattcagactaatctactgtgacataaagccaatacgtggttgcctggggaaaagggtggagggagagatggataacaagggacacaaaaaaactttggggtgatctaaatgtccgttaccttgattgtggtgatagtttcacaggtgtatacatgccaaagtttatcatattgcacaccttaagtatacgtagtaagtgtagtttattatacttcaattatacccctacaaagatttttagttgattgtacaccaccagatattaaaacaacaaggagacttttgaatcaattttcacagctagaaggaggtcttgctcttttctctctagtggaataaagtaaatgtaacacgaacaaaaaggtagtcaaaatgtcatcttgcttatatctaagccaagaggccatgaagactaactgatgcatgatttattttttctttctttcttcttcttcttcttttttttttttttcttgagattgagttttgctcttgttgttcaggctggagcacaatggtgtggtctcggctcactgcaacctccacttcccgggttcaagtgattctcctgcctcaccctcccaagtagctgggattacaggtgcctgccaccatgcccagctaatttttgtatttttagtagagacggggtttcaccatgttggccaggctggtctcgaactcctgacctcaggcgatccatctgcttcagcctcccaaagtactgggattacaggcatgagccactatgcccgactgatgcatgatttctcagtgatcttctagggtgtacttttgtcctagacacataagagttgaacatcaaatttaggagggaaactaaggatgaaactcatcactgctaagctttcagcagctagggaaacatttatggttgaggatcatgagattgagtagagctggtctggcacataggaccaccttagacatctactaatgctaacaaattaataatttttttttaaatgctatgaagcactgaaaaaaaaataaatgactctactttctgaatctaggggttgatcatcaggtgttcagcctaaagaagccatttatcaaaacttgagaaggaaagttatagctatctgtatcagtgtttttctagaaatgccatttctgtgttttgttttgtttgtttgagacagggtttcactctgtcactcaggctggagtgcagtggcacgatcttggctcactgcagcctcgacctcccaggttcaggtgatcctcctcccacctcagcctcttgagtagctgggactacaggcatgcaccaccacacacagataattttaaaattatttgtagagaagagctccccccagtgttgcccaggctggtcttgaactcctggactcaagcattacaagtattagccaccatacccggccaatttctgtgtttctgataagctcaagactattttttctaaaattctacctccccatgcttcctctaaaaagtgagctttaaggcattatgctccaaataagtaattggaagtcaagaagtgtgattaattttaaccatgacctgagaaatttgggatataacttttaaagagtatagcccatttccaaaataaaggagaggggggaggggatagaattattagtttaattactgtgactcataacaacccttatagattacatgcagaagcaagtgttattaattatccatttggtttttggataagtcacttaacattttgggggctagttttctcatttgtaagatgtatggatccaactagaaataaatctctacgtaactgccttgttctaaaattctataattataacccgaacctgttatccaacatatgtaatggtcaatgtgttcaaatgggaaaagagttagtagtttcatgaatcaaggagccatttatacttctttgtgaaggatatagtacatattagttaaataagatcttgtgccataattataattcctgctatattaaagtattgatacagcctatgtacctactatgaattgcaagattattgatagagaaacagagaatctacaacttaaaatgtaaaaagcaactgagtaaattgttactcatcaaatataaaagtatccatttacaacatggctattggaaacataatgaataaaattcacacaattaaaaatattactgacccactaataattcattactggctccagggaaaaatgcaatggattattacaatcttaagcaagaaatacagagacaaagaagtaagtaacaccagataagaggcaaataattttcactactgggtaccattttctatttctcagtttgagggctttaaaaagaaaacggtatcaaattgtcaaccaaatcagttcaagtaaatttacttaaacacagcttcactgaacacccactcaatttaaagtaaagaaatcaaaacaaaatagtctcctctgatttctcttagtcttagaaaattagttcaatttaatttcctcctttcttcatgaaaatgttttatcaaatgtacagtgctatactaggcagtgagcagagtgagttaacaggaccttgtcatgtcctttgggaagttccacacagagcctttttaagcccctaatgataacaaggtaataaaggcacattgtctaaacctgacttttatttttctgctgagggctcatcagctttttctggggcacaggagtgagagatggaatgctcccatgtgcaagactggagcctgtggttataagatgacttaaataaaataactaagcttcctggagcctaatctccccttgacagttccaaatgcacccattatctcggcactcaggacctactaattatgccttatttaattttcaagatttctccatctgtcagtatacggaaaagcatggcaacaaatctgggcagagttaaaagcctgaagtagaaacattcatgctttgtgaccaatattagctaactggagacatcccagaatgcagttaaaaggctatgttaatatcaaaaaaaggatgctctcaggagtacaatgaattaaaaatctgtaaaaatggctcaaatcagaggacacagaattgtatcaggactcaaaaggaaagaagacgaggtagaaacctggaagaaatcaaaacaactccaatcatatttagagagagattaaaatatccttcagcaatctaagaagaggaagaaaatttgatgtgggaataagcaaatgctaactatttccttaaactaattttcaccttagtgaacggctccatttagactgtattcacataagatgggagcacttgttttgaagctaactcagcagttaccactacaatgacaaaaattggatgcttgctctacaatatttgtaataagagtctggaaaaagaatcagggactagaaaagatggtgggaggtcctggacttcaacagaaatttagatcaatgagaacctgtgcatgttccctttatttcaacattttgaatgagacagagacttcctggcctaaatgagaaattttcagggctactgaacactgaaaatgcatggtgctcaatggccctaaaaatttctcatttcttacatgtgctggcccaattttctggctggtcataactcgttggaacctgaatccttgttgcccattgtggtcttccaggtatacttgtgtatttccattatgttcactaagtatgtgcagctttttggtcaatgggtgcgtgtgtgtgtgcgtgtgtgtgtgtgtctgaaattttaaactacatcaatctgctgcacaattctatctagagaagtgagatcaatgagctagagttaaataaccattaaaaacacttgtgagtgcttcaaatacatactcatagaggcaagcaatattatttctgtaacattctatacttctctgtaagcatttactttgtgatgaatgagtaaagatgccaagatagaatggtacaacagagtcagcgtccatcatcaactacagaataaattacattctaaggtggtattgccatcccctcagaacttagactacttctaggcaaagagtgaccctaaacaccaaagtttaaaaattagtagttaacatggaaccactcttgaaagggttaacaacttgaacccaattctgacacatttgaggtggtttagcttaacataaaacaatgcctaccaatgcaaattgaaaaattgttattttggtaaattagctgtctgtttcaaataacagatgttccacaaatttggcaagaggagaaagacagcagcccactggctgtgaattcaggaaaatacaatttataatattagactaatggagaacaagtactcagtatcatcttctgactgaaatagtcacacaaaggaagctttctacactatactttttggcataatgaactgggaaataattgcctgttaaaattcttcagaaatgtactctagggtgtagaactggggaaattttactgaaactagtcacaaagccttggtaaaagaccatctttaagctggcttgaatagaaacttcttttgtcattctcatcaaccagtttcatgccatatcccagatagaatttatcatctcagtaagtttgtagaatgccctggagtgggtatgtagctcttctgacagcctgttttcaggaactcagagaatgttactaaaaaaaataagtcagggatagaaaaaagaaattctggctggatgtgggtggctcttgactataatcccaccactttgggaagccaaggtgggaggattgcttgagccaggagtttgaaaccaggctgagtaacaaagtgagactctgtctcaattaaaaaaaaaattagccaggtgtggtggcatgtgcttgtagtcccagctacttgagagactgggaggatcacttgagcccctgagtttgaggctgcaccactgttactcaagcctaggtgacagtgtgagacctcatcataaataaataaataaatgaatgaatgaatgaataaattttctaagttgggaaagattgagaaaataactttttggacactcatcaggaacttgcaaatttgaattccattcagaggaaaacattaaattctggagaagacttccacttgcaaacaagatggagtgacagcaaccaaatttattctcctgccttaaatgacaacaacgaaagccacacaaaatgtatgaaacaacagttttcaggcattggacaacagataatgaaggacaacaatccctgagatatgagaaacaaattaggtaaaccctgtaagagtttccaggcctcaggacaaggagggggatcacaggtagagcctggtagtctctttgagttgagaagactaagctggtagtgcgggaaggccaagatagctagagtttgcagtacggagtaccagagaggagagaactgcacagaaaaagaattccatagatcttcagagggtcccccctgcatattcacctgcactctggacagcacatgcgtgcaagaaaaccatctgagaatggagaaagagccatcagaaaggaataaaagaaacaacttctgaatctgaaacagggctggaaatagtcactgtttccaacatccacagtggaaaacctcataattcatgggcattgaatagaatactcaaaacagattttgaattcatagatagatgttcctcgacttacaatggggtaacattctgataaacccattgtaacctgaaaatattgtaagtcaaaaatgcctttaatacacctaatccactgaacatcataacttagtctagcctaccttaaatgtgctcagaacacttacattagcttacagatgagcaaaagcatctaacacagaggctatctttataataaagtgctgactatctcatgtaatttatagaatgctataccaaaaatgaaaaacagaatggttgtatgggtactcaaagtattttttctgctgaatgtgtattgcttttaaaccatcataaagtaaaaaaaaattaagttgaatcattataagttgaaccattgtaagttggggactgtctgtatatatttgcgtataaagctttgttctagtgtgtgcttaaattacttggcaacatttttatccttttgggtcttgctattaagctttgttaggtgggtgcagagcaatgttggccctagatatcttcatgtcttataaagttatatgtacacttaccatatgatctaactattccaaccctcaatatttaccaaagataaataaaatcacatgtccttacaaagatttgtacacaaatgctcatagaagctttatttgtaagagccaaagctggaaataaagaacatcaataggcaaatgaatgcaaactctggtacatccatacaatggaatactactgagacataaaaaggaatgatctattaatataaataatataacgacataaacaaatatcaagataattatgctgagttaaagaggccaaataaaaagtctacatactgtgtgcttccaggtatgtaagtatccagaaaatgcaaactaatatatagtgagggaaagcagatcagtagttgcctggactggggtgtgtggggagtggaggatataggcattataaagcagtgaaaggaaacttttaggggtggtaggtaggttcactgtgatgattgtggtgatgttttcatggatatatacatatgtaaaatttaccaactcgtatactctatatatagtttattgtatgtcaattttacctcaataaagatgtttctagaaaatacagggggaagacaagaatgtactctgcttgcctaatttaaatggccaagaagaacactgggaacaatgaaacaaagcagcaaggctgataaaacagaaaaaccaatctgtgttcacacactgtcatcaatgagggaaatggacagatcaatttctctcaacttgtctgccattttacttttactccaggggaatccgaagggcttaaattctggataccaaaatcctgaatggctagattggtacagactaatgcaaacatgaccaacaaatgaggtttattcctaatctggcaggaaagattcatgggccaatctgggctcaatgataaagtaccatgacagattaggtagactcaatgatatcggtgacacatttgccatttccaccttaacagtctagttgcctttgttttgtcccatagctacaaatttctctcataatcctggctattcattctggttgaatgcatgtcatttatttccaagaactagatgagaggatatggttaactcagcgcaaatgaagccctattatttaaaaaaccctcagaatctacttctcaacaataagaggttgataatgtaccctttgtttaccattaatttctacaaagactctttagtggcatagcatatatagtcaatggcagaatgggttattatatgcaaacactaacatagtagtcatatactcttataatcagggtcagtcaacctcattctgaagtatagtagatctgaaccaacacaattatttttgagagtggtatttacattacagtcctatcattacaaacttttatttagaaagaaaggccattctctattagctgtggaagttggaaaactaacttatctcagttatcagaaaattcacttgcaactgactaagcacaagatttttaatttaaccacttctaggtagttctgatttcaaagcacgcattccctagtcctggggcagaaatgaatggaggtcaagctagcaaaaagcatgcagttttacatatcaaaaaaagaagaaagtaaatccaaacatgaatttagcatcttcttttttaaattttattttactttaagttcatgtgccaaatgtgcaggtttgttacataggtatacatgtgccatggtggtttgctgcacctatcaacccgtcacctaggttttaagccctgcatgcattaggtatttgccctaatgctctccctcctctagccccctacctcctgacaggccccagtgtatgacgttcccctccctgtgtccatgtgttctcattgttcaactcccacttatgagtgagaacacacagtgtttggttttctgttcctgtgttagtttgccaaggatgatggtttccagcctcatccatgtccctgcaaaggacatgaactcatccttttttatggctacatagtattccatgatatatatgtaccacattttcgttatccagtgcccatcactgatgggcatttgggttggttccaagtctttcctattgtacatagtgttgcaataaacatacgtgtgcatgttctcagaacttaaagtaaatttttttaaaaaagaagatgctaaattaatgtttggatttactttcttcttcctcttttttaatatgtaaaactgcatgttccttggtagcttgacctccatgaatttagcattttctatgtaccaagccctgaaacatatattatttcatttaatcctcagagtagccctgagagaaaggttgttattattccaatttttttttttttttagatggagtctcgctcttgtctcccaggctggagtgcagtgatgcgatcttggctcactgcaacctccacctcccgggttcaagtgagtctcctgcctcaggctcctgagtagctgagattataggcacccgccaccatgcttggctaatttttgtacttttagtagagacgtggtttcgccatattggccaggctggtctcgaactcctgacctcaggtgatatgcccgcctcggcctcccaaagtgctgggattacaggcttgagccactgtgcccagcttattagtcctgtttttcaaataaagcaaccaacattcaatgacagattaaataaattgtccaaagtcacacagataccaactggcaatgctaacttggaaccattttaacaccatcctaatgacctcatgcagcatattataagcagcacattcaaattcacagcttagtcctcatttgtgcaatgtgaatgtggcggatgctagaacttcctgcttcttgtctcccaggtttcattcagttcactgctgtctccatctggatttccacagccagccgccaaaatactttgagggatatagcagccaggagacaatgggcacttcttttgtcactgacaatataaaaatagacccttaaactatgcatatatcattaatagcttattgttctatatgagtttaatgcatttttgtacctccttttgaagtattattccactctgtactaattcttatggattcactttacccgcaacttgtcactttgactcattgaaaacaacaatgatattttagagcatattctgtgcttccagacaacacaaacaacatctgtgtctgcaggcggacaaataaaagaaaacattggcctctcttgtgtttagctccctagcacagagcagctgccttgaggagagttttgaaattatttaacaacattaacaaagatgagaggaataatattcactgagaaatgtgtgttggggtattacttcagcatgttatcacccaactagaggaagcaatcagatcaaattttgggggcagttcctgtttacaaggtagtattatcatctcatgctaaatagactaagcctatatctgtgatctacattcagagttttacacgtatcacagtacacagagaaaggctttgagttgaaaatattctacagtttatggtaaaatgtttaggaacatttttctttatttgaaatttatcaaggaggtatgaaattagataaaggcatgcttctctttacctccacactatcatttagtgctaacactgcaggcaattcttgcaaaatgcattttccaaaacctctcaaagctagaaagcaaatgcaaacagcaacaatgacattagtgcttttgaactggaaacttatattatccaaatccttattatcattgccccaaacacttaatctgaacaatcaaattaatgtttcaggcatttaaaaaacaatggacaatctatatacatgaatgcatgttccttttacacattttggaaggatgtgcaggtaaaacaatctatgaggattgcccaaggacattaatgatatacaggatagatgtaatatgagtctacatgatgcctggaacagttgactccatttggtccccaaatcatcaccttggggggaaaaagcacaaagagccaaatagtgatttgatagtatattgacaaaacacatgcttggctaaatgttcacttttgacatagttacttggctttgtcactggttccaaggtttctcctaggcacaatttaaggtagatctgttccttttgtccatccactgtctgtcaccctctccctccccatattcagcatcaattactttggccgttttcacttccttttccagaattctagctccatttgttttttccccctttcttgttcaaatgttctcatttcttggccagttgcctaacagcacagcagtatgttagcgaatctgaaaaagttaagctaggtttggtatactttctcttccctgactaatgccaaattatatattataattttttttttttttgagacagggtcttgctctgtcacccaggctttggagtgcagtggtgcgatcacagctcactgcagctttgacctcgtgggcttaagccatccttctgcctcagtctcccaagtagctgggactacaggtgtgtgccaccacacccggctaattttttaattttttatacagatggggccttactatgttgcccaggctgttgtcgaactcctgagctcaggtgatcttcctgcctccacctcccaaagtgctgggattacacacataagctacggcacttggcctataatttttaatagagcacttcaacccttagttttcatgccctcagtccatatgttattcaataagcactcacggagcacctatggtgtgacagacactgtggtaggatccaggcagattagagagaaggaaaaagatacgtcctcttccctcgaagggctgacaatctattgcagacatggaaatgatgataggacaaggaggtaagtaagtgccgtgatagatctatacataaagggctgtggagtctaagcaaagtgagggactcactctgcctgaaagactgagacaggctccagagaagtgatactttgagtttcatcttaaaggatgaatgcacttctggtaggttaaaaagtggataagagcatttctagcacagagaagtgtgtgttcaagggcaaagacaagtgtaagggaataatgaaattaaagaacagcaaacaattttctgcatctgtactataagtgtaggggtagaagaaccagtaaagtgggatggagccagtttgtaaagggccttatataccatactaaggaattgggccttgtttgccttagattatatctcatgctgcttactattcctgtgtgctagggctccagaatcattaatctgaacacaaataaccgagtttacaatttttttgcatacatctacaaagcagcctggaaattcgctagctgtgagttttaatccagaatgtaagaaaattcatttaactagaaaatatttattaaccacctaacgtagcaagcattgttccaggtatcagagataaagcaatgaacaaaacaggcaaaaatccctgccgtcatggaactcatattctagcggaaataaatttgtaataactgtgctcagtcaaaatttagtatcagaatcacacagattttcatctgtatattaatctatatgttattgtctgtgcatttcatctcggtattaactcaggttcctccagagggtcagcaaaattgagtatatgaaagcagtgacaagtaggaatttagcttcttccatcgaactgaaatctactaggtgaaaaccatgtcaatggcttctctgtacagtatcctccatttgagggaagttgaggaccctgggagactatgctgagatatgccacatttgtccctgttctgtgtgttcacttttcttcccaaaatatttttggctaaatacttggaaactcaatatcctgagagaggggataaggagagagggagcaagaaagagggatggagaaagggttggggagagagttttattttgttggggggaagagctcttctagtcaacccagagcccacctgcaacaccataatcaccatgcacttcagagatggggagctggggtggggttgggggaagaaaaattgaattactctacagtgtagctataaaattataagtgtaacactgttcacttcatgacgtataatcaataaataaaagtccagtcttgaaagggtgtgctatataaatgccaaatagtatttgctctgaaaattccaaatctgggtagggttatttaaaaacagtccacttgcgaacagtttgattttagcattgggctaaaattataaaaagacaactttcattcatctaggaaatcagttttatttcttaaactacataaaattcaaatgggccttaggagaggtgtgaaaagaaagctaactggaaaggccattttgaattataattattcatatataaaactaaaatatatatcatctactggtatattaaaaatatcactagattccaagggtacctttcaataagaacctctttccattaagaattagtaaaaaaatataaaattggatgcactggaatgtaaaagttggaaaaacattgatcataatttttttcttactaataccattgacttaaaagagatactggatttttataaatagaactagcaatttatatctactatacatttatatacgttcccatagtgattccataaataaatattttacaaatataaagaaaaaaacgaacttccacaccctctccccaagctcttcatattaaaaaagaaatatcctagttctcctagtaaggtgacagaaaactacttactgctcagacatgcattagtgtgtggagactagggtaccattaaagcaactggaggaggtaatttagtaaaagcaccccctactagtttgaagagttaatgtgtttctctcctgttaagtgggtgatttctttttgcttgccagcaacataatgaccaatatatggtacacactgtgagcaatgggccttcttgataaaaatgattaataggtatataggtctatacatatatacacatgtgcacacaattctcacattgtgaatttagccataccttaatttatgctttatgtaacacaagagactggctccagtggaatattctataaaaccagaggccaacctccagccaaaaataaagacaacaaaattatgactgctttctgaagtagagaataatggaaaatcttactatactataaagtatggagaaacaggcatatgcttataccaatttttgtattcactaacttgtcacctcaccatagccactgcttgtcatatgtaattatggtattttttgatctccacaaaagtaataatagtcataacagcaacaacaaataatggttattctagtgcttgtcctgtggcaaacactgtgctatacactttacatacattctgcatttaatactgaacaatagcttcctgaggcatgtattattatcttgtattgataagcaaggaaactgactctgaagggttaaaatacttgaccatggtcaccattcctagtaagaggtgaagtcaaaattcaaatccaattttgtttgtatttaacaccttttgcttctaatattgctttagtggcagaaaggctatgcattcacttcgttacaggtaaaatgatctcttactacatgtatatctgctggtggtaaggaggtataatgtaatctaatatggatctctaatttcaacaaacttaatgtctggtaatggaaacaacatatatccccatatatattgtagagtatataactggaacctaatgattggttcaggcaataaacactaggagagggcacagaggagaggaagaatagaatgagaaaaatgggtcagtgactcttgtggagttggtagattaagctaggatttgatgaatgggtaaggcttgaatgaaagagggtagagtttagactccagtactgttgtccaggttgtatatccaactattcatttgtcatatagatatttaaaagacgccttacatttttaaaaatgtccacagctaactttattatcactgccttcaaattgatcctcctttaccattgcctttttgtgaatataagtatcatccattcatttgcacaggccagaaacataggcatcccccataccatcatttttatcttctaattatatcttgagccaatacagttttttccattttcacattcaataatctctggcctagatgactgcaatgacctaactggtacccttccatccaatcttgttaccctctaatctattgtttgcaatgctaccagacagaatgctaaaaactaatcacatcacctcccttcagtatattcccattacatttaggataaatatcaaaatctttaacatgctttacaaagtcttatgttatttggttccctgtctacttctctggccactcactctcttgcttctgcaacatgtacttcttccagtttctcaaatacgccatcctacttttcacctcatgacatttgtgcatgttgttcctcttctccttcctgcccctttccatctcttcatttggttaattctttcttatatttgatttcatctcacttccttgaccctccagaccagattaggtccttctttctctggagtacttatcacagtcatcacatcataattttaggatcagttttataattacataaaaactctctactcctactaaaatgtaaattctcggctggatgtggtggctcacgcctgtaatcctaacactttggaaggctgaggcaggcggatcacctgaggttaggagtttgagaccagcctggccaacatggtgaaaccctgtctctactaaagttacaaaaattagccaggcatagtggtgcatgcccgtaatcccagctacccgggaggctgaggcaggagaatcgctggaacccaggaggcagaggctgtagtgagccgatatcgcaccactgcactctagcctatgtgacagagtgagactttgtctcaaaaagaaaaaaagtaaattctctgagggcagggaccatgtctgtcttgttcatcattgtataaccagtatccaaaaaactttgcacacatagaagcataaataaatatttggtgaatatagcagtgtatctcaaaagcattctaagcaaggatgatagtagaaacacaccataaagaatgatgattccatatctggaggactgatgattgcatgagtgtagcttcacacggagtgctttgctcagtaaatattcaagtctggctggtttaaagggttcatacagatggaaaaaagggagaaaatactggaaaaaagattttgaaggtcttaataagcatctcaggatttattctacaggcaatagagaacaaccaaaggcttgaggtggttcagaactgcctgtcaaaaatctgctgctatcccaactgcacatgtattctccattttagcctggtgcttccaaatacatgtccctactttcagcatctctagaccattcatgtttggagagactcctacccaacagaactgccacatggtggaatgtttggcttacagtgattcccccagtgaccatctacatactgcaatctcacctctttgaaaaaaaaccattgttttacccccattttagacttgtgatctgaaaagctcctacctttgtattgcagtctttgccacaattataattgtttaaggggtggacacctgatccagtctgggccaatcatatttcccacctgctatggtttgaatgttttccccctccaaaactcatactgaatttttttttctttttgagatctggtcttgtcctgtcactcaggctgtagtgcagtagcatcatcatagctcactgtaacctcgacctcctgggttcaagtgattctcccaactcagtcttccttgtagctgggaccacaggtgtacatcactatgcccaactaaattttttaaaagatttttgtagagatgggggtctcactttgttttccaggctggtctcaaactcctggattaaagtaatcttcctgcctgggcctcccaaagtgctgtgattataggcagttctcatgttgaaatttaattgtcattataacagtattaaaaagtaggacctttaaaacacgattgggtcatgatgagggcttcaccctcatgactggattaatgccattattgtgggaatgggtttgttaatttgttaccacaggaataggctcattataaaatggcgagttcaccccctttctctctctctctctctctctctctctttctacctttccactcctcatctttgcccttctgccatgtgatgacacaaaaagacatctttagccactggactccccagccttcagaaccgtgagccaataaatttctgttcattataaattatccagtctatggtattcttttggagcagcataaaacaaaccaagaatggaccaagacacctcctccctgtccccactgattagtccagatattgatatgggaaataagctagtccaatccaggttcattttcaggttttcttaattttttaaatgtttactgaaagcaggcagaagaggatctctttccttttagttagctaggctgtaaggttgacagcccggagcagtcagcagtagccagctgtccatcttgtacataataaagctggcctgcagagagaggtaggaatacaagggagtcttgacagttttccagtccatgactccaacctgtgttccagtttttgctaagaccatgttccaccttgttgtttggttacttgagccaaaaaaactttttttttctcttaagctagttggagttgggctaccaccattcactgtcggagttctgactaatacaaatatcagaagtggtggcctagagatgaattagcaaagtatcttcaggatcaggtctctgctaatgaatgtttgtagctcattccttaaccccacatagacttcctgcttctcattttttgacttggattttaaactgtccttcactatatcacctccacaaccacaggaccaaagaaagcctggtgcacaatcagtgcttgataattatctattgaactgaattgagttgtgataaattctcctatagatttttaatcttctcatctcttcaactacaatatgccttgtttatgtgcttgctctgctagctggtcattcccttttttgctgcctcctgatataatttgactctgaacacccctgtctaattcattcattttctgtgcaaatttctgctccttactagtatattcactgggttatgtgcttttctcaactttatcaaatgaaataaagccacttgactattatttgctcatcactcttccatgatagccaggtaatctataggcttagaattctctacgctctgacatcagctttgtccctagaaatgaaatagaaagggaacatctagctcataagatgtggactcaatttgaagctctgtttttgatgctggtttcttagctcaggttaaacaaacagaaaccttctctacattcttcctttttctacccagactccctggcctgagcttcatatcctagcttgggctatttctggagtacaggaattgatatttgcaagtaggaattagagggagacaacacaaagaagatactgaatttttttttttttttgagttggtgtctggctctgtcacccaggctagagtgcagtggcatgatctcgactcattgcaatctccgcctcccaggttcaagcgattctccagcttcagcctccagagtagctgggactacaggcgcgtgccaccacgtctggctaatttttgtatttttaatagggatggggtttcaccatgctggccaggctggtactgaactcctgacctcaggtgatccacctgccttggcctcccatagtgttgggattacaggcttgagccatcgcgcccagccgaggctgaaaatttgagccagatagtaaccagttttctaacagaagcaaaggaatgtcatggtgaggctctgagcctgaagagaaattacaaaaaaaaaaaaaaaaatactattcattgccctacccattcaattccttgagaaacaaaagtgaaagaggccttattcaagtcaatgttaaataagagaagggaactgacattaagaaagtgcctactttgtgccagacactgtgcgaagacctatccatatatttcgcacttaaagatacagtcatcacaatgactcagagaggtaggcattattcactttacagatgagagaacaaggtcaagtcaagtaacctgccatgttaagtaatattggcaattttttaaaaaatggagctaggatttgattacagatctgttcccatttagactgggtaagccagaccttcaggtacctacactccagccacatctatgctaaacattgtctgaacattgtcctatgttcccattttgcagctccagtgattctttgcatagaaagccatacttccccatatctacctcttgaaagttgtaacagtttttcaaggcttacttcaaattatctcttttctaagcctcgctttagccaaagttaacctggccctctccatagtctcacagtgccctattcaaacttttatttgatactcattgaatgccttatagtggtactctgatttgtctatttatttcgctacaacactgaacagacagatcacaatggccatgtaggttcttggcagattgtgatatctgtgatatttcgatcaattgaaagctgtgccatgatagtctacaaaaaagactacaggataaataaattatggttcagtcacacaatggaatattatataaccttgaaaataaatgagctatgtacattaacatggatgcatgtcagtaatgtaacattgagcacaaaaagcaattcatagaaacacaatatgattatatttaagaaatttgtaaacatatgaaactgaaaaacatatttttagggatgcatacatacatggcaaaactataaggaaaagcaagggaatgataaacacatttcaggatgacggtcatctagtagggaagtgagggaagagggctgggatctgaaaagatcacacagcagaggcaaaaaggtaattagtaatgctctatttcttaagctacatggtgaatacataaaactttaattattgaaactcaaaccaaaaatttcaaccaaatgacttttttccctctagctttctactgtaagaaaataaaagtgaatgaaaagcaaacacatcatttcagggatttaatcaatgagggtagctaccaggggcttttctgtactgaaaagaacttggcatcagagaactgggtttgaatcctggctctataaatgtagcaattgtcattattattagggcttcaggcaaaaagaaccgatactcaaaataatgaacataagtcactaaagatgatcagtcatagaatgaaggttcaaaaatgcttcctcgatgtcacactggggtagaaaaggagtcattttagaaagattttcaacaattaaagatgggaatttaaaaatatatgattaattctgaatcaacaaaaaaaatacggattaatgaaaattcctcattccctaaacatcatgctgactgaaaggttactatactttcattgtttttatttattgtttgaaaaatgcagaaaacacataaatacataaacacataagcataaacacttttttgtgtttttacaagactgagataatgttatatgtaatgttttgcaattttcctctcaatagtatgtcatggatatctttcctgtgttagaacacgtagatctacttaactttttttcatatttgcaaggaatttctttgtctgaggctactataatttatttgaccagaaccacacatttagcttatttccaagtatttactattataagcaatgttcaatggccatccttgcatatacacctttctgcactcttgctttattctttctgtaagataaattcctgaaagtctgattgctgggtcacaatgcatgtgctttttgaattttattagattctcataaaaaattgttctagttcatatttccccccacagttccagcttcctcatacccttacagtaaatatttgaatcattttctttttccttttgccaaattaggtgaaaaagttacttcatttttatttatatatatttatacttactttctattaatttgaacatcatttcatatatttattggtattgtgtaattctttcatttttatatggaatgtgctatccatatacattgcattttgtatgtaccagatattatctcccaacctattgttttcccatccccccttactgttgtttatgggcattcaatttttacattatcaaatctgtcatttttttttcctttatgggttctgggtttcatgcttcacttaggaagtccctttatataacaagacttttttttttttttttttaaagaccttacctctagtttcccctaaatctcacgcccctcttttaatgaccaaataatgctatcaactcaggctttgtctgactttatgaacagaggtcaagtcccttccacacatcaagagctattgctgcttatttctctttatcattcttatttatactgtataagatgttttagaaattacccccccaaattctcattattacaattaaaataatacagttgttcataaagacaaaattaataaataactccctatctaacttctccaatcttgtcacaaggcaactgatactcattgtagagtgaaggtctttccatacctttctctagacccataaaaatatatacaaacagacacattaaaaaactttccatttatttttatgaaaattgggtattttatgtattatactatacttgtttgttttatataacaatataacatgcatgtttccttaagatagaatatgcttctaactcattgtttcaaaatctggaaatattaaatgttatatgttataaatgtaccattaattatttaactaatgccctattgctggacatccaagttgcttccttttgttgtcattgttaaccctacaatgtcacttttataatccttctcacttctcttcctaaccccatgagatcttctggatcttgttagtcctcccttcttctcactcccactcctgtgttttgttgggatagtttagtatatttatttagacgcttgtgctgtccatatggtagccactagccacatgtgactattgtacacttgaaatgtggctagtctgaactgagatctactgcaagtacaaaatacatgtgggatttttaagacttagcacaaaagaagaatgcaaagtatttcattaatactttttatattgattacacgttgaaatgatactattttagatatttaagtcaatctgcctttccatttagatttaattacttttccagagagccaggttcattgcccatcattgtttcttctctcatcttgaagtctccattccgattcatttattatttagtttgagttttttctcaaatattttttcactggtgtatgagagtgatatactttttgaattcttacatgtcctcaaacatctttctctgacccaagtggatgaatgataccttgactggatggtaagttacttggtttgcagtctttttctcttagaaatttctagatgctattccactgtcttctagcttccacgatatagatgagaaaaccatttttttctttgtagatgattcagtttttctgccaaaaagcctgaaagattttctctttatccttgagatttaggaagtatatcagtgtatttttcagtgtagaacaaagtatgcctcttttatacatattttcgcagaccagcttttggctttgttaattgcacattgaaattttgtaattattttagcttatatttttattacttttgtacagatacttttatgtgaaatatatatctatatattctttttctgttcctgagttgaaagatttttttcaatatttctttaaattcagttaatgctataaggaaaatttatagcgttaaatgaatttaaagaaataataaattttaatttaaatgtatattttgtgcaaagtcttgaaaatcccacatatattttttacttgcagctctcatgtttttagccacattcctagattatttaggaagtaatataatttttgttcatttttaaataattttaaaattttcttttgattttctctttgatccaaaaattacttacataaagtattttatggttcttctaagttttttcctgtttaccttttctggtctttgaattgttgatttctagctttacagaattcttgtcagaggatgttacctgccagttttccacttgagaatttattaaggttttccttgtggcaaagtacatgataaattttgtaaatggtccaggggcataaaatacaaatgtggttttgtttttggcattagagtatctaattctatttatttgacaaaatattaggtcaagcttcataattattcaaatccttggtattattttttgcctacttttcaaattctgagaaatctgtatttcacaactgtaactgcagttttatcaaatgcttcacatatcattccatacagttacatctaataaatatttgtttatggaatgaatccctctaggttctattttaatgcttttggccttaaattccacttaatctgatattgacatccttgccctatcctctccttattgaaaattccctggcatatcttcatctgttcctttattttgaaacagtttcatcattttgtttaatgtttgtcacttatatatgtacttagctaaaatgcgtaaatctgagtggttttgtctgggaataaaatttgtcaacccatttccattattgtaacaaacacaatgtcttaatcatagtataacaatgtatgtttattatctttgtggtaggcagaataatgcctaaagacatccatattctaatacccacaacatacaaatatgttaggttacatggcaaagggaaatgaaggttgcagatgaaattaaagttaataatccgttgacattaagatagggagactattctggattatctaagtatacccaacgtactcacaagggtccttaaaagtagacgagtgaggcagaagtatcaaagaatgtatgacggggaagatggatcaaatagacatgaaatcgctggctttgaagatggaggaagagatcatgagccaaagaatatgagcagcctctagaagctggaaaatgcaagaaaaacaggttttctcctagagctttcagaaaggaatagagccttgctgatatcttgattttagcctggtgagactcatttcatacttctgactatccagaactgtaagataacacatttgtgttgttttaagccactaagtttatggtaagttgttatagtggcaatagaaaactaatgcaatattataaaatgtaaataacagtttgtttccaaattactgtggacagtggatggataacggggaaaagtcaattcaaaaattaaatgaattaatattcttacattgtttattcttctttccatttccttgtttaattttcgaattgactttttgtcccttatcaaaccccttcttagaaatctgcaaatttactggtacttttattttataatacatttcaatctaaactaacaaatctttcagttataatgccccatttctcaagcattcatactatctgaagtctaactgtcttttaaatttataagcaacagataacatgaggattggacctaggaagagggtggcaggaactatgtcaaatttaaccttatttcactttcaccttctcttttctaacgtttctttcctttatctctaacaccctgcccccaaccaagtatgtactgttcaaggctctctaccacagagctttgtgctaggcatgaccttcctggcaaatatcttatatttagaccaaactttcctatttccgtccttaagagttacctgctctgcgttacctgttctcccagggaccatgacattttgttatgcaaaccaatgaacaatttcatagtgttaatgaagccaacactatttatatgtgggacaatggcttaacctttttgaagtggttttgttttccggacagggatgaaaatttaaccaaagaaatgactatttgaggctggaaatttcaggcattgtggcaggctatacaggaagacatttgtggctggacgaggaaggagtcttcatgccatacttcactgtgcactatcgaagtgggctcctactccacctgcatgaaatcaaacatgtactaacagtgtatgaaccaccgaacaagctagatatcctggccatagaggctattgtgcctcagggccgctctagggcaaccacaagaacagataattgggcctgtgagctgacaaatcaacttgtacccacaccattaagcaactgtaattcactctgagtctagcagagatcccattgtttactgctataaaataaactctataaaacttataaatatggagacagaatttaacataatgctgcatagggtaccttatatcacagaatactaataaaaacttttatattatagaaatacattttaataatgttgtgcttaagaataattatactttgaatgattttcatgagaggcatctttccctatattcacttcaatattatgactgggttttctcttctaacctatattaggttaataaattacttggattttaaaggctatggtgaattatagacttaactaaaacatggacttctaaactggcttgcatgattccacattggcagaatttaactgccattatgaattacttgttaattatgctatttacagtttatatgcatgcttgagaattttaacatgtttagcatgtttcacttttttctgcataaagactaaaaatatataggtttgtgtgtgctgcactgaatcatattttaaaatagaaaaagtaaagaaattaatgtgcaattttggctattgtttgcatggttgttaaaccataaaagataaacaaagtggagaagaaatgaaagaaaaaaactcatttaagtataactaagttgtcaaaggaatagttacaaggcttataactgagcccgaatgttcagcattgaatcaaaactttggaactggaagagggtttttcatgtatttgttctagtgggtcacaaattcaaatatttacatgggccaggtaaataacataaatgaatgaagtggctcagctatgacaacatggattagtagtggctgtggaaacccagagagtgcatgctctgtctcagagggatcatgctgctcagcttcagctggtttctgccctatgggagcacaggcccaattttgctggacttttcaatactttgagacaagctggaaaccaatacttctatatgcagctttttacttttaaatgctaataactaattcaatttttaaagtgttagtatctgtggaacatatagggtacatgggatgtcagattaaatctctgatgaagcccaacagaaaggaattgtacagaaaagaatatggaaacatatactaagtcacttacgtgctggccacatgtagtagaaagaacatgggatttgaactcaggcagatgcaagttgcaattctaactctgtcacataaccactaggtaatgttaggcaagttttaaaaactctctgagcctcaatttccctctccttaaaatgaagataacaatacctgttgcataggatgcttgtgaagatttataaataaaagtaacgtgtgggaagtgcctatggtagatcttggcacctatgaaacatccactctttttacccttttccaccagtctatgtgcctaccctgttttattatttttttcaatagcaattctatagacttggaattatattatgctccacttcctactagaatgtaagtttacatgatggtaagcaatgtgtctatttcttttcactgctgtattcccaacactaaaaatactgcctgacccataataggtgttcaattaatgtacgttggatagatagattaatgattttaacaaattttagtacactgactccttccctttaatgaataaacacacacaagtacatatacatatatgttatccaagctcataaaccaagttaatgctgtactggaacttgaattcacatcaagttatttcgctatgattattttcattgcactattaaagtctgtcaaaattatgcaatgttctacatggacatactcatctcttgggattatagaaaatacaatctttgaggtatttgaatagctttgcaaaggaagtcttcctcacacttccactgactttggtggttaaaggcacttgcagtgctctgtggattattctaggtttttcattctgacaaaaagactattaactgcctttgtaaatcataacgacaacaattttacatatatctggcatattatacttaaaaatactgtaaaatgaactcataactacaaatgtcagttgaatctcacatcaatcttttggggtagatgggactggaactattttcctcattttaaagagatatcagagacacccagtgataaacaccttacctaaagtcacagtatggataactaaaaaatctggcaataaaccatagttctaaggtgatattttatattcacaggacctattgaagacttcccactatagccaagacttctgtattttacaatctggattttttcttcccctccccacttacataaaaactagcctgtcctgggccctatttctaatcctgctacctcttatacttgtacttggtattaatacaacaaactttactggccagagcccactgagtgatagaaaaataaacaaaccaaggacctgccctcaagagctttctatcatcagtgtaacacaaatatttagtctggctaaaatatatgtcccttgtaagaagtgttatgccttaagggactatatgaggggggaagagagaaagatgctggtgctaatctaatacagtgcttctcaactcggcatacctattagaatcccccgaggagctctggaaaataccaaagcttggatcaatctagggtggagtctgggcagtggactttttgaaagttcccatagggatcctaaggtacagccagtgttgaaccaccaccagtctaaatggaataaattgcactgtagggaaataaccgaggaaagcaaaagacaaatacctaaagacaaacttgaccttcttttcccttgtaatgccatttaattaaacagatcttaataccaattatatttacaagattttcattgaggctgtagctttcctgagacttaatctccaatgattttaagaaaaatattttcctccctcaaatctgacaaccagtgtcatttgatgatgatgtaaatatgatcaattttatactaacttacaaagtttggcaggtgaaaacctaagtgtatacacaagcaaatgaatcaaaactgaaataactgtcttaatttttatgcataattcaagtgaaacttggtttatgtcctgatttctctgcattgcccattttcttactttagtttgtttttatttgggatggcacttgtttacccttctattttcagctacaacctaggtttgggttcatccatctaagttattttggtttgcttatttttacctcttacttacacatatttcttttctttttcttaaaaaacctccatatttttcatacattccaagtttcctagaatagtcatttccaacatactacatcaaacttagatggaaaaatttgtgagctcggtctaataaaaaggaatggcaattccttaaagaacatctgtacagattgaagctaattagagacacagagattttatccaatgatgtaagtgcatatagtcccttcagccttggaaactgactcaaacaataggttttcatatttatgtgtgagatgtgcctctttcaaaccttgttacaactttggcacattacccatctgatgtgaacttagatctttttaacacttttatgtttaacataaaaaacaacgggaatctaggattttgttgggaatggcctgaatgacttccttgaagggtgaaattgaagttaaatatgtgcttatccaatagctatagtaatatttgtatacctttctctaccctctccaacctgtccagtaaatcagtaccatattaattgtgctaaaatgccccttaaatgaccatgctatgctcccacctttcatcatcacacgtctcccatttcttaatgtattgtattcaaaacatttgacttggttttcaaagtactttgatactctggcccgacctaacttattttctattgatttcaaacatcttccatgtcaatcaagctggtctcctgttgtactatataaataccagggtgtttttgttttgttttgttatgttttgtttgttttttgccttcctctgaattgttctcaatgtgcatagatttccttccttttctcactcttactctttaaattcgacctgtcttatgcgttataggatgagttccaattcttttctgaagactctcccaatctagtgctctaactgatctctcctttttctaacatcctaaaatactcaccctccctcgaatgtggcatttgattaaatatagccttgtcactattttagttactttaagtatgtcagccctgtaaagagtctgaggggattgtttatgcctgttctaatatatcctccttgcttctaacttggttctaggcatatggttaaggcataataaatatttgctgactgctaactgatgctggtgttgcctagtagcctgggcctatacacactgtcagttctgtcaacagaggctgcgaaaattctaccagagattatgtctgcacaaaaataagcctctggcataaattgcgatagctgccactagagaattcacctgcaggaaagggacctcaggcatattacctggtgctcccagagactcttatgccaggttttccactgtcaaaatacagctaaaccatgtgctaatgtagtgatgtgagtctctccaataatttactgtaaatttatacttgcttagttttctgacatggctttagcatcctaatttcccataagctatgcctcagaattactatggattacaaatttgtggaaaaattgggcatactctgagagtcaaaaattagcattttaaagaagcactttattttctgtaaaaaccctattttcaaagttaaatattctattttattctgaatgagcaaaataagcctaaggtttcagagaaaaatatattcagaaggtaaaggatttaattccaagatctggaactgtgaatcctttctttgaacacagcctctcttttcttttactcctttccccactttaattgctgtcacctcataccgtaacctctatttcccagactctgccgtactctccaagtctctttatcttgcttcttcttccccgctgccaccccataccccgcacagacatgcacagacacacgcgacaagcatacggcccacccacctccctagccaaatttcaacccatggtcatacaattgacactttaagaatgtatttctttacagtctatattgtcttgctccctagttcttccattctttttacattgacacaaagtaaaaattcaattgaataaacagtagcagttactattattttcatataacactatcagaataccaacttttctgcacggtgcattgccttactgaagtccctgaggacactcatgatgaaagcccttaagctcacaccattcactcctctgaggctctcactatatctttccaactgtgattacacattcattttatgccccctttgtgtaccgaattgatactcatgttgcacctatacatctgacatcttcaacatgtacccaaatcttttatatatgtgcactttttctccctcacttcatcctaaaggacaggtaacttgattccttaagtgttaaaatggtatgcttgcttcttttgtaccttaccatgggaccactgtaagggtcctgcacactgtgggggcttgataaatgttatattgagagtcaaatacatgcctgaaagaatccttttaaagctaaccctcaaatacctataaaatgcccaagggagccccacagaggaataggtgagacagagcacagcagagcttattaaaaacgatctgggcttgcaatacaatttcttttagactggatttttccttaggcttaagacacgtgctaattctctcagctgctttaatcatgtagatattaaacaatgagggggcatcaaacagtcttttagagttatgagaagtgcatgctatgaatagacacgagggaagatgaaagccaagcatgtggcgactggcagtcccagcagcaggtgtcttgactgaggacagaccccaagatctactggaaaatgcaaaatggagaaacccaacgctgtcagagaagaaggcttcaaaactcaatccaaatcaaagagggctgcagacttttatggaggcttttaaaaggaaagtgttaagtttgtctgaattgtaaacagaatccatctgaagatgcattttcccttaaaaagtcatcccaaaacacaaaagcaaaaaaaaaaaaaaatcaacaatcacaacaataacatttcaaaagattctaaaaggagggagggttgacagccaaacctttttttaaagtaatggtagccaggaaagaagacgatgggttgtaagaattcaccacctggaaaagagagttacctggggagtgacagctgccataggaaaagtagaacaaacacacctgctgtcaggcacacctgttcttttcagggagaggaaccatgaggctgaaacagcagaaaacgcccaagaaaagggtaggatgactcttgcaacccttaaatattttcccttactcctctggagttatttcctcggcaggaatggatgcagagtaaccacataagatttcacctaagtctttcaattttcatagtctctcaaattcctcttctagctgatagaaagaaattccttaaaggccccaagagagaagggaggcaaacattttctgtggcctacgctggagaaagaagatacactattatgtgctatattaaaatgtgacttaaaggtgttgaatctgaggtggcatgaagcctactgggactggtaaggtagacagagattgtaaggggagggaggacgccaagcgcacgcacacacacacacacacacacacacacgtacacgcacacacacctgccaaaaggccttacttccccatagtaattgtttcgcctttaactgtggatgctcacttaagaacatgccatcatttctggttccacaaagcggctacctggtcattgatgcttgcaaaagtcgaattctgggcttccacagtagcccagagaatatttaaggccaatgagaataaatcagaccaaaagggcaagatagctctgtagcagattagctatactagctttgtaaacgttcacaatgccctacaggaaagcctgctgccagcagataagccaaactagagttcaatatcagtggcaatattttgtcctgccttgtaaaaaaaatgatctagcaagggatgcaactaattgaggcagtggcaatagtgagatagaaggaattttaaatgtaattcatgcatagtccataaatggactaaaaagtacagtatttttgagtacctactaggaactctatgttaggtattgcaaggaattcaaaagacctctataccaatacaattaaaagtatttgcaatccttaaggaacttaacatttcactggggagacaatctttacaaccagtgcttaagccagtaaatagtcaactgcaaagctgtgaatgtcagacaataaaaactggagttcacagaaggcagtgagcaatatatgtggaagtcagaagttgtgaaggaagactttatcaaagaggcgagacttgagttaggccctgaggatgaataggatttggaaatgctagaaagaatccagaaagaatgtatgaaactaagatgcaaaggaaatatgagattccaaacatgaccttcagcatgagtctcagttactatatttacccttgtgtgtaagaatcagtgtattcttattaatgtggaaatgtaagtccctagggattcaagtgaaataaattaccaccaatttacatggggtttttctaaccttgcacataattcaaacggaaaaataaatttttaaatttttaccttaattaaatttcaggcatctctgcatacttaggtttaagatcacaatcagtactggaataaaaaatcccaagagttgcctctgaaagggttccacagtcaagtcactacacttggtgagttcatattcaaatcaatcataaattctattttaaaataatcccaggagtaatcttaaaaccaaatcctccaactctatagctccaacttttgattattcatgtggttgtagtagagaaaattaacctctgcttttcatgaagccctacttccagatttttatgctggggtagcagtattaaccagtttgtatttcacctttttcagctctccacactgccaagaaggtgttaatgagcagtgaaaaggccaaaaggccagcagccaaaggaagaaaggcacacaaaatacaattgggaaagccctgttccaacaacccaactttgtgagcatttgattcaccagtcaaatagaatatgtccatgagttcaaagagtataaataaatccaaagatttatcaagagtgattagaacagtcttgagtcatttctcaacttacagacaatttttaatgcagtatttcaaagtgcactttaaaaggagggactagaaattatccattgttaattttagaaagacgtttaaagtcctcgttaatgttctacaaatccagaatttgttaaaatttcgacaggctttgttagaaatttactattagtgaaaaatgtgcataaaacaaattaatttcaaaattaaaatttggagaggaaaagcttaagcttcttaaaataagcttttaaaaagcactttaaaggcatacatttacattccaataactggtaatcattcttatctgttcattaaagcaggagtcaaaggatctctatttggccacactttatttacccagtttaaattccattgcattttaggaccatttttgcatattctactctataatttttatagagctatataatattacttgtactattttgcacaatttattttccacctagacattttcacattttatctcatgtttttattacaaagaagaatactttgtaatacacacattatatctttttatgtgcatatacctttatatatgtgtatcaaatgaaatgtgtgcatatttgtgtatacatgtatgtggattacatattttcaatgaaatttgggagcttttgatgcagactgttctatacttggttaattttgtttaacaatataatgtattggagatatatctgtctacatctttctcaatggctgcatagatggaagaatttattttttaaccagtcaccacagatggagatttaaagcatttccattttgtttttgtcagatattactacaagtgtcctccaaacagactgcattacatgacagtgcctgactccatgcattttagaataatgaaaatgcaattcttactaacatattcaaacattcagatgagcttattctcaactggtctaaattagctaggtcctactatacaatactttgcttttggagacactgctgctattgtcatggcatactctgccctctttgctaaagatttcagctcctttatattgtgtatttggcatttcagggacagaagggaaaggaaaatggattatgttctctccttttgtattcttcttgactactgcctgtatggcttgtgaggaactgcatttcttagcgtgttagaaacaacggtggcagaacaggtaggaaaccagtggtgcagcagatcagagtgttagtccggcagaagataggagcagtagaaacaaaagggctataagataaccaaatataattgaattttgagtaatcaactctttcatctttctcccaaaaccccattggtttgcccagtggaagaaaatggagccctataaatggtttaggaataaagagaatgtgactatgaacattcttttgaaagattatattttaaatatctccctgtatgttacacaaagctgtttaattgtataggtatcacttattgaaagatcgtttcacattgttcactgtgaattaagtggaaaataataactgaggagagttgagaacaacaaaatctctctggaaataaaatatcctcttgtaacaggtgggcaatttgaaggattaaattaatgctttggggcaccatttagacagtggattgacagtaaacttacaatatttgaaaacaaaaaagttatagtagaattattgatgatttggacagttcacttctccctgagtccaattccctttctgtaaagctaagtggctatactagatgatttctaacagctctttcatttcgatgattctgatattatggacatatttaataataattgtaataggcataaaatattctgtggccagaaatattaagatgctcacttttgtatttttcttaaatccactattggtacaatttttcctaacacagccttttgctcctctgtgcctggctagattttacttttgaacttaactcagatgtcatatcttccaggaaactttccccgacccttctaaccccttatttgagttagatgttcctcctactgttattatcacactgtgttttaaattatctgcttttttttcagtctccttatttgattataataaactcctttttggcagcaactatgcctttgcattcccagtgcctagcacaatacctgcgacatagcagagacccaacaaatgtttaccaaatcaattaaagcatgacattcaaacactcatgtcaataattttttacagcagaaatatctgaaattgctacatcattggctggtaaatgcaactgcctatttatattcttagatgtctcatgagtatctaaaaatgaaaatatttaaaacagaattcttgatttctaacctgaaacctattcctttctcagttttccggacattagtttcctccaccagaaccctgactgattcctgattcttccctcttcctgtccactcaaatacagccctgaacataaggtcctttaggttatatctcaagaatatatctcaaattagtccacttgcctctagcttcacctcttgcatggacttctgcagtaacttgataactgatttctcttgttcctttttgtattccccatccattatccaaacaactgccaaagtactcttttatatatgtgaaccccactgctgcccctgattaaaaccaatcaatatagtcccattaccttaggagaaagtctaaaatctttggcatagttttcaaagcccttaggtcttgtctccacctgactccccaacttcatcatgtagtacattttctctccctttctgcaacataatcacattggtttccttacagtcattaaaacacaccaaactctttcgtgccttatagtctttggacatgctgtttccccttgcttggaatgctcagtccctggctcttcacatgctccgctcttccttatccttcttatctcagcttaaagattacttccctggacacactaagtagatccctagcctcaccctgttatcttctaagaatacactctgttggtcaccatagcacctcatagcactatttggtatccctaagtagtttatcagctcaatgaagacggggtatatatttgtttcattcaccactgtactcagtgcttagtactttgtctggcacacaatagatgttctctatttcttgatgtaacactaagcaaatgcaaaataaatactaagagtgcaatgacaatgctgtactgttttggtgcaaaatcaagcctggttaatcacagaggtacaatcttgatgaacagatattcagtgcctattcacaattcttaaaaagtagtataactaggccgggcatggtggttcacacctgtaatcccagcactttgggaggccgacgtgggcagatcacctgagatcaggagtttgagaccagcttgaccaacatggtgaaacctcatctctactaaaaatacaaaattaactgggcgtggtggcacatgcttgtaatcccagctacttgggaggctgaggaaggagaattgcttgacccagggaggcggaggttgcagtgaaccacgatcacgccattgcactccagcctgggcaacaagagtgaaactctgcctcaaaaaagaaaaaaaaaaaaaaagtagtgtaactattaagcacttatccacgatctttcagccgtaaataaatactggcaaaaaccactaaagatattcacccatttatttactcatttattcaacaaatgatataataatagaaaatcaataatgactataactatatagagatacactgttatcataaatgaatggattcgattacaaacaacatggaacaatcagctaatttcaattttttgaatagttatatttaagtgcctttaaacttccccaaaggcatatgtttatttctcctgtctagactctatacatagaggatagggtccataaattgtatgtttcctgctccaatagtgcttattgcaatgctcagcaaataaatagatgatgctcatctaagtgcttctccctgtatctgtaccaacatagaccctgagcttttccataacaaaactcatactaagatccaaaagaagatactccctgagaaaggaaagagaaaatacagataagaaaagaaaaccctaataagagctgaaaagtctgtcaatgatgatggacagaaaaacattagaagaagcactactacgcagcatcagatgcatatatttacatttaatttgagggtgataaacttagcaccatacaaacgatgtttgtttatgccttctagtagcttactatccaagatactgattatactgcaaggtacataaataatttaaagggctatttttcatcctgcctcatatagcaactcgatgggctatgtcattgcagtatattatttgttattgaatttcctcattttcatttgctgagctgatttttatcaatattattacagcttctttttatttatagcttctattaatcttgacatcatattgcttgcgttgaagattggtctgaagtgtttctattaaaattattaacatttttcactgaaatttagccaaaatattaaagaaaatacattgtaatataactccatatatgtttatgcaaagagcaacataattcaattcctgatgtaaaccccaacaacccagtctccttaatataataaaacacgaatacaatataaacctataaatgtctggacatgatgccatttctgaaataggatagcaattaggtaatatttggccagagaggaaaagcaagatttttggaaattatcctcctaaagctataaataacctgctaacaatttcaattgaagttcaaattataagggcaaactggccactcaaactgttttccgtgagaaaaaggaatttagaagtgccttcattgtttttctgcctgtgtgatgtcaaatatctgcttcatttaaacagttgaacttccacttggttgtttcaatatcacataaacattgcctaaaaatgatttttacaataagaaagcctgtgatatgtggagacgactactgcaattttaggtttcacaatagccacagtaaatgatttgcctctagcaaatccatctacttacatgccagtagaggaacatggtttaataaatctgaattggctctgaaatgggaattgcataaggatgacaatagtgagaaatatggtaaaatggaagaactatttttgaaatctcttttcttcatgcagaagactactgagagtttctagagttgctgaaaagggtagaaactacatgtgtggatttcttagtgaacataatctctccacagattcctggctaaatagtaaaactgcagcattctggtgagtaattgtatatacatcgatgctcaaatgaaggcactctgtagaagttgtatgcacaataaatcaccatctgtacttggcccttggagtctatttgaatgcccattcagtccaagctggctggctagatatgtcattgattttcttcttcagtgccatccctgggaaaaaagccaatgtttaataatggaaaagatcacaacttaaaaagggaggcggggagatagagtatttttgaaccccaatcagcaagtttttggaaactgggtacactaacaaggtatttatggacttaggttggatacaaataaatatataaaaacaagtattcatctgaataagaaaggacattacaacacctttgactaggaaatcttactccgccaatgatagcctatgcttatacctattggacttcctcatggccataaaacctacttttcaaccttgacaaagaccacaagattgataaccttcttttattttcccaatcagtccctctcctaacttctgctcttttctatggtggtctggaatccaggatcagctgttttaactagtctttcaacagcattacctctgccttctccctcatgtttctacttgacctatcttatcagtcgaacctccaagaagttttaccttggtttccactgtttctgcacctggactgataagaaaattaaaattactgtatttaatatccctttcccaggaacgtggccctcaattcgaatgattactataagaaaaggcacttgatttgactggataaatcctaatagccattccttacagtggcttcaaagtcctatgtgatctagctcctgctaacttctcccacctcatctcacattacccttctcttcactcactaagatccactcacagcggccctctttctgctaattaaatatcccaagcttatgtatcagtcagggcttttgcccttgttcttccctctgtctgaataatattcatccaaatcttcaaatagttggcttattcttgtgatccaggtgtcagctattcagacttccctgaccatcaaggctaaataaagtagaccctactgccagttactctttgttataatcctgttttaattttttaataaaatatatcaatagccaaaatatattgtttattatcaatctctccttactagagtataagctcttaaaagtagggaccatgtctatgtttttcacaactctatccccaacacctaaaacaagatctgaaacattgtcagaacacaaaaaattctcattgaatgatggactcaattgccacagtcatcagttcatgtgtgaacatctgacctaagctttgtcaatcaaagtacattctgcaggtcctacccctggccacaagtgattgatgcaggagtgggcaactgaacaaagcaaggctaatcaaagtccttgcttaggattctaggtcttggacccattaaatacactgcttctatatcagggtggtaagaagagatggtcaagagcctgtatgagccatgtttcacactttgtgtttactaagcctgtgtacatgaaagaaaatgaagtttaaattcaatgcccactagaaaaatataaatactatattgatcatatttgattcattagctccagttatttcctatgtcagtcatatccttgccctttctacagtttgctattctaaactttcttttgttccctgagccaataaattcataccactttttgcttaagctagtttgagttgactttctgtcaattacaaccgagattctaacttatatactaactttccctgcaaccctactaccactttccagatttttttctgtctcattgttcattctgctaatgtttcttactctactcacagccctctctccctgaatcttggcagacgacattgtctcctacttaacatagacagcagatgctacgagacatgacacattccctcaattatccctgctcctctcatgtttcagagaccaaaaattccatctgtattctggatcctttatttaggctttctccaggaccttgctccatcagatactacctctcttttctatcacttaatattttttcttcattagttcattttcccttgactataagtattcattcattcatacttcaaatatttattcattgccactgtgggaggggcaggactaggttaatgtacatgcttatgtttcttttccatccaaaaaaacaaattaatgagacaacaaaaaaattccttcctaaaacctgtgttctcttttagctattgcccctctctccttgaccatcccatcacttctcagccaagcatcttaaaagcctatacttgatgtctccacttccttttctttgcatttatttatcaacccactgaaatctttcttatttctctactactacactaaaaatctcttttttcaaagtcagcaataaactcctaaatgccaaaactggtaaatattgtagtctttacttaacgagacctttttttcatatacgatactgttccctctttctggattatttgttctttcttgtcttctataataccacttgtcttgaatttccattagtccacttctcagcaattttcctgggatccttttcctgtcagtcatttaaatgtttagtgtgctacatgattttgtcaattgcctcttccttttatgttttctactctgtacatgctcttccagtgtgatcacaccagtctcaaatatcagttatgtatcaacaatatccagatccattttctagccccagtactccaagtcttgtatatctaacttcaaattagatatttctatctggagaaactacagccctgtgaagtcacgttcaaaagagaatcattatttttccccctaaaactctgccttcttgcttccctaccttcctttgttgattgctagcaccatcctcctctttaatgacttgccaaagatagaaattgtattagttcattttcaagctgctgataaagacatacccaagactgggtaatttataaggaaaaagaggtttagtggactcacagttccacgtggctggggaggcctcacaatcatggtggaaggcaaaaggcatgtcttacatggcagcaggcaaaagagaatgagagccaagtgaaagggttttcctcttataaaaccaacagatctcttgagacttattcactgccatgagaatagtacgggagaaactgcccccatgattcaattttctctcactgggtccctctcatgacatgtagaaattatgggagctacaattcaagatgagatttgggtggggacacagccaaaccagtttttttcagaaatctttattattttctctctttcattgcttacaaccagttagcccctaagtcttgccaatttaaatttatctcctatgtatgtctcccttttagaaaatttggatatttaatgcctaagttaagctcctaatcatctctttctctagattattgcaacattttcctaactgatcactttcaacctgtctttcacgcttctaatatatccacctcattgcctacagaaacgacaaaagttttgaaatcctccccactggagaggaatgtgcttaaagcacactaaagttcaccttgaagattatgctttcccccccgccccgcagggctcactatgaatagttccaaaatgtacctttgaatttttcacaattattttgataagactacaattaaccaagtaaagtagaagtctattaacagtaacaggaagtcactgaatactggtcatagcattgggcagagaggtaaaaaacagcggagaaaaagaaatggtaatgtaatttagaggagaactaaattcttacctgcctttttgttacaatttgtctattgctagggttcaaacacttcttctgaaccatgtcttcatgtatatcatgctcaatattatattagcatataacttggaagtcatttctgttctttcgtatctcaacacaagcagataaagacatatcgccagttttattatttttatttcaaatagatgtcttgtcactttctaaggtctgttcttcaaatgaggaattataaagaagaatctcagaaacgagcatttcagttttaggagactaaggaggatcagacaggccagtgctgaaaaggaaaccatcacacagagatcttgttgattatcctagcaaatctctcttttcattttacttttcttctttggttcgaagattctctctagaggcagaagggagggctgtacatttcaaattatttttaggtctttgattaactgtgccaccagaccccaggtgactattaatatactagtaaaggcggttaaaagaagacctgaggtcattcagtgagtgaaagaagcaaaattgaaagcatgagttttgacccagtgatatgatctttctagtagaccacatagtagaggcaatccaaaagggggcaaatgggaataagggacactatctgcacaaaaggttagaagacaaagctactcagcatggaattcagaattaaaatgaaagaacttacctagtgaactttcaattcaaccatatctcaataaagctcaatcctattataacacagcacacgattataaggctacaaatgtactgcagagaaaatcctgtgtcttgaaaaataaaagctcagtaaaacaaaagccaaaataaaaaagctatcagttatgcttctcaacatgagttttataaagcggtgctgctgtattaaatttttgtctgtgaccaaaagaaaatttcttgaatagcaaatgctccataaatgcttgtccaattgaattatctaattggctaatgtcaactttttaatatttaaggatcactggggattatacattgattagctaacaagtacttcttatccagagaaaactggaagctcatgccatagcttactaggatttttgcaagaggagacaaacagtcataagattgctgttaattatgtttccacttctcatgaattgtttacttttattatttacctatgtcttgaatggtattgaagcaagccatgtaagtccctttgtcaactgccagaagtataattctctacaattaatcagtaaaaagagaattaagcattgcttctttagaattaggaaaaacctgctgctgataaattgaatgcattaagaaattaacataccagtaaatgattgatcattacaattatctgaatttgcatttctagaatttcactgaaagaactcaaaatcattcttttaagatatttttagctatgtttcccaactggatgaagtataaaagagatatcctgcttattattataatgataagttcaagagtcttttaaacatgttcacaactggacattaaataaattaatccaatatattttaaaataggaactcatacaagggtttagggtttaccagctaattttttttattatctaccctgatgtataaaagaaaaattcatctgtatgtcatgaatcacaaaggcttgtaagccacccaactactaagcatcctgattaaaaagctggagaagagcaggccacttaaataaaaattatttggcagatgcaaacatctctatacaggcagctcataaaaatattactgaggagtaaataaaatagggcaatatcatctaaaatataccattctcactcagagctgaaagtaatagcttttgtttgaggacaaacaacaacaacactaataataagtattgataacaataagcaatattgaaagataattatgtgccagacattattttagtattttgttggtttgctttacttaaataaatatttaccacctggttagtgtgtcctaggcagtgttcaaacactgggactcagcaaagaacaaaatacaaaattccttgctctcacagaacttaatctagtatgaaagacagaaaacaaatgaatacaataaaaatatactaataagtataaatgtatagttatacatatttgaacgtatagtacagtaaatatgtatatagaaatataaataaatatgtaaagcataaagagaaataagcaaaatagtatgtcagatggtgataaatagggtgaccataatgtctcagttttctcagatagtactggtttatatgtgtggtcttagtgtaattactcctagcacaccctttcactctaaaaaatgtcccagtttagacaataaatcatatggtcacctaaatgataagcactatggaaagaaaaaagcaggaaaacaaatgtgttggaggagggttgtaattttcaatagcgtagtcagggaatgcctctctgagaaggtcacatctgggtaagaacctgcatcaggcaagagaccgagccaggtccctatccaggtagatatcaagggaaagaacatttcaggcagagggaatagtgattgcctatatttttcagaatcacaacagaatggttgtaacagaatggttgagaaagagagtagcaggagatggagtcacacatggaaagggaagccacattatgtaggtctgtgtcctcagtgagatggcgagccatgccaggttttgagcagggaagtgataggctttgggctttaagagtatcactctgactattgtattttgagtaaattgtaggggtgtaagagcataaaaggagagaaatcagtcaaaagcctattgcaaaaatcaatatgagaactgatggtggcttggactagggtagtagcaaaagaggtgatgataattagtcagattttggatatattttgaagacagagatgacaaggtttgatggtaaaatggatgaggtcacgaatcatatcaaggtttttgatataaatatgtggacataagagttgccagaatctgagacagaaaaagtcggaggagcagattttgaagggagggtcaggagttctgttttgaatattgtctcagcttggttttcccaaaaagcagacagtgaaagaagggattgtgtgtaggaagtaaattttggaaagtgatccccaaaataagaatggaggatcagtaaaagtgaaataaagaagtgaggcaagtcaaagggtgagtttttgagctggtcacagctgagagcagctgaagcttgatcttacagggcaccctctgaagagcttgtaaaatgcttgggagaattgtctgctcaaatacaaaagagggaggcagtcatgaatgattctttctcttctagatcaagggatgtcccatgatgtgttaaccctctcacacttccaggcttgcacatgcctcagaatggctgagtgggttgctacaggcattccacatacaagtagcagaaaaggcaggaatgagagctatctgatgcagttgaaaaaaacgtgttgttagtgtatatctgcatgcagctagtaggcgcagcaatagctggaataaaaaggtggggtgaaaatgcgaggtgaatcagaggtgtccgatacagatatgttaagtttgagatacgtatcagacatgcaagtggaaataaaaaataaccagctggatatatgaatccgaatttcaagggagaggtcaaagctggtgatgtaagtgttttctgtatataaatgatattaaccgtatgaaagaggatgatctgaccaagggaataagtgtagcaaaggtaagagaagaggtctgaaggctggattctcaggctgtctgatgtttaatagttgggaggatgagaaggatccaataaaagagagttagaagaatggtcagtaggataagaggaggctcagaatatgatatcttgaaaaccaggtaaagaagaaacagtgaatgatcagcggtgtcaaatgctgctgaaaggtcaagatgaaaactaagaattgaccattgaatttagcaccatggagacctcggtgatcttgacaagagctaagtatttcaagaaactctaagaaaaatcattaacctaaatgttgcgtttcctgcaaatagtggtagggaatgaaataagaaagaccacgatgcaaaaatcaaacgctgaaaaatgtctgtaagtctgaagattgacaaaccaccttaatgaggtagaaggaaggagaaaacaatagtcagatggtatgaactttaaaagaagtgaagctgtaaaactgaaaaaaaaaaaaaaactaaaaagaagtcactctgagtagacttagttgtcaaataatccagtgaacaccttggagtaaattggttatcattgagtaaattatttttggctcagttaattcagctagttagttcatagtgttagaaagagagaggtcaataatttgatcttcaccctagacagctcatctggcaaaggaaagaacactgtcccttggccatggcatacacttcggtcttgcacagcaatcttgcaaattatattggcctaatgctaatcatagtggatccctgacattaagtgcagagggctcagggtataccattccctattaactaggaaaaccatgcagatatttctaattgtatgtaaagagcatcagctctcattatagacccatttgaacaccaatgactatattttatgaatgcctttctacatatacattacagtatattgattaagggcatgatacttagtgtccagtagacatatgttcaagtttcaactgggctgtttactataacctccttctccatgcctcaatttcataaattgtaaaatggggattagaaatgtggctaaatattacagggttattttaaaggttaaatgagatcatgcttaacacagtgtctgacacataattaaagatgagctattattgttctttaaaatgggtaagcacgaggatttacttgctgaagtataatggtttacaaggtcccatcctgctgtcgttgttattctagaagcatttttctgtaacagctttcaacttcattttaaacttgggaactcaccagagactgatttttgttttgtttcagctgttcagaagtcacctatgaagttaagcctcttatgtggattaagtcaatggcaatattgatttatactttttatgagctaccaattctagttatcctaacctttcaaggaagaaaaaaaatcccttggaagattagaaactctttcattctcactctgagtagacttagttgtaaaataatccagtaaatgcttagttaggaaggccatctgtatcataaagagcaatatttccatttattcaaactacaacatcaatagaatctgcctcccataatctagcaataaaggacactgtttggactaatttgttcaaaattttaacagttcctgaacttcacaataaaatgatccactagtatgtacagaatttttaataaatatggctatgtaatgatagtaactgaagtaatagttgttggtagtaattggatcataaaacctttcaaatgagtttgtggcatgaaggcaacagagaacgtgatgaagaacactatggggaaagactcatctgctgttgaagattcactaaaactccatttatggggtcaatgccatcaggatgtattagagggagcacaagatctactgctgagctattttgcataaagtttacataatctacagtgtacaaaagccatgatgctttaacaagttgtagtcaagcaagactcttctaaaccaactgattaatgtgcataaaaaagataaatgttaggaattttattttaatcaatactctttcagggtttaaaaattgtattatctgatgttaattgtgtatttttgttgttgttgttgttgttgtttttgagacagagtttcactcttgttgcccaggctgaagtgcagtggcacgatcttggctcactgcaacctccgcctcctggcttcaagcgattctccagcctcagcctcctgagtagctgggattacaggtgtctgccaccatgcccagctaattttttgtatttttaatagagatggtgtttcaccatattggccaggttggtctcgaactcctgacctcaggtgatccactcaccttggcctcctaaaatgctgggattacaggcgtcatttttatcagagacattctctagaagatttgaactgaaaacaattctccagtgtttcatagcagcttaattggaggtattacaactgtagttaccatgataggactaagaattttgttaaacctgtttccactattgctctatttctataccatgaagttacagagcaagggcatgggaacttaagatcctcaacaaagtccgactggctggtgtggagataggattctcccttattcctatgtataaagttccaattcattctgttatttacagtgacacaacttactagatcctaagtatgaagagaaaatctctctctgaaaatggctgaaactggcaatctgtgtgttaaaagcatctgtgaaaggatttgacaatcaggaataattcttgtgtcctggcacttttcagaatgatttatgtatacaatttccattgatcctctgcaccacagcgaggaaacatcctcactttacataagtggaaacaaaacgttgtaaaagttatctcattataagaaaaaaactgttgagcacttactatatgacagggtttataaaagtaaataaggcatagttcctgacctcaataagtttacagtctaggtggagaaacaaacaagccaattacaattcatggtgattagtgctacagtagtaataagtacagactgctgtaggagtatacagcaggagcatccacccaagattgcacggcaccaaggcaggctttccagagcaagtagtttctaggtagagactctaatggagactcacaggctgagaagtacctagccaagtaaaaaattagaggacaatcccattacaaattgatccactttattgttccttcccctagaggggaagaatgggtttggaacagtgtttcagtcagagatgagagctggtgcaaatgtacccaggagtatagccaaatttggatcaataggaataattttatcagatccaaaaacataaaagaaatgaggtgccatgcctttaagattggtaggggtatagctgaatggcatgtaccatgaagtaggtttagtattttattgaggcttgttggtttttaacatagggtagaggagtcttagtgctgtagtaaagaatttggtttgtagagcataggataatgaagagtaggctccaaaggcacccttgatggagaaacagtggcctcaggggaaagccatccttgaggcacattgaaaagtgagaggagccatatgagagggttgcaggggaaagggggcccaaggcttcatttattcaactcaattcattaattcattcaggaaatatttcctaagcacttattctgtgatgatactgtgctaggctattaagtaaaagagcaatttgaacccaaattgctattagttcagtattctttctattataccatcatgaataattaagcaacaaatacatcaaaacaaaaacaatcaactttttaattcaatttactaaatgtttgttaaatacttgacctattacgtgcaaaatattgcactgtatcaaagtatctacttactggttaatggttgttggttatactccatgctctctaagaggaaaggaccagtggaattttagtaaaatgtgcttagtactaaatactgtcaaacactagaaaatggtagaaatttcctgatgccttcaaaatcagtgatcaacaaataggtattgaatacttcttttggaaatagtgattgctgagttgaactctggtgagacttaagtataagtagaatgaaagtttatgtagaattataataatgtaggcagtaaaaaatcaacacactatcacaaaagcttggtgatagggctgaaatagaatcaaattttatgtaatttttagctgggtaggcttagtgtggtcctgcctgaaaggtatgttctctcaaggtccttgacagccttgtgattcagttttaagtgctatgaactttggttccgaacctgagtaataaaaactgcataattgttttccttttatagttcccatgttttaaagctttattttagtaaaagtgcacgtgttttaccaaaagaatgactgtgaaaagtctgtttagtttgttaaaaaggcaactttctcaagacactcttgttgaattcggatgtcatgtaagattataaattctactgtgacagacttcacagtattcttatgaagtcacaattctaacaacataggcttcagactttatattgaaatgtacattttaatcccacagtacataaatacatgcaaataaaagtttcaaatatacattttgaatcatcttattagtacagtgcagccacaattaataaaaaaaaccacagaataaaaagtagccttgtttaattggaatatctacatttccattcaccccagtagttggcattgataaaaatgagacaaatatcaaaaatacaaagccacctccaagcttttaggttctcttcatttctacattgaggccattcttcaatggcttctatatctatagtctagtgcaatgaaagtggaagcagctgaccagaataacatccttctgtgtatacaaacaatgttctaaaccaattccacatccaaatgcaattctacaaaccaaggagtggtataaagaagacacatgtattttagaaagcctttagccaataaattttagactaactcttgttaactgcaaagggttatgaacttggacttcagttgtgtaattattttatctaaacttgatttttatgttatgacaaaacatcatttactaaaactaccacatacttttctatgaaaagttaaaatatatatatatatatatatatatatatatatataacaatcaatgtgacaaatagggaaaattctaatttgagtctctttccaacttaatttaccaaaagaaagtgctgttatacatttaataaattaatttgttcaataaatattcactgaatacatattatgtgccaaatactgttccaagctctaaagtaaattataaaatcatggtggcagaatgatggtacagccagcccgcttgtagcttgtacttttaagttaaattgatcaggtatgttccctggtccattggccagatgctttggtactgccaatcatattgcagattcgaaagaacacactgactaaatatcctggctgtgtgttatggttagaatgcttcagaaatcaggttgattgtcctctatcctagaggtagtctgaaggaaaccaataagaaacataaagcttgccaaccactagcacttgacaagcatacctggggcttagagtatgtgggatgggaagctgcaggagaaaaaggagcataagcatccatgtttgaatgttagttgctgctccatataacatctcttctgttttgcctttccattatcatatactagtacatcttgcttaagaaaatgcaatcaatagaaaaaaattagagaacaaccccattacaaattgattcacttcactgttccttatgtatggggtgtgtgtgtgtgtgtgtgtgtgtgtgtgtgtgtatgtgcatctgattactaaatatatgacattagtatgtatatgtattcatataaaacatacaataaaattctgcatttcttgtgaccatctcatttatcaaaaccacagattacttttttcaagtcagtgaaggtaatttttgaccatatttattgaataatttgagacacattagcattcagcctggttgtatgtcaatgtgataattttttaagtgttcttgaaactttggacttcaaccattaatgagaagacataattggactttagtagtgaagccttataaatatctcagttgaagcttgagaaataaatcttaactcaaacctttaaatttcatgaaaggtttgggtgtgtccttattaattatttttgcctttgagcttatttctaactgctttcttccatgacataaaagacacaaagggtcatttcctctaacagtttgactctggtgtaacaaaactaaatacttcatgtgtcacaagaatgactggcaccaaaatagcactgcatatggctcagtttatactggtgggacagaagaattctcatcttttggtataaatgcttcaaatgagaatattgtcaaggtctcaagggattcaaagtttatcttccgtcacctctagaccctttcagaattataatgagaaaaaagtgttgaaaataaacagaacttatttgtatatggagccagttctgcatcacagatgaccaaaaaaagcagaataacagtttgctgacaggatgatttcctgacaggacatgttggcatacctcatggttatgcctttgcagatatttaaaactgcttttgactgttaatatgaaatattgctacatttcaaaatgccatttctgaatcttcctcaaatccttgtaataaaagagaagcagcatgtaatttggatatagttccaataaatcctatgaactgaaaccctccgaggttccctgtcatctactgaatcaaatccatgtcttttcacttcactctttaggtttagcaactgattccttctatatttcactaactttccttttacatcattcttgaacagtcccgctacttcagccatgttatctattgtgttagccatgatatctattcagattatcttactgacccgtgtctctgcctctttgtgttaattatataataaatgggtcctaaagtattaaaagaaaaaaagacaaagctctttttcccagtcttcacagtcccatgaatatgtatcccctttgatcctgcccagtagctgaagtaatttaaaaggaggaacaaaattatgtaccccaaaaaccagttgctttgtttcccaggggacaatcatctatgtgacacttagccagggagtcagtcttttccttctgatattatgtagatcctcaaaagaaatacacaattccatttggtgaagagttatttaagaagaaaacactagaatcaattctcatactatggtacagtttttaatctagatttaggaagaagcagcaaagggttgaacatagaattgagcaaagtgggctcagagatagaccacagaaatagaatgaatgcgcagaggcaagagctattttcagactgagatcaaaaagtcatgtagcctcagaagcagcaagaccaaagaattttgaaactgacctagcttttcctagctaaagaatgtccacaaagagacgtgatggtcaaaggtaaaattacatttgtgtaatacgtatgtagttagctgtaattgtatattgtttcataaagttaatttaagaatatatatagcaaattatttaaatcaaatttagccctactaggtgactcctaccatttggtaataaattggtatctaggaagtgatggactgtcactgactgtggttacctatactcctagctaactgatgaaggggaaagagggagttttacagaaatgatgaccttcaaaaagatgcctgaaggtgcaacatctacactgcaccactataaacctccctcctccatttatccacttttctggcttctttcccttctccaatactgggttccagacttacctgtacaatatatacattcatactcatcagcaaaatttgtaaaatcatttatatgaagggatgtgttgtataaatgtttatataaggaaatattacctctcttgttagaaacaaaacccagaccatctgtggttttggcactaagtggaaaacttcctagttgatggtgacagtagtaaatcaagatgacataatggcaagggagggtgaaatgtaggggcagagtttactgcttggttgcctcccaccaccatgataattatctttacatcacagggttgcaaataaggactaaataaaaaatatatgcaagctcagttagcagagtacttggcacatagtggtcaacaatatttattgtcattaatgttcccacatctccatctacagttccacctcacctgagctctagataggcatgtgcaattctgttttggcctcgtcaaaaacttacctcactactcatctgaagcctttgacttgattcacactttcagcacataaccctgtctctcatttttcttgggtgagaccatcaagtcataaactactttaacttctcaccactatattttgtaatttacttcctgtcttagaggatgcagtgaacattcccctttcaaagcctttccttccaactgagatccagaaacattctccagttgagccttatggcaataaactcatctacattcacttgcactcacccttcaaatccttgtgagttggcatctttctctaatattattgaatattattgaaactgcttattttaaggcagtggatccctatcttggatgcacattggcatcccccaaggatattttttttaaatgcctgagtcccgcccactggaaattctgatttaattggtctggggaacagtcttggaattgaggtttgtaaaactctccagatgattttaatgtccagtcaaagtggacaatctctagtctaaagtcagcaatgaccttctaaactggctgtgttactgtctattatttgacaatattagttacatcttcctgctgaaaagtctcctcctttggcttatgtgatactcattcctttttgttcttctatgacatatcaagaccacttcattgcttctgcccactattttaaattcagtgcttctgagggtaagataattggctctcattatttctgattgtatgtattttcactggtcatctcttttactcccgtagtttcatagaatagaaccacctatttctatttctaagaaaaattacattgggattttgatagggattacattgaatctattgatcactttgggtaatatggacattttagcaatattacatgtctccaaacacatgcataaacagatacaacacacgcgcacgcacacacacacacacacacacacacacacagacaccatttctttaaaattgatctaaatttacagcagtctatctgtccatagtagttatgacagtgggctctaatttcagactgcctgggttccgatgctagttctatcacttactacctctgtaatattgggcaagttacttagcatctctgtgcttattttattcattgtaaaatgggtataataatgatcccaaccttatagcattgctgggaagattaaataacagaatccatttaaagtgccttacttccggtctgttgttgcataaatgctagatatttctctcataatcaatgtcaccatgccctaggcagaatacacggcatggttctagcttctagacccccatggtactttacatataccactattatcacatcaatcatattgcatcactattgctgattgacatgtaccttcccaactgtactatgaatttattgagggcaaagattgcttcttactcacctataaacttcatagtttaacaaagaactttgtacagataagcaaaccaaagtttagaaataggttttgtcctttttcaactctaattgattgacaatgcttgcgtgaaatgccattttgaaagggatgtgaggctgaagctggtctcaacaggggaaagagcatcatgattaattagggatgtcttccatgggacaaatagagggagcagtggcacaagtgtcatggacattccattccagttttagatgctgtgtaagtaaatacttattgaatgaattttcatgaacaaatgttactagttgaaagacatgagccaattagagttattgttaaataacttggctaatttctcttacagtctaagttctttcagagcagtcattatggattttgtgctagaaacttgtgacatctagaagcatagtatgctcacagcagacaattcattaaatgtgatcaaattctgctgaaattttcatttcataggttttgccacattaatattacacctgccatctgtgatctttgccatgtaaatacagatcctgagattaagagttctttcaaggattttgaaggaactgatatctaaactgtctacatataagcaaacaatcatttaaactactgctaaatgcctgatataagaatagagaaatgcacttctcaaattttgagggcaaagactgcacaggtggcagtgctgcttaagcatttttccctgtgggatgaagtggcttatcatactggggcaaaaagagagaaaatcatagtcactagggtacatttatttcaagattaacttcatttacctagaacagtacctggtacatagtttacattaaataaatgctgatgcataagtgtataaatgaacaaatggacggatggatagatggatggatggatggatggatggttggatggatggatgaatggatgacagataaactttgcttccatgtaatcttggcaaaaaaaaaaaaattggcagtttgggctgggcatggtggctcacacctgtaatcccagcaatttgggagcctgagtcgggcagatcacttgaggtcaggagtttgagaccagtctagccaacatggcgaaacttcgtccctattaaaaatacaaaaattagcaaggtgtggtggcacacgcctgtaatctcagctactcaggagactgaagcaggagaatcgcttgaacctggaaggcggagtttgcagtgagccaagatcatgccaatgcactccagcctgggcgacaaaactccaactcaaaaaaaaaaaaaaaaaaaaaatggcagtttaaatttttttccaccagatggcaataatgtgagatataggtttaggttgtaatcctgaagagaaaaacaaccaaccaaccaaacaaaaatgctattcggagaaaaagaagcgttaaaagaacagatttagatgacagaaatgaaatgtttgtgtcatctgtaataccttaggagtctatgaccttgtgagacttgtatcaggtcctcaacatacctcctttttatgcatggatgacttctcattcataattactttgcagtaaaatggagatattcaaaaactaatcttatctatataaaattattggccaattcacacaactaaaattattacccttggtatatatatctccatgcatttatattttcatttttaatactaatttcttagttaattgatgcctcccttggatgtgaggctgcttgggaaaaatagctagcctgtgtgcctctaggaaatcttcccctgctattcaacctgccaaaagtcatatgaaataagcctgcctagggctcattcatcctgttagcaaagaattgtgaataatattatattagtgtccatcccttaattcaaaagcttttggaaaataagaaattcagttttagagtccagcattccacatatacatggagtagggcactgctgttttggaaaataaagataatatgaacatatcttcagctggtatagagtattttctcttattaatacttctcaaaacaagtcttcaattggataaaacattaacttccctaaaaagtggaaataagcagactcaggaatatttcatggtaaattatagagcatatcatctgcccttttctaatgataatcagaatgaaaaggcgtttaacctccttataaacgcttggtcactggaggctggcaaggttgttgaagaaaatgaagggaaactaacattttttgaattcctgaagatcatcactctcatgatggcattcaatacttatcacaacctcctgacataggtatggaagacagtgtggtatagtgaagaatgggggctttagagccatcgacttgatttctgatcctaactctcacctctcctttagctgtgcaacctctggcaagttatgtctctccaagcctcagttatctcatctgtaaactggggataatagcgcatacctcatcaggtgtttatgaggagcaaatgtaaagcaccttgcagagtgctagaatagaataggtacaattccaaatttatcattattattgtgatgatggtgatgatgatgaagtcaattttgcagaagaaaaagcagattcagagctgaagtatcttgcttaagtttacataactagtaaacttaaaaggcatctagtaccgtacctggtaccatagcaggtgcccaatcaacattttgtttgcattcatccttcctgatctaaaactcaattattttttgagatcttcttcctttaaaataatgagttaggctcaactttaccttggttgatgcaagattcaactactgacatacatttgcaaaaattaaaaacatttttttctgactcacaggtggtaatacatggactaagacaataaagaggattccagatcttacaaaaaaagatgataattaggcccactatttcgcctaacataagataagtcatttctccttcaaaggggtacatattttccctcctaggtgtctctactgattggcagtcagtggcagatgagatactgtttccagacttttagttcccgggtctgtatactttattttatataagtcagtgcactgaaggatggtgctggctaaaaatataaattggttcaaaatgtgtttatgtcagttcatggatgatagattcaggtttttgtccttggcctttttctagtctcaaccttctatacactctccctgggtaatctcatccatcccctggcatctctattctgagacactgatgagctcaaatctacttataacaacagcccagatctgttctgaatcctagacacacttttccaatcgctgatgggaaaagctacctggatgtcataccagcatcttaaacttaacatgtctaaaaagaaactcattttcccttccaaacctgctcctcctgctgtgttccttctcttggtaaattaatcactattctctcagtttcccaaacttaaaactttaaagtcatccttgactctgttatttccttcaacctcaaccagtaatcaattatgaggttctatcaattcgaacacacttatatctcttgagtgtgtctcttcatctccacagacattgtttggacctctaatgcgattcttagctctagcctaattcagtggcctcacagatttttctccctgcatcccattatttccagttgcaatcaatcttctacactgctgcctacacttctacaattcccctgtatacacttcttatcctaaaaattacaattgatcatgaaattctccactaattgaaagctttcttttctgatgcttaaagggaattttaaaaaactcctaaattgggcatgcgcgacttcacaatctggctccaacattccttgctctagccatattgaatgtttcaccattacaggccttcttcagagctgtatactttgcacttgcttatctgctctctaggaatgtccttctggtaaacttttattcaaattttaacttagatcaaatatcacctttctatgtactctgattcctctaaagaagttaattgtttcattctgtgtacttccacagcaccttttttatctgtaaaaccacttcatacatttaattgcaataatgtgttttgagtgtctattttctccactgcactataagtttcctgcaagcagtcatctccatcctcagcattggcttcaaggtctgacacatattaatttgtaaataaaagcttattgaataaaaagaatccgttgaaaggacgttagaatgacatcatagagacaaacttccctcaccccaaattccttttgatgaaactgcacagacaaaatctgaggctggccagctctttatactgactcagcataaaattgcttatgtttttagaactgtcaccagaatgcattcttatttctactcacaatatattaggtcaaccactctacaccctaaacccacaacccataaatcacaattgtaaattcatcttctgtaaagacaaacttacagataagtattttaatgagaactaggcatttcctaaagccaaaaacatttccataggaaataatttcccaattgtcaggcagaagaagagaattattttagaacgaacttacatgatattaactgaaaaaaatgggaaatattaaaatgaattccttgaaaagaaagatataaaacttttaccaattacgttaagggatgaaaatgagtaatatagttaacatcacaaatatttaatgtatatttgttagaatgaatatcttaaattttggctcaatttaaggttgtttttaaaatgtaagattccagtactaattagagtactgtaattttcatttgtaataattgcatttgacatggcaatatttaaagaatagttttcaatgcatgataagcacttatatttcagttgatagcaactaattccttaaatgaaacaattataaagcatatattatatgcaaaattttatggaaaatagagatctgtcatgatccccatctttattgagtatacagtctaggagaatatatataaccataagaagaggttaaaaagaggccgggcatggtggcttatgcctgcaatcccagcactttgggaggccgaggcgggcagatcacatgaggccaggagttcgagaccagcctggccaatatggtgaaaccccatctctactaaaaatacaaaaacattagccaggcatggaggcgcgtacctgaaatcccagctactcgggaggctaaggcacgagaatcacttgagcctacgaggcagaggttgcagtgagccaagatcatgccactgcattccagcctgggcaacagagtaagactctgtcagaaaaaaaaaagtaaaaagaatgtattttcaaagttcacagaggaagatcacctacacagtgaaacagtgatgatgttgggggtgatggtgaggcaaggattcagtgggaaaggatgcttgtaagctaggccttgaaagatggttgaatatgcataaagagagatagcagcaaattgtatcccaagaaagatgtaacagcacagcaaagggattgaaaagagatgaggtgagatcccggtagaccagtaaagaaacaaaaaacagtctaggtgagatataatgagagtaatgatcatgaaaatggaaaggagaaaatggatttgagagatgtagagattaactctgctggatgaggaaactgattagatatagtaagtatgtgtggttgggagaatgggagcatcattaacagatgtaggtgatacaaggaagatgagtgggattaggagtgttaagatgattgcttccactttaaatagactggtttagaggtgtcagtgtattattcatttggaaatgccggggaggttaactgaaaatttaggactagagtttaggaaggaggttaggtctgaagataaatatttgaaggtcactcaaatagatgtgatcattgaagccatctgagtaaaaatatttcggggttcaagcagtaatcttcaatcttgagcaggaatcagaatcccctggggatttgttaaaccacaaatgggtcccacccccagggtttctgactcaatatgtctagagtggggctggagaatttacactctaaaaaaattctcaggttttgctgttgttgctagtcaagtccacacttggaggacatagaaaattaagtctattactttttatctcagcattaacttattcataaaaaagataacttgtgccatccgggcgcggtggctcatgcctataatcccagcattttcggaggctgaggcgggtggatcacgaggtcaggagtttgagaccagcctgaccaacatggtgaaaccccatctccactaaaaatacaaaacgtagctgagtgtggtgaggcgcacctgtaatcccagctactcaggtggctgaggcaggacaatcgcttgaacctgggaggtggaggttgcagtaagccgagattgcgccactgcactccagactgggcaacagagtgagattctgtctcaaaacaagacaaaacaaaacaaaacaaaacaaaacaaaaaaacaaaaaaccttgtgccaatgtcagtatcttctacgtcattaaaatagtgtctaacacagtttatctatcaattggaacaggaaatcgtatttctactagttttttgttagaaactgtcttgtcaatccataattgagaaactaagactgcccaaagaatatgctccaaaatatggctattgtaggaagggttctaaaaaattcttactttcctttcagactcggctacacaatgtttctacattacggtgatagactttctggaaccctgtttggtggtctccactaacctgctagctttgtcagcagccaaatatttatttgagacttctgtcccatataagcaatggcttgaaaagcacttagctgtttacttttcatcttactataaattatttatccttcagtctataaatggctatttgtaggattacacaaattttgaatgctctgataagaggactgcagcatccaaattcatgcataatccataaaaagcacatgtaacctacaacctcagctgggctgacatatgcaatagattctctgagcatatataagcagtgcgaattattaaccagttaacattagcaaatttatttttgaaacaaagtttatgcacacaagcattctctaatgagaaataatatttgttataaagatccaataaaaacataccttgagtagatttttctacttctttcctctttctactctggctattgtaattcatcctcagctcctggttatactcgtgcagggtctccctggagttgtatgactgtcttggttttcttccatcttcactctcatcagaagaactggtgtaagctagatccatttcatgcttgacttttggtagaggctggtagggtttgcagtcagtttgctccatctctgattaagcaagctcagtttcatgaaaaaaaggatgaggaagtcctttaatgcaagcagtcctggaagagaaagggaaaaacacaagccttcttagatttatctttttgtgaggaaatgcatctggcagattcacaattggtcctgataataccatcaaaggagagaagtaaaagacaaactagatgacatgaagctagccggaggcaataataacactctgtgttacatgcatacattgtcaagcattaaggattaagctggaggttgcagcatcagaaaatactcaaggtaaaagagagacagccttcaaaaatatttgtattggaattcaaatagaggacaacgttgttctatggtgtgtgcgtgtttttaatgttaaaatcagtggttagattaaaaaacgttatcagatttgaaagtggtgaggagtacaaagattaaccctgcacattccacatttgaaatgaaaactggtaagagaactacattcagaaagaacacattcttgcttctggtttaatattacatttaagacaggggctctgagtaagggaaggattctgagtgagagagctcatggaataaagtatccttgagggggactgaactctttgtgctcatattgtggcttttgagcctcaggcctgcagagcattcttaatgagttaggtggtggtaaatttttgttcttcatagtactgagaggatgtaaacacttctggtgagtatactggtacagcaacagcaggatctaaatcagttttggaaatagcaattttaaacttcatgataaatcaccgaaagaaccccctttccccatagaatgctgagctaggagccactgaaggtcttagggccagtagaggcattaactgctctacttagcacggagagtttcgagacgatcaagtgtcatctgagatgtcaaagtcctctgtaaatttaaaagccctgtaaaaatgttcttattttcattctttacattattttgtcatcaccatttcagtccactgttgcaactttgcaacttggtcttttcatacaatgtttaaaaatgtagttagaaaccaattaactttatgattttattttgcagtgaaactgactcttttatttttcttcagctcttcaccatatgtattttcaaagaaatctatagacatccaaatggtggctcctctatcatgtacactatctcatattttggaattcttattgcatttatgccaagcacatagaacacagaaatcattcaaaaaaggcttttagcttttcaaagtatgatgtaggctgatttttattgatcaatttgattgattgattgattgattgatttagagacggagtcttgctcagtcgcccaggctggagttcagtggtgcgatctcggctcactgcaagctccgtctcccgggttcacgccattcttctgcctcagcctcccgagtagctaggactacaggcacccgccaccatgcccggctaattttttttgtatttttagtagagacgggatttcaccaagttagccaggatggtctcgatctcctcacctcgtgatccacccgcctcggcctcccaaagtgctgggattacaggcgtgaggcaccacgcccggcctatgtaggctgattttttaaaaaaggcttacacatttgactgatatatgttttaaatggttcttcttttgtggtatgaacagtttcacaagtcaaggtcttcttttcctaatcaaatgtgaaggtcttgaaggcaggatgtgagtcttaatgtctctttatatcccccacaccgctaagtattactttaggcacacacgtagtagaaactatttaactcctgaacctacaaactgtgtatggagacacctagtttggtttgaactaatatgagagatgagcatgcttaaagagaaagcagcagatatgaacatatacatatatatatatatacacacaccaatgattcaacaacaatctaatctcacgccagtatattggcttcatatactgtctacacacccataacttctcagtttatagcttcagcatgggtcttgaccctgagccacaactttgaatatccaactgcctactcaatatctgtacttgggtatctaaaagatacgtcaaacacagtatgttcaaaagtgagctcttaattcccacccctttccaaacctaatccttccataatattctttatattgatattaatagatggccacaaggctcttctgtttgctcaggccaaagaacttgaagtcatttttgactcctgtttttcacatcccacatgcaatccatcagtaaatcctgttggtcttgcctttgaaaggtatccagaatccaaccagatctcttcaatttcccactaccacatcagttcaagccatcatatccctcctggattattgcaattgtttcctaattggtttccttcttacattactgccctccacaccgcagccagaataaaactaagtcatatcacgtctctcctttgctcagaagcatgtaccctactctacctttgctcatgtaccctagctgcactaaccctcttgctgtttgtgaaaacaccaggcatatttgtgcctcacagcctttgcaacctcccataaaaaaataccaaaaactcacgcctgtaatcccagcactttgggaggccgaggcgggcggatcacgaggtcaggagatcgagaccatcctggctaacacggtgaaaccccatctctactaaaaatacaaaaaattagccgggcgtggtagcgggcgcctgtagtcccagctactcgggaggctgaggcaggagaatggcgtgaacctgggaggcggagcttgcagtgagccgagatcgcgccactgcactccagcctgggcgacagagcgagactccgtctcaaaaaaaaaaaaaaaccaaaaaatggtacgtctcgtctttcttcttgtctttcaaagaacttattaccaaattacacactatatattttttatttatttgcttatcatctgccatctgtctctgcccactaaaacataagctccatgaagggaggcatttttatctcttctattcattgctatatgattcagaaaaagcatagtaccttgcatatagtagagacttggtcaatacatgttgaatgaataaataaacaactgttgaaaactctcaagaggggctggagagaacgtggaaatgcataagacatagtctcggcccctgaggaactcatagcttaatatacacaataagtaaacaactctactacaaagcagaatgaagtggcttgtatacacaaaagacaaaaacagtaatgtttgagcactaaagatgaagatattggaaaaggattgcacttgattcaactagttgtcaccacaaccattgaaattccattgagcatctataacaccagttttaatctctttcttcttaggtttccataacatgatcttcaggagatgctatggaaacctaagaagaaaggtggacagttgtcttactttgctacaaacagtgcaaattgagaactgtaccaatagcaggcttccagagatgtagttttacagccaaggattagactttcacccagaaaaggaagcatctataaaattcacctaacgtctaaacaggtctttcctttctacaaatgccacagcttccccggtccatcccatatccagccacgtcttttcttttcatggaacgccgatgattcatacagctttaatctagccccgagagctttcttaagctatgtgcacctatttcaactgtaaagtgggcagctttactcgaaggtcccttaggtatggcaagtcagtatttcctccctcccaaaatgtgttcatgttctcaaacttccccatctctgttaatggccacattagtagttcaagtcagaaacctagaacttaccactcctccatccacacaagcatctagctaattgctaggtcgcattgcaatctccagtctctctcttcctttccatcccagttgccactgctttagctcagtccctcatcagttctgcctgaactgtagatgttccttcccccatacccttcctgctccaacccatcctccacactgccactagggtcatcatcacaatgaccaatgtaaagttcttcagtggctgtgagagctgaactataaaagaaatgtattagtggactagatactggaaacaacaagggaaaataaatttgacaagggtagttgcattattaaaaatatacaaagatagtctcaaatttctaagctgctcaagaatattaaatactcaaagtagagtttaggtaaataaaaatggttgctgagtgggataaaacatatatacagaaactttgaaaaacgtgcttagtttttctgttaaagtaaaacaacaccaaaaaattaaatctattaattaaaatacaaaaataaaattaaaaggtaaaaataattcacctaacttcatttcaacgaattcatttcaacttaagctttattaacttaacttcatttcaacttaaacttcagttgattatgaatctctactaatcttaatgccactcaaacctaacgatttaaatttaaaaaagaaaaatgtctcactttgaatgctgaatgttgtgttttggcaaatatgatttatcatgttaaaatcacccttaattttatgcatggaaacctaggcattctcttttccctccataggtttatttgtaacgagagagagagaaagagagagagactttcctatagccatctggaaaccctttcaaatttccaatcataactattcatagccatgaatcagctaggaatgtcatatctattcaaggttattgagtgcccttggaagcactcttccttcaaaccacaaaagtagtataaactaagagaaaataatcctttcctgctcctcgacactcaacgataactttttgtcctaaaatttgtgtcagtggacccaggtgacaaggaaaactttccaggtctctcaaagcatgtgatatggaggtgcacacaattatgtgtgcctagagttgtgaaatcataactgtgatatttgtcaaaggcttgagaaacagagtttgaattcactaataaatagctcatttttttcaaaataaaaaagcagaaaacattaagaaaaagattaatattttaaatccaccaatggttgaaagcataataattctgaaagaatgttgttccaaatactctatggtaaaggataggttcccatgtgcttaattgactttttcagtcagtgcccatcatggcatcctgggggtccactgtcaagtaaatgttatttagacatgatgatgaaactgtcaacttacagaaaaatcaaatatatataaaatgctattcacatccaaataatatcatttctatattattttgataatgataaactctaagacaaagcaaatgtgtatggaaaacacatgctgctatggaacagagtgcaaaacaaagaagtcaattatagtttttactgcagaagatgccttcagatagtccacaaagtatgaattcaaatgtcaacatctgtggcttgctcttgtgctttaaactctctacttgctaacaagacaaactctaagtgactttagaagacagccatggagacttatgttcatttatttagtcactgtaaggttagggagagacaacttagtatgtggaaatcattgaccttcaactgacagaattatcacaataaaagtaacagcagcagcagctgtagcagctaactcataaagcagttatcaggtaccaggtgctatattagtgcttttcctacattaactcatttaattcttgtagcaccctgtgaggtaggtactgttttaaatgcccattttgcagataaagaaaaccaaggaacagagaagttaagtttcttgccaagatcacacatgtagtaaacggcaggactgagatttcaattcctacagtctgtctccaatggcccgactcttaaccactcgtctacactgctcttcagaacatgtggcagaatgatcttaggaaaatcacctcccctttctcagggcattctttttctaaatgtaaactaaggagattggattatctcaaagaactcttccaactctaaaattctacaattgtttatgaaatgtgaagggaagtttagattgatttgcaaaaaataaaatgatgagtataaagaccatgtttacattagttatcattccttctcctcttccctttcttcctttgtcctcctctccctatccctagccttctcacacatactccaatctactgtagcatagctgaactaaaatattgttttgaatccatggacctgagtatatatctatgcactggggataacctttcctccactatccttttattttctttccgtttctcattcttaatcacatacactgccccctcaaaatgggaacctgtttcctggtttaccctcagaaaatacagtctggtcctactcacagcagatgcttatagtttggaacttcctccaaatagtctcactccacctcagaaaaataaattaaagggtacatagaacattgcctaaggataccaggccttcatagcacaacagatagaggaaatgaggccacacagtgcctgaggaatagctggcaaaggaggatagtactctttggaattattacaataatttttccttaataaggacttattacattaatgcagattgactgattcagaaaacactgtatttaggaagctcttaaaagaaaggtgaaattctgactgattctcctcttaactttctttgtttttctaagaaagcacttaagaagtgaactgctgtgggtgtgagaaaataaaagctataaaagtacaaacaacaggtgctggagaggatgtggagaaataggaacgcttttacactgttggtgggactgtaaactagttcaaccattgtggaagacagtgtggtgattcctcaaggatctagcactagaaataccatttgacccagccatcccattactgggtatgtacccaaaggattataaatcatgctgctataaagacacatgcacacgtatgttcatggcggcactattcacaatagcaaagacttggaaccaacccaaatgtccaacaatgatacactggattaagaaaatgtggcacatatataccatggaatactatgcagccataaaaaaggatgagttcatgtcctttgtagggacatggatgaagctggaaaccatcattctcagcaaactatcacaaggacagaaaaccaaacaccgcatgttctcactcataggtgggaattgaacaatgagtacacttggacacaggaaggggaacatcacacactggggcctgttgtggggtggggggaggggggagggatagcattaggagatatacctaatgtaaatgacgggttaatgggtgcagcacaccaacatggcacatgtatacatatgcaacaaacctgcacgttgtgcacatgtaccctacaacttaaagtataataataataaaaaaaagtacataatcacctaatctcccccataatcctaccagcctgtaagagtgactactgtcattctggtccatttcccttcagtcataatatgcacacaaatttcttcatgttgcttccttcgcgctagatgattttttgcatgcttctacacaatatctgtaacaatcatttttagtggctgggtagagtgaaggcacagtaatttacatatgcattccccaattgttggctatttacactcctccctcaccatttacaagtattataactgaagccatataaagataccatgaacatcttcaatttttttattattatttccttacagtaaattccaagaagttgaattaatgagccaaaagctttgaacatttttgtggatttaggggattgtaatgatttacactgccattagcaatgtgtgggaacactctcttctttcattgtacccttgtcaactttgagtattatttttaatgtctatttaaaataagtaaattaattgtgcttttagtttgaatttccttattagtgaggctgaatactttttctgtacgagtttgctagttatatttccttgcttattaactgtctatttatggggcttttgcacatttacctattgagaacctgagttttaaaaaaattaaatcgggctaggcgtggtggctaacgcctgtaatcccagcactttgagaggcctaggcgggcagatcacgaggtcaggagtatgagaacagcctggccaacatggtgaaaccccgtctctactaaaaatacacaaagtagccaggtgtcttggtgggctcctgtaatcccagctattcgggatgctgaggcaggagaattgcttgaacctgggaggcataggttgcagtgagacaagatcgtgccactgcacttcagcctaggtgacagagcaagactccatctcgaaaaaaaaaaaaattaaatcatattgatgccataaaacaagtatattaaccctttatgcatagtatttgttgaaactatctttcacagtctgtttgccattttcatttttgttctttttgttgatgaatgttactctaaaaggaaaacatggtcaccaactggacataaacaagttgctttagaaaaatatgacaaaactttgtaaaaccaagagtttttccaaaaacaatttgttagtctaattattcagtggctgcttgattgacttcatttagttagtcagaaaatgaattatagtttgattgaattctaacactgaaaaagaacacatcagtttgtgtgtgatgacagcttacataagcatataaagcttaaaggactagtctgattttatcatggaattggtcagttcttttggtttcacgtggaaacagccataacattttagtatataaaaagagaagtaaatcaccactttttaggagatgggctgagaattttatgtactgaatatgggacttcttctccagaaaatgatggctttcaaagtagactgcttgcatggtacatagacattctattatgtcaaagagataacactcaagagttgaactgaaattatttactgctatcttagtttgttttgtgccatcttagtttgttttgtgttgatataacagaatacctgagacgggctaatttataaagaaaagagatttatttcttacagttctggacactggaaagtccaggtcaaggggacacaactagttagagctttcttgctgtgtcaattcatgatagaaggtaggaaagcaagaaagccatcttgagttaatttttgtataaggtgtaaggaaggggtccagtttcagttttctgcctatggctagccagttttcccaataccatttattaaatagggaatcgtttccccactgcttgtttttgtcaggtttgtcaaagatcagatggttgtagatgtgtagcattatttctgaggtctctgttctgttccattggtctatatatttgttttggtaccagtaccatgctgttttggatactgtagccttgtagtatagtttgaagtcaggtagcatgatacctccagttttgtctttttgcttaggattgtcttggctatacgggatcttttttggttccataagaaatttaaagtagtttttttctaattctgtgaagaaagtcaatggtagcttgatggggatagcactgaatctctaaattactttgggcggtatggccatttccatgacattgattcttcgtatccatgagcatggaatgtttttccatttgtttgtgtcctctcttatttccttgagcagtggtttgtaattctccttgaagaggtccttcacatcccttgtaagttgtattcctaggtattttattctctttgtagcaattgtgaatgggagatctctcatgatttggctctctattattggcatataggaatgcttgtgatttttgcacattgattttgtatcctgagacgttgctgaagttgcttatcataaaaaaggatgagttcatgtcctttgcagggacatgga

SEQ ID NO: 432 - DNA, 42062 bp, Homo sapiens
ctccaccttacttgtggtgggcttcttttcaaagggacaccagatactgccatctgtatgatacatgtggattctcaacagtcttaatcaacttgttgcttttgatgtcccctccttcttcaggaccaaatagatgcattcttgaaacaattttaaaccaagaactgactttttcccatttttagaatgtactcattataaaacaaggctatttttgcggtagtcagacaaaggcacagcctccttcttttagatgtattttttaaacacttcatgtttttaataaggagaaaatgaaatctatatttcaacactattggaatatatataggcaacatgggtggaatggctattccttgccttattatgccatggaataaaaatactcctactcattttccctctttaaataatgtaaagttatgtatagataattcaacacaaaactacttgccaactcaaaaaagattttacaaaagatataatatcttaatatgtggtgttttattcatatattttgcagagctgctcaattaattgaagtttatattgggggattaatcagacataaggaagaaataaaaaacttacaatgaagggaggcaattattaaattgcttctgctcagcagaaaatgttttcttcaggatctcaaccatgaatacctaaattctgggcagggaaagcaggagtataatagaaatactaatcaaaattcacaggacgttcacactgctttttcttttaaaaaatgttgtatttgatacatacaaaagaatatattggcatataaatttaaaagtataaaataataaaacttacctatcaaattaaaaacattaccaatgttcatgacctacctattccatctccctgtcttaccaaaaaaggtaaccactatcacaaattttaagtatattattacatgcctttaaagaaaaagttttatccattatgtgtgttattcttaaccaatatgttgtttgatttacatacttgattttgagctttatttttgaaatggtacaatacaacatagacggctacttgtttttttctcaacagtttaattattctctaaaatttataaatgctactgtatgcaattatattcatttgttttttgccactgtataacattccgctatcacaaaataccaaattttttctattcattttcctgtctattgactaaatgagagttaaattagtaatatatttaatttgcatttatgttttgttttaattttcctgtctattgacaggaaaatgaatatttgggttttttcaaggctcgtatgttttcatttaaattttttctttcataattgagattttattcaatcagtacatagccattatggataatttgtaaacaagtcctaatgtaagttttctaaagtattaattattccattcttttctaaacagtaattgtagtgactttccaacttaaagctagaggcaaactttccttaagaaaatatatcaggccctagtaatttcaaatattgataaactgttaggtttaaagccccactaattaacaatttagtatcatactgctatacttcaaaatttccaaactttaacaattctgatatatggagagccaaaatgagggagcagttttctttaggagcaattctatttgtttttaaagcaagaacatggagataggctttaagtaatttaaaatattcagagatattagtggataattgtgactgctaatggccattttgttaaattcataagatacaaaaactgcccttcctagcagccaatacagttaacacccaagactgtcaaatcctcccttatgttgacatcttcacattttaggttgtacagaaaaattacaggcatatcatttctttttttaaagaaagtacatacatgcaggtgtgcactcacacatgcacacttgtgcacacacacaacttccttctaaaatatgtgtttttagagctatttaaacaatcttttatttacaacataggtaataaaaatatttatccagattataatgaagaagatacaggaaccataagacttggtaactatattaatcagatttgattttttttctctccttaattaaagactagaccctcctcagttttagtttctctactttctgcaggaaagttgtctttagtttcttagatggccatttcagcctgtttgccttttgctccccattttcctttgcagttttttggctgaagatttatcctttcttcctccctttttggcttagtttcaatttttgtaggaagtggctaggaaccttgccgaactattcaagagctcctccttaactctcacttagctaatgtgatcatcatctttagtttcctggcagtgttttgtggtggggagcacagatgcactgtgcaacccttcacaaagccaggttgcattgttgctgtatctaagtacctcgcataagcccaatttatatactcttcatgtatagtattttaaaatataaaccacagaataaataatcattattaattagtaaagctaatgactgtttggtgctgtggtttcaatgttccctccaaaacccatattgaaacttaatccccaatgtggcagttattgagagatggggcctgcactcatgaaaaaatgtgtccattaacagattaatgagttatcatgggaggggaaatggtggctttataataaaagagagatctaagttagcacattatcatgctcagtcctcttgccatgtgataccccacactgccttggaactctgaactctgaactctgtagagttcccactggaaagaaggctttcaccacatgcagtcaaccttggacttcccagcctccagaatggtaagaaataaatcccttttctttataaattacccagttttaggtattctgttataaacaaaagaaactggactcagacatctggatttatctaaatgcttatccttttatctcatcctcacttcttgtatgtgagaccttcctattagggtcttgttcatttctcctggataatccattgctggcatggactttttccatttttaaaatctgtgactgtttttattctagttcttaacagatcactcttctgggtacacaattttaggtaggaagttattttccttcagtaatttcattactgttgccttctagcttccattgttgctcttgagaaatggctgttagctaactgattctttttttatatatgatgtcttttctctctggctgcttttatgatcttctccttgtcctaagttaattgtaatttaactattatgtgtctagtagtttttagatatctggcttgggatacactctgattcctgtatctgtggattcatgtttttcgtcagttttgctaaattctcattcttaacatagaatattgcttctcctccattctatctattcattccttctgaggctataagatcttctcattctgttcaccttatatcttaacctcttcttatattttttaatctcctatctcattgctacatacagtaagtcctcacttaacatcattaacaggttcttggaaactgcaactttaagaaaaatgatgtactgtataatcaaaccaattttaccataggctaattgatacaaacaagagttaagttcctatagcatacagtatatcatttcacttaaagatgcggtttctaagaacctatccatgacatagaggaattactatactaggtaatttcttcagttttactttccacttcactaattttatctttaactgtatttaatctgctgtttaacctagccattgagctttttaaagtgttttagtgctaaatttaataaatatacaaaaaagaacataaatatgtaattatatagcaaatatacatgtacaatattccaagtcaacaacacaagtaccatagaaatctgtgtgccccttcttaagtatacctttcttcatctttctagaaataaacatttgctagacttttatgataattgttttatatttttgtcacctatatataaatatttagacaatagtttgaacaaattgtattgatagattcttttgtgtcttagttcttttgtgtctttctgttttatttaagattgactaaaattattgcttgtggttctggcttattcattttcattcctgtatagtcatattttaagtactcactagtcacaagtgtctagtggctaccatattgaaaagtgctgctccaaccaaaggctggggcaaaagtaatttttgtttttttttttttgttttgttttttttgccatttaaaagtatggccaaaatcgcaattacttttgcaccaacctataaatataaataggaggtgaattgctcggtcataggaaatgcatatatttgactttaaaggataatgccaaaatgttattcaaagggattgtaccaatttacattcccaccagcaatttatgagatcttatccatggaattttaacttcaacatttctgtttttttaaatgtttaccagtttcttataaatgatataaatgaacaatttgataaaaaggcacacaggggaaatctagaagggtcctgagtgcaggagcttctgtccccatggagttggggtaggcactctactggcacagagatgtgttcaccaatttggaagcttcccaacatttctatttttaaattctaaaatatctctttaggttctttttcaagtcagtcttgtcatattgttactttcttggtacttgctcatttctgtgatttcatcttttgtatctaaattttatacatatttattttatactgtatatctcttataattccaatatctgaaatcattagactcttaatctgtttgttgttctgctgactcttacttgcagttgcttatttatttatgtctttggtgatttttaatagtctttaatttttaataattaatttctaatagtaaatattttacatatttatttgatctgagagtaatagtccaccaaacgtcctattaacttcttatactctactgtggtttcttgggggttgtaagaggataaaaatcatgcatatgggattgcagttgacaaatattaaaataattattcattctcgtttgtacagcagtgagtaaaaaataaaataaaataaaaagggcaataattatttattatgcttttttatttctccaaatttcctaccataaacacataatgcttttaaaactatgaaataataaaataatcatggaaccagaatatttgccaaacacaaaatcaagtagcaaaattttatttgcattatgaaataggattttaggtcacttcctaagaggctagttattcaaaattaaggtgtccccttctttgtgctttcctattccacactgtggataactctatcaatgcagaggcttaagaggaaatgatttctcgagatgatttttgaaatattgcttctgatagaagctagaatttctacccatctgggagcaccttagccccggtccagaatccctggctcaatgctggaatcccttcatcattagacataaccatgtcttgttattaaaatggatatagagacatgacttacgggtaagcatatttaggtatggtatttatacctaaggaaaggagcccaaaatgcagagaaaatagcagggtgaggagcacagaataaaaaagaaaaaactataactgggagttaattacaagggttggagataaaaacagaccttgaggcctattgttggttacttggataatttcccactatggctattctctgggatacggccttttacttagtcaagcataagacacaagcaagaatttccaggtagctgttttctccaagtgctcgatcctagagattagtactgacctagaatttaaggtccatctttgtcaaccctcccagaacatcagaagtcttccatggtttttggcatcctgtggggaataatggtcaagttacgcagtttgaaattaggaaaaaaaaaaaaaaaaaaaaaaaaggaggaggcggaggggaagcaggagcagatagaactatatcaaacagatgagcaaacttagaggttttaaatatttaaatattaaatagtttttgttaacatttcagcatttgggacagcacttgggcctgtgattcctctgaaagacttttctggagggtaagattttcctttggaaagggttgttacccccttttatttacttattttaaaggaagacaattcgataataaactatttcagtgggtgatttgtagcggtcagtaccgtttactgaagacgtttaaaacgtcacagaccgcagccaacgcccttcccaatacctgatgtgtgaatttccttcatcttgtggtttggcgtgggttttggaggaggagtttcagaaaacggtcaacatcggcacagttagggctttataaacaggctatccagagttcgactcctcctcctgcactggctagtcttgagagcctcttcccgggaaaaactcgggtggaaagaccatccgaggggagtgagccgcagaatcacgtaggggctgcagcgcccgccgccggctagccggtaatgcgcaggcacagggaggggcgcacgcggagaaggggtaggtacggcgggcttgcagcaggcaaggcaacctgcttccagtcttcagccgcacacccagaaggagggagtcgctggccgggagatcgggctccaggttttctgtctcactccacgcgcacaaattggaccccaagacacctcactccgttgccacttacccacccatcgtgggacatactcagcacacccatctgacggctgctcttgccctgcctggcattgttttctgagctctgctttctgagcaaggcctactcccccaacccttccccactgcggttaatatcttacaaacttgacagtggaactggggccaaagtgaccattaatttgccgggtagggtgggaatcagaatcctggtttatccgcttcatagatgtgtaatcttggcaggttatttaaactttctaagctactttttgaaacgtaaacacacattgtagaatgttaatttagcaacctcagatcagtcctgttttcgttttttccactgccttaagtcataaaagggcttccttacctactacacccagccaattgcaatggcaatccagctagcaattttaggtagtatcttcccatacaattcatcatatccatctttgccagattaaatttcttaaaaataagcttagtcattactccccatccccatctccagttaataatcattacaaaatgactcacgctgtcttcccaactctatctcatcctactcttctacacatattccttgttgactgtacccatctcctgcactttctggcattcatatcttcacttgtggccctttctccactacacagttcccctttccacatttctgttaaaatcctacccatcctgcatggtcaacttaaatgccatcttcaggaagccactcctgattttcccagtgtcctcattctctcttccagaccgaagccttttgttatgatacctatcttgtattgcagttgtgtacctctgttatcctttctacttatcttttccaattatacatcttagggtccttgagggaaagaaccacgactttttcatctctgtatcctcacaggtgctttccaaaatatgaactaaaaataaggggaggatttagaaagcttctgatcattttcatttcgattgaaacattcaaagtttcttttgagagtgcaatgttgaaattggtagctacaaattagttgtaaatggagagcaaggggaaggaaactcatttcttaaatccctgctcagtacttgcaatgtgacaggtgctttcacttatgtttgctcatttcttcacaattctgtgaggtatcataccatttacagatgagaaaactgaggctcaatagagtgactctgctaacgtatcacagctttgagtggcaaacctaacattttgaacccccttctgtagtattacttactgaaaaaagtagaggaactagtatttctacaaggtccttttcaagaatcaaaggagatgatgttaataaatgcccttcctaaagtatgttaaatataaggtattaattatggggaatatgacataataggtaaaacaaatagatatcataccatttctatcatttaagcacaacagtaccttgaataaggcatccagtggactagagatcaacaggcattttaatcttaatattttacactgatgtgcttttttttttctgagacagtctctctatcccacgcaggagtgcagtggtatgatatcagcacactgcaacctccgcctcccaggttcaagcgattcagcctcccaaatagctgggctaatttttgtattttttctagagacggggttttgccttgttggccaggctgatctcgatctcccgccctcaggtgacccacccgccttggcctcccaaagtgctgagattccgtgagccaccgcagtctgatgtgctttttaaaaatgacaactccaattttgtaggctgcatttaaaaatacagtaagaataaggctgggcaaggtggctcatgcctgtaatcccaataatttgggagacaaaggtaggaggatcgcttgaggtcaggagttcaagaccagcctggacaacatagtgagaccccatctctacaaaataacaattcactgggtgtgttggtacccgcctgtgatttccagctacttaggaggctgaggcaggaagactgcttgagcccaggagttcaaggctgcagtgagctgtggttgtgccactgtactccagcctaggaacactgactctttaaaataaaaatttaaaaagatgagcatttaactattgtattggcaggtggctgagtccatcacataccatttatataattaaatgttcacatgacaccagaatctgttttgcaacaaaaaacaaaaataagacatggtccctggtctgaaggcttccaatctgaaaggtaataagacacaggcaatgaaactatagggctataaaactatatttaaaaaaatttttggccgggcgcagtggctcatgcctgtaatcccagcactttgggaggccgaggcgggcggatcacgaggtcaggagatcgagaccatcctggctaacaccgtgaaaccccatctctactaaaaatacaaaacattagccgggcgtggtggcaggtgcctgtagtcccagctactcgggaagctgaggcaggagaatggcgtgaacccaggaggcagagtttgcagtgagccgagattgccactgcactgcagcctgggcaacagtgcaagactgtctcaaaaaaaaaaaatttatttttgcatgaaaaatttccaggactttggtgataagcagcgaaatcaatgccttaagtagattttgaaatggtatattaaaaaatggtactcatttggatactgtaagaaaatactgattaggtttctgggatataatggacaaatgattctcaactcatggcaagaagattcctccctgggtatcagaataatttgaggtggaacaaagaggctatgaagtttcagaacaaggtggtattttctgctcttgctttaatttcctttattgtaaaaattcagttaacatcaaagagagtgtctttttttttttttaaggaagaatgctttaaaaagagataagagcagtgccaacatgaaaaccaaaaaaaaaaaaaaaaacagtgcaacggggtgccaaaaaaaagggggaaaacatctgaaataagggggaagagtcaaaggtaaaaatcacaaagcaatggaataattaaaaagataacaaaaggttaactaggcaagttagaccaggggaagacttaatatgaaatttgtcctaggataaattattaaaatatttaaagatataatctaaagctcctactgaaatagaagataaatttaaaacaattttgattaaaaagagaaaatatactgtaaaatatttatttaataaaaataattttataatctatacagaattgaataaaaagtacaacaaattattttcacttatttacaaaactgcatacagtacaacttgcacattgagttcagcattctataaatatggccacataccaagatgtgaacatattcttgtcttatataagaaaaggctcaggttgtatgccacaaactttgaattaaattccagggaaatattgctttggtaacatgaacaatttgtaccacattccattaaaaaaagatttaataaaatccctcaaacagcacttttctacttgtttcggagtacacaattcccaaattagcacaaacaaaacaaagcaaaaaaagaaaaacagacagaatgtaaaatgaaggttgctacttttatgatatcacttccctttcccttccttagctagtgttcttttcctttcccttaatagtaaaggatggtgaatagaaaatgacctattcttatccccatccatttgcttctaggattcctgcttaaaccaaatgagtatgtcgactttgcaatcttgacacactattattaacactgttcagctgtgtcattctaaaaaagttaataccccagttaaaagcacctatctagattcttttcaagataaggcaacaaagtcagctttaaaatagttttcatgtctgacatatactagcagccccttggtagactgatttcagaattaaatgcatatagaacattttttcaagtaacttggtaatgaaatcactagcaattttaagcaaatattcaagatgatctacctttagaaacaaaggcagatttaaggtaaaaaaatgcaggaatcacatctatcctagttcctgtcccattgaaataattgaaaagaggctcagtttatgaaaaaggccttggactaatgcaattcctattgacatctttacttggataagaaaaacaaattaatataaaaactataaatagggatgaaattattaaaaaaagatttttcattttattttggaaataaaagggaatacaaatacaaatggcctagttacatctttagcctatatatgaacttttaatcttggaattaatagtccttcatattgaagatttaaagacaagcaagcgtaccttaagctttcttaagtctcttcatttagcaggcttcaaaacttgccttattttctaactaaatgagcttctctgggaagcatatgaataatgcaaaaacgtacttctaaacaaattttacagaaataaataatcgtcacaatgggaaccaagaacattcatatgatgaatttttttaaaataacttaaaattagaaatgatacgtacaccttaaaatacagaacactaaaccagaacaaatattgccagtgatagaataactatgtagaaagaccaatgtacatgagtaacacagaaataagaattaaattgaatagaggcagatgctgttagaacatatttccatccatcatgacttgcaacattttgtggcctctgtggagccctggtcccaccaggccaagcatctggctaagtagatacagacatatgtgacctataaaacaccaaactcacttgctaatgaagtatacaacaccatgtgctgctttgattgctcttgactggtttttaaaatcaagttcacttttgaatcagaaaaaaagtcatccttaaattagctctcataaataatccatgaaataaactttacttctggctcctctgaatagtatcatgttattcccggaacacaaggtattagtcaagtggctgctgtgaagtcaagaaatgcacattcataaatatatgtctacgctttaaaaaatcaaacacatccaggcagttgctgtgcagagttcttgctataagaagaagcccttcagcagtatattatgaagtggttacttgagaacttgattgtggatcttccagctttctacatttcttcataacactgactgcaccactggccaggaaaaccacagcgatgagtgcaaaataactggcatagatcaaaaactagaagggggaaaagcagtttattgaattatcaatgacaagaggattactctataataaagtatattcagaatttgtccataaagcctcaaaaaatattgcatacttacaccacgtgccagaccctgaagacacaaagcagcatcacagcacggtggtactaaataaagcctgactgcctgagtgtgaatcctgacttcatcccttacaagctgcgtgaacttgattgagatacttcatctctgagcccttcttcacttacaaaatggaattcatagtagttctcactttacagcgatgttggtacccatcagtgagatcataaatgcttattagcacaatgctaatgctgttagtattacttttattgttgttgctgttattgttataattcagtcctggtctctgccttcaagctgataggtgggtacaaataggccaaattctgaagatcaagaacttctctatttttccccagaagagggcagcggcaggtcaactatattccattacaggattacttaatgtaagaattcttccctaagacaattttttttttttaagttctggggtacatgtgcagaatgtgcagatttgttatataggtatacgtgtgccatggtggtttgctgcacctatcaacccatcatctaggttttaagccctgcatacattaggtatttgtcctaatgctctcccttcccttgcctcccaccccccaacaggccccaatgtgtgttgttcccctccctgtgtccatgtgttctcattgtccaacaccgacttatgagtgagaacatgcagtgtttggttttctgttcctgtgttagtttgcggcggatgatgccctaagcgaaattttaatgtgactatatggtttattaacatcatcatcatcatcatcttcttaaaataacatactaaatacttacaaactggttcaaaagtacaatgagagtatggccttaaatcactgagccagtttctttcaatgttggctacacttctgcaggaagccattaatcaatcatggcagttagggtttcagcaccacccataaaatcctattattccacgtgtttaaatccaccatttctataagaatctgctgacaaatttccacttccaatgacagccatgtttccctcaactgtaatagtcctgggaactctcccttatacagggaggatggcaagcacttaagtttctctcctactttccatcctgaaataagttttggggttagatgttggtttaactctaagctctggaacactactagtgatggtatggacaagtcacttaacatctctcagactcatcttcttcatgtctaatacagcaaccctacaaatcctatataaagcacttgacacgtagaggcactcaatgcacattgtctattattactatttctctcttagatcgcttcagtaaaaacaaagttaattacggctaatatgttgggaagaaatcatttgggttgggatgggggtgggagtaaatacttcttgattcattcagttgcccattttaccaaagtacaaaacaagatatacttaaaactcacaatgcatgaaggcatatacaactatacaattcctgaacgtaaaaagtattcacattgttgttgggtgttggtgcaagtttctcaatagtcataagttacaaatcataatgttgttcatcagcagcaaggcattaccgtggtatttgggtgaggggtgttttaaataaagaagggaggagacttaaagagttgtgagatgaagcagggaatctcaaacatgggatacagtattccaagcatagatttaagtatagagggaaataatggatgaggaagcagaaggtcttggtctgtaaggaatcaatattacctctcagctgaaacagccccattgggctgatgagttacactcgggaatgttctaagacctgacaatcccaacaccctcccaggagaaaagaactaaggataggggagaagatgttgaatgaaggaaggagggtatgcttttactttacatctgttccctattgtttggatttgttttcattaagcatacatatacttctgtcaccctgatcaagtcacacatactaccttcgatgccaaaggagagatcttacctgagtggtaatttctaatccaaggccactggcatctaccacaattagagtgagcagcgtctgcagtgccagggcaatgaaggtatttacaccaaatactagggcatagcgttccatgctgaggtttgcagcaatttgaaaacttaaaaaaaaataaaagagtgaataaataagaattacttctggagtacttataatatttattctaaataaaagtaaacatttatctttaaacatgaagagtccttctttctactgtcaattgcctttccaaccaaatgaaaacattctgcaactaaatgatataaatctcatgcaaacatctgaaaacagtaggaacatacaaacatgggaataaacaaaacttgcctaaatgcttcctcaggagaaaaactgataatgcacatataatacaatgcttcctcccatttgcctcatttaactagaaacttgaatattttggtttgtaaagaaaccaaaaaatttatcctgttacaatttttcctaaggcttctatgagccaaaatacatacgttgctatcgtgatgagtaacatgtagatgattctgaagacaacataggatgcatagcacacccaaatgttacccacagtgtccatgatatacactgcagcagcaatcaggagagaaaagagagataatgtcatttctccccaagttgaccaggatatttttatataaccaactgcaaacacagcaacagcacctacagaacaaacaaaaaaaatccaattattttgctacacaaatgctgttgcaataaattaaaaactcagcttagattattaaattttaaaatctgcaaacttataaacagaatagctcaagattatggagggccttgaaactcacacagaaatttctgaacttgatggaatcaataaaatggagccactgagatgacagactgaattaggagaggtggcaatgagatgaaaatgcaggacaaagacacagggacattgctaaggaaaaaaaatgctgcagctgaagcagaggcaagagtcaaaaagaaccatagcttctaatttggcatcatggcaggatgagtcatctctccttcaaaccaaggagcagtctagaacatggcaaaagggcttctctgccttttggtaaaacagtgatgatgataaggatagctaaaatctatgaagtgttttctgagggccaagacagataataagtgtttacagaaatcatataacaccatccaacaacctcaggaggtaggtcaacaaattagaaatgaacaatagagtaagatggtcaaatacacaggctctgaagccatcctgcctgagttcaagtcttgactttactacttaccatccatatgaccttgagcaagttattaacctaccagtcccaagtttccattgcaaaatggggataaattctacctatctcaggaattttgtgaggattgagttaatgtatataatgtccatagaacagtacctagcacatattaacattcaacaaatattagatactattgttataaactattatatattgccattcaaaatttcacatcaagtgacaaaactacccagtaaatacagagataatggaaacttggataaacaatcttgaaaattattatattaggtttactcaaagcttataaaaaaattccagtttgttagtcatagtcctgctccacttgagtacttctaagttgtcctcctaaattgtaaaatctagctcaaaataatcattttttgaggctatttcaaatttgggaggggtgaataaatctgattatggctggcttaactaccagaggaatccctcccccaccacgaccctctattatcctgcattgcttacccagtaaggttgaaacggcctccacgccaccattatagatagcagcatagcgagaaggcatcactttctcccacaggccctgtgtgtagttcacaacttgaaaatagccacaggtagagagggcccaccacacagaccagcagagaagagggcgagaggagtagcacatcaggaaatcattccatagtactttcaatacaaggagacggtctggcttgggttcctacatagcaaaagggaacaatgctcaaactctgatgaaggcaattatatagaaagcaatttacaggcccaattacttacctaacagacttttttccttgtgaaaactaactgcttacttcataaacttattaacaaatacatttatcccctctggcgaaaaatatgttctcataggatttttgctttaaatgcactatagcattaacacagctgtatgtaatcaacccagcaaaagatgtactgtttacaaaatgaagatgatgaaaagagaccgcaggcttcagccaatgggagtctgtaatctacatctcccataaactggcaaacaacataacaagaataataataagcaacagactagcaaccctaataaatcactattcagttaaggcctcctatcgttataattgacagactgatccaacagttaagatagaaatattggaaagaagtagaccaaaatattagcagttctctctaggtggtgggttcttagtgatttaaattttcttccttaaactttttatattacttaatatttaaacaatgagaaatagtattataataaagtaataaataaagctactgggcttataattgagtgaagcaagacattactgagctacgcactatcccaagaagtcaatatgagatgtcagacactctgtgagatatctctgatttcaactgtatgaaaggactaatctaccaaaggttactgtaatccctgggccttgctcagaacatgggaaggccgggtgtagtgactcatgtctataatctcagcactttgggaggccaagacagaaggattgcttgagcccaggagttcaagaccagcctgggcaagaaagtgagatcctatctctaccaaaaaaaaaaaaaacccacagaaaattttacttttgtggctaacatggaaaggcaaaatgagagccatggaaagatgagtacaatataccactgagtaaaataacagcaagttacaagactacatgtagatcacaatttcatttactataaaatgtatacgtacatatgtatataggaaaagagatgtttgaaaagaagttcactaatctttgggtggtagtagttcaggtgattttttattttttatatagctttctgtaacatttaatttaaaaaaataagtagatgccaggcacagtggctcacacctggaatcatcacacttcaggaggccgtggcaggagaaatgcttgaacccagaagttcaagatcaagctgggcaacatagtaagatcccgtctccacacacacacacacacacacacacacacacacacacacacacacaatttaattagctgggtgtggtggtgtacacatgtagtccctgctactcaggagactgaggtgggaggatcacttgaacctagaagatcaaggctgcagtgatccgtgatcacgccactgcactccagcctgggcgacagagacagactctgtctcaaaaaacaaacgtgtgtgtgtgtgtgtgtgtgtgtatatatacacacacaccatatatatcatttttataaaattaatagatattttctcctcttatatacagtaacagtgaccatcaacattagttaaataaaggccattttctccctcagaggctagaaaacctcactggactgagaatccgagtttcatcgttgttttaccttctcataccatcccaaagcaaccccagtgtggtgcttccttctttgtgctgtttagcccagagggggatatccttcaagtaccattactacagcccctttccaaaattcagggaggagtactgaggttaatcaaaataactcagagaaagaagtaccgacacttgaaaattctacttgatgaatttgcataagataaccacctagaagtacaacatactgctgttacaagattgatttcttggcactgtgtatgagagcaaaccttgtgaatttaaacaaatcacaagacaattgttaatcatatataatgtgaatttgctaagagtgagtgaatggtaccaagcacattttcataagtctttattcaaggtccaccagttttattgaactacatcagaattttactatttagcttcagttgcttaaccaatataacttggaaaacaactgggatatctaaaactttcaaggatgctggaaggattataagaaaagaaagtatattcctggaagaatggaactattaaaaggattcacaagtttctattagaaatcctaccataaactgataagaaagccttacttttctcatctagaaaatgaaaatgataacaataaaacctatccacaaaagattatacagagttacactagataatgtatatatttattatagaggggctcaattagtgttatttttattgcatagcttaaaaagtcatggcatacataaaataatgcccagtataatgcatttgagaactttagatctattacataataatgaattccacacacagaggttaataactactcaatctattatctggccatgccaaaaagaaaagatggcaggtcctgtttataaaatcagcacctcgtgctataatctgcaggcttccttctatgctgttttctaggcttcaaatgttaagcttatatgaatcacactttataaagtagcatttgacatattaccttttatgtttcttgttaaattacatctacaaacaaaggtttatttctattacatcaaaactctgagctgctcatagttaatcatgcatgctctaatttaataagtggccttcactgtgttccatggagctttaagagtttcatgtgggatgaataacaggctcaagtatgtaaaattatcagacctgcattcctgtttcaatcagaaaggctcaatttttatttacttatcataacgggcatctagtttcagatttcatttgaacataagattttgacgctgttttataaatttaaaaatctttaacaattacttccctctatcagggaatggaagtttctactgtagtggtggtttttgagtcaactagatatgggtggaaattttatttatttatttatttttttgagacagagtctctgttgcccaggctagagtacagtggcactatctcagcccactgcaacctctgcctcccgggttaaagcaactctcctgcctcagcctcccaagtagctgggattacaggcatgcaccaccacgcccagctagtttttgtattttttttttttttttagcagacatcgtgtttcactatgttggcaaggctcgtctcgaactcctgacctcaagtgatctgcctgccttgcccacccaaagtgctgggattacaggtgtgagtcaccatgcccagcctgagttggaaagttttaaagtgccacttcctatgtgcctttgcgcaagtcagttaactaaatttagtttcctcttctgtaaaatgagcaaatatctacattattgagttttaataagaatcaaataacatactgactctaaagttcttagcacagtatctgatacccaggtcaaaataaacaggaggtgtgatgatgatgatgatgaagatgaccaggggtgattaattcaaagagaaaaggaaagattgctctatttacaacctcacaaatacatgactatctaccataaaagtacagagctgttccggattattcacgtgtaatgataatgataatagtaataatagcaattaccatttattggaaacctactatgtaaactcatttgaaagctttaaatactcaaaataactgtataaggtagatatgtacataaggaaactaaatctcacagaattaagtaacttgcccaagtattagaactagggtttggacttcactttcttaaaaactcacaatgaatgaagcgaatagattttcgttcattttggttctcagggtttattgtagttttttatttttatgggttttggtgagggaggtaggtggtaactcactacaccctgctgctagaaatgacattatttaataccaaagtggaagcattaatttcactgttgtcattgtttagagaccttagacatgcagacacagaaagaacacttactagtagtaaaagatatcaaactacaaataaaagcatggctatattaagagaatcatttactaggtattaattacatgtcagaacctgtgctaaagaagtggtttaatttatgtcatttctaatagatgaagaactcaaaataaatcagtttcaccaatcagccaactacataatgaatccagctctgcttgtaaaagaaagtcaccagctttggttcttctttctgcaagatcagcaccctttgccccaatgcaatagactctctttaaaaataactcacaaatactctaaggtaacttgtagaatgagctatcacttagactcctcttacttcattttctctttctataaaaatcaagataaaaccacctacctacctactcttcaataattaccacaattataatttatggtttaattataggtcttgtcaacttaaaatagctctgtgatccctaatatccatattctgaattttcttcatgcttgccaaagaaaaacagcagcattttagggccagtcagtgccaataccaagcagcactgcccatctgctatggtatcagtagcagagcctaggatatcagggaactgacttgaatcctaattctgaaaacagtgtaactgacatgatggttctgacattgttaccccagttaaaagacttcaccgagaaaggtttagaaagaactggatctcatacacacttttaaattatgttcaagagtatatttgtacaattctgcataagttgctaatctctgatcctaatccttatctctaaaaggacagtcttgatgaaatctaatctctttttaaaatgctctgctttttctatgacttgtgattagagtcatttctaactctaaaattctacaattcttcagtatataaaatactgacacactgtgtatctataaacaagtatttcaagttgatctagaacagtttttaaaactataggtcatcacccataagttggcaataaaattgatttagaggacagtgaactgaatttaaaaaaaataaaagaatgtatcagaataaaacactgttgtaaaacttgtttctgttatatataaaatatatacatacctatgtatgtacaggttttctatgtaaaatgttttctatgtttcttacttatattcaaaaaagtttgaaactgtctataaaaatctttagaactatggtcaatatgttaatatctaaaatatatatttatacacatattatctgtatatacgttaattttagctaaagccactgtaacacattcaaaacagataaagaagtgtctttattttttttccacttcataaaatctatgaaatgattacacacctccttccctcccccatcaaccctctgttgactctctaatatcacctaacaaactatgaaaaaaatcagcatttcattgccacttaatccttggtcattctgacaaaaagtgctcacaggtgccctggtaatcaaggtgagtttcatgatgagggttgcccaggctctacaagtctacccaggctctctgggatgataacctaaatttcaagtagtaatttgagagctgaagaacggggatagagaaaagagagtaattttcaatgaggacattagatgccacatttaaacaattcagttaactctcagtagagaatgaaagactttactcataatggttctttattatcagccagcctacaaagcttatggagctcagtccgactgaggccacctacaaagctggaatgttaataggcttatttccaaacatgtcccaggaaaactaagactacagtgtggctggaattaactttgttcctcacagcttataacctaatagaaacaaaaaaaacacttgaatatttaaaaaaaaaaaagggtgggtgtctagggaaaggaattcatcttcctggctagacagaacagatggataaattattttaatgccatacctctctcttccaagagacagcttcataacacacttttactatttattccatcaccacctcaaactgtcctcttgtgatctcttcgtctgtattattcattactacttcacttcagcaaattgtcatttgaaaaataaataacagatatcccttctagcacagaagaggaaattaacttcttacccttaaatactgtgggcttcatgactgggtgcggtggctcacgcctgtaatcccagcactttgggaggctgaggctggtggactgcttgaggtcaggagttcgagaccagcctggcccacatgatgaaaccccgtctctactaaaatacaaaaattagctgggcgtggtggcgagcgcccataatcccagctactagggagaggctggggcaggagaactgcttgaactctggaggcggaggttgcagtgaatcgagatcgcaccactgttctccagcctcagcaatagagcaagactctgtctcaaaaataataataataataataataatttgggcttcaattcagaaactagaagtagatacttaatcatttattagaatcatttcatctactcatttagcaacaattttctgagtgctttatttatatgccaaacactcaaaagatgaagacacagcccttgcaatccaaggcatctctgacatgaacaatataatgctgtatcagtctgactttggaggtcacgcactccaggaaaaaataaatgtgtcatccctaatataaataaaccatagcttgaatgaatgaatgaatgaatgaataaagcaataaaccaactcaggataaaacatgaatccaaataaatacaagatctaccaagagggagtttgctgtttttttcaccacgggtccagcccccatagtagcaattacaagatatttaaggctgagcttaccggttcctccacgggaggctcctccatatttagagggatttttgactcaatgtcctcccagccaggaaggtggttagaagctggggtgtcagtaacaatgccaccattttgtaccttgatgccattcactctctggcaggtagaaggaatgtggtgaaagaagaggctcttctgtggcataggtaaaaaccaggccacagcaaaagccactgaaacacaggtaagagagatgacattcaggctgaacagcgaccagcctgccactgagacaaggatttgccctaggacagagcccactgtaaagcccaccaaagtggcacttcgacagtaacttgtgactttctggtacatgcccaggtccaccacactgtagatataagagtaataggcaatttcagtggctgtggcgatgccataaaaaaattctagaaattgaatggccagcagtccctgggcatagagcagcataaaccatgtaacaataaggctgagcccctgcagtagaacaacaggtttataacggaggtagtctgtggcaaggaacacaggaaacagtagcaccaggtaagagtaagtccatactggataaatttcattgaagacctggtagaaagagaaaaaaaaaaaacaaaaaacattagtgatgaaaggacctggaatactcataaagaatttattcataaaaaacaacctacaaatacctcaaagatctcaaccttgacaacagcagttcagataactttgaaaatgtcttttctctcttttttgtttgagatggagtcttgttctgcgcccaggctggagtgcagtggtacgatcttggctcactgcaacctctgcctcccaggttcaagtgattctcctgcctcagcctcccgaatagctgagattacagggacccaccatcacgcctggctaatttttgtatttttagtagaggtggggtttcaccatgttggccaggctggtctcaaactcctgacctcaaatgaggagcctcccaaagcgctaggattacaagggtgagccacctcgcccagcctgaaatatcctttcctatccccaataccatcatctttttcctaataaattcttcccattaatcaaggcctagttcaaagacttccttattcagaaagactttgcggaagccaaaagtacttgtattacaacattcaaaccctttttttttttttggttttgttttttgtttttttgagacagggtctccctctgtcacctaggctggaatgcagtggcagaatcatggttcactgcaacctccgcctcaggtgaggctcaggtgatccttccacctcagcctccccagtagctgggactacaggcctgtactaccacaaccagctaatttttttttttttttttttttttttttttggtagagatagggtttcaccacgttacccaggctggtctcaaactcctgggctcaaagcaatccaccagcctcagcctcccaaactgctgggattacagacatgtgagccatctggcctagcctcaaactctcctaatactgatctatatgcatcagtttccccaattaattcataatactggctcttcaccatggctgcatctcctaagaagctttaaaaaaatgtgttagccaagcgttgtggcacatgcctatggctgctactcaggaggctgaggtgggagaattgcttgagcccaggagtttggggctgcagtgacttatgatcacaccactacactccagtctgtatgacagagcaagactctgtctctttaaaaaaaaaaaatgcccagccacagatattttctaaaaacttcccaatagagttttaaatgagccagagttgagaacaactgccttataggctttttaaggatagacccctacattcacctgtataacctgtctaaaagccagcatactgtttggaagatactattcaataaatgctttgaaaacggaatcactgtcaattcttacttctagacacaagatagggagcctttatcctactgtttcattaagcttctctgactttaagttttgtttcttttggggcagaggaacaaataaagatggtcaatgtgtcctacagtcttgacagaattaagtctctctagatggcaggaatataggcaacttttatgtccttctttttgcttgtttttaaatagaaaaaagaagtttttgctgttttctttctaatgcatattttaaaattgggatatagtagaaatgatctttaaaataaactttaaaccagaaagaccccaacaggaatttcagttccatcacttgctgtgtgattgtagacaacattcttttagttccccttagccttaatctccattatcagtaaagggcggttgtttgttgcaaaaagtaaatgagacacaacatgtaaattacttactccacctgatttattcacaaagtctgaagactagaggacaagctgacaaggacatctggggcagtatgaattaactaaattaattgagctatcattcccattcttccaacaacaatcactgtaggagatttttccttccttttgtcagtggcctcaacttttaagtgctttttgaaaggtagttttggtaaaaggctgaatactttgtgatgaagcaacctaatcccagacttttacattctgagaccaatagtaactttctttttatctttcctgtacatctcagttcactcaagtctaatatgagctaaggttctaaggttttaggcaaacaataaaaaattgttgcaaaatctcttgccagtgcagagcatagctataaaagtaaaacataatccctgttttctgaaatacattccagacaaaagtgatctgtttaatggcctcaccttcatgaattttggtctaatttgtgttggtaaatcagttagcaagctccacttgatcaggaaattttgttgcacctgactatgtgcctaaacgaataatcaagaaatgtagaaatgattcgtattcaaaactgtggaaattttagcaaatgaggaaaaaagtgcccttagctgcattaaataactctaagtagaaaaccaaagcaggtaagggtaatcttgagatttccagttgtgttctaattaacaacttgtcattcctttgtggcctatacttttacagatactatctgtcagctttcttttttttttgagacggagtttcactcttgtcacccaggctggagtgcaatggcgtgatctcggctcactgcaacctctgcctcctgagttcaagcgattctcctgcctcagcctcccgagtagctggaattacaggtgcctgtcaccatgccgggccaattttttgtatttttgggagagacagggtttcaatatgttggccaggctggtctcgaactcctgacctcatgatccgcccgcctcagcctcccaaagtgctgtgaaccaccgcacccagcctgtccattttctaaagtttgaaactgcctcctctgtttgactaagtgtcaccttcacaatttccccaacatagcaccatgaagtactagccattaaacctttcctttaaaaatgtcctctactgctcccttcaatagttcatcttcctttgttttgggattttggatgacctcttcactccaataatattgtctgtgcttagacatgttacataacttttaaccatagttgtcccaaaatgattaactgctaagttttcattgtctaagtttcatcctttaaattatcaatttaacgtatctttactcatgagtctaattctactattacaaaactacaatttagataatgaagatggaggagagtaacactgccaaccttgcaataacaactaaaaacaaaaagaaaggcaaataggggagagggggaagaccagatagtttctctttaacttattctaaataagaaacctgcattttctcctttaaaagacatcaacccagggggaatgccccactcacactattatcagcatcataataacaaacctctactgctgtgttacacaccacgctaagcactttctctaaattctctctatttaatccaaaccacaaacctaaggtaaatgcttctatcatctctattttacaaacaaggaaacttggccttaaagaaaggttaagtgaattgtcccaagttatcacaggattggcagaagaaggatctgaattcataaattctgaatccgccacactaaaatgcctggtttcttcaatcagaaaactgctattaatcatctactatcttccaggttaattctaatgcttgcagtagcttttccaatctgcactgaggtgcttttacagggcattcatgaagagataaagactacagtctccagcacttaactaatgggtctccaaggcagatccttttctttttcagtgtttccaatgacagcaaaaaatgcttccttgatattttgaatcttgaagggaaacatcctacaggcaaaaatgtaccaattacagacccttattaattgtccatactccaacttctcacttcacgtaacatctgctatgtgagcaacgggaattgattttattatgaccaaggtgcctttcacaactctttggatcagtgcttgtgttttcttgagctacaaagtcaagggaaaacagatgttcatttttaagttctaatttagatttaggctttaaattagaatcaagtttcaattaaacaactaataggcagttatttgcacaacattgttttcaaccagcacggaggtgacaaaaagaataaaatggccaggcgcagtggctcatgcctgtaatcccagcactttgggaagccgaggtgggtagattacctgaggtcaggcgttcgagaccagcctggccaacatggcaaaaccccatctctactaaaaatacaaaaaaattagccgggcatggtggcgtgtgcctgtagtcccagctacttgggaggctgagccaggagaatcacttgaatctgggaggcagagattgcagtgagccgagatcacgccattgcactccagcctgggcaacaagagcgaaactccatctcaaaaaataaaaattaaaattaaaattaaaaaatttaaaaaaaaaagaataaaataaggctaggcactgtagctcatgcctgtaatcctagcactttgggaggccaagttggacagatcacttgaggccaggggttcaaaaccagcctggccaacatggcaaaaccccgactctactaaaaatataaaaaattagctgagagtagtggcacaagcctataatcctggctactcaggaaactgaggcatgagaatcgcttaaacctgggaggtagacgttgcagtgagccgagatcgcaccactgcactccagcctgggcaacagagcaagactgtctctaaataaataaactgagatcctcagctctccaggagtattgaacctagtgaggaatatataatatatgcagtatttataatggaaataggaaatacagggttgtttcttcaaaatggaccttgaaggatgagaaacctaaaggctaacaaagatatcaacagatatatatgggaagattattccaagaagagaataagtctttgagtacatgtcaacagatgagactgtggatatgctggacttaagactattagattaatatgaatggagcttggttatgtggaagtggtaaggggaagaaggtttgtagtaggatataaggctgtcaaggaggtaaaaaccaaacttcgtgaggctctgaatatcaggcaaaataggtggaatgtttaaaaaaatctaagaaaggtagtaaatgtctgtcaaaacacatgctacaatgatgaaaggataaaaaagtttttagagataaagatctgttttactgaaagtctggccttcaactattaacatacagtcaaattttagcctgcttaaaacttacacactggtatctgttttaaaattaatgcttttcctgaaatctaagaaaaaaacttttgagagtagacagaagaaatctttttctcctctccttttgttttaggatttagttaacaatagctctattcaaaccaacttggcccttctgcagtcttctaagagcaaatacaaactttaatacaaatgtcgctgaatatgacttagcattagctttgcttaaaaatcatgtaattttttttatttaactgtccatggcaaaaaacaagcattcagtaagtaatgaataagttgttctatttatttcaattattagttatacaaaaaaacgtagggtttgccacaaggtaagcagaggagaatcagccatgatttggtggtcctctgagaagacaccccttccccagactactagatttctcttcaaatcccacgcttttcctcaactaatttgcaataagagaagtacacttatgttttttgttacacaatcagcaaatagttactacgcctggcaactctgctttatttctgtgccccctgaacacacttcactcaccttgaaaagctttctgataggacagagcacatgatcttggtagcacgtcacacagcaaccttctacccagagcacatgacaaaacagatcagctttcaaatatcaacactgggaacatgtttctctccctgtgtttcactatccggaaaggcgcacaaactgtgcagatcacatggcagttcacatgaaactttaatggtcagctgttcacagcagtatcaattctgcctcagtggctacacctcagattcagtggttgttttgggtctccagaatcatactttctcatatcagtgcagtaattttcttgtaaaatcattctgtcatgaaatttggctgttttgacattattgctttaaatcagtattaaaactcaaataggttatgaataactgttacggtcgcttatgtaatgatccacaagactgagaaacggcccagccactccatcccacaactggcaggtcaatagggtaatttaaggccaggcaaaaagtcagtgatacttgctagaagtgaacaaatgtcagactctcaagtgaaaccctcaatacgtaagtcaatactgattcttaattctctctcaagtgcccttgaaaatgacggagcattgcaacaaacaaactgcaaacaacaaactatgagtaactatatctcgccagtgtgcaaatgattccggtagtgccatctcttgttctgacctgttatgcagggttactgagtggctactcaaaagaagtgactgactactacccacatagagaagagtaaggtttaaatgggaggagtattttacagcacctggggcaaggaggcagggtggaaggaacaggtgtaggaaaaaagaaaaagctctcaagtggccccttgactgatagtaggaaaaagaacatgagacctcagctttcaccctttgttgtattcaaggaagagggtgttgaatcggctttatttcggttttgtggaagtactttgggtttaatttctttctcagtttatatattgtctttcttctgcaaaaatcaagtgctggttttgaccatgcacttaaataggtcagcacatttctaaagtacactatgcgcttctgaagtactttatttgtaagccctcatctagggaaaaaatcaatcagcaagaaactcttgatgatggactacgtgctctcaattaccctgaacatcacagaaggccttcaaagacatcaccttgtatctgagaagcaaaactaacatctgtgaagcaacaattcgcaatacaagaaacactataattaaaagtcaattatgtttcaccatctgcctttatccctggaggttggtcttaaggtagagaggggcaggatatccttggacacaacctcacccaattaaaaatcaagacaaattaagatgttctgtacttctgtcctgtccttacttgattaagcccacccattctgccaaatgcaaacaaagtaaggtatggacaggaagcaggtgaaggaggtagagggaagatcctttcagaaaagcagtggttgcctactttcagtcaatgaatatttactaagccgtgtccaaagtacactttgctgttttcacttctttgtcaaaatattgccccctcgcccccagcaggaactgctggaccagtctgggcagtcacgctaagccacattacaacacgatcagcatactgcctgacgcacaaggcacggggcctctggacgcgtgttctgagcccttcgcaggagactcgtcctacagagccgaagaaaacagaaaatcatgaacacaaagaagagcacgaagccgacctccaactggcaaaatcagaaatctctgccgagaatggctcgagcgcttttctcggtcctctcttcctccgctgcccacccgcaggccggtcgcccgcccttcccgcgccccgcgtccgccgcgcgtacctccctctcggtcaggttcttgtccggccccagcaggtacggggtcaggaagggctcggacggcctgaggctggcgaagaagccgtaggcgcagagcagcgcggtcggcaagaaccagcattcgcgacggacccgagcggtccgcaggagcacagtggccgccgccgccgccgcccgccgagacaccgggccgggcacatccatccggggcgcgaggggaggggacccggcccggccccttccttctcctcctccgccaactggagtgagggtcaggcacttgtaaccgcgagtgacgccttctccctgtaaggccaggacgttctggactcgccgccgcctccggctacagaacccccagctttaccctacagacgcctctagggtcgctgcctgatcgcccagtttaagggagacccgtcctaaggcccaccctctgccaccgcctccactccgggaaccaatcacagcggacgccgggaatacttgcctgctcttccattggtcgtgggtcacacgacgtgaactggggcggtggcagcacgccaggcctctgacgtcccagggctcaagcgcggaggacatgtggaactccactccaaaagcggcggcttgcggcggagctctctctagtgaggcggccagctggcgttcgtggcacacttgctgtcggctccgctcatctgttgggaatgcgtcctgtgggcctagtcctccgctggaagaaacgcgctgttctccccaaccaccgtttatcattcttattcaccgtctccggaatgtccattcagtttccgctcctgagagacttagtgactgaggccaggcaaagatttcaccttggggagggggaacgttaaacctttcctccagcagctttcgtgttttaaattgtattcatccgccatggaaagacatcagaagcccaggatctaagagacagactgaaatgaagaaagtagataatattgtgagaataatgaacaagctggtcactgaacagcagaaccgtaatggagtcccagttaaagggttttaactttatttcgtcactttttgcaagcatgatacaaagaaaacaaacacctaactacgctacggtttatagttaaaaggaaggtggaagatcctgagtcattacagcaatcacaaaacatgatggatttcttcatttaaaaacacaaaagaggtcttggcatagttttcaagggcaaagcatgacaagactctccagtgctttctttcatccccctctgtgtgcctttttctgcctgactcacagcctggctcaatcctaatctttctactgcaaagatgcagcatttaaagcaatttttcctgtgcagtatttgtagaatgacagatcctgccagaagctcttggaaacattttggaactatcttgcttttctgtatgttatgatccatctagcaccgttttcctcctgtggtagcaaatgacacttttttcaagcatcagcagcagaaatgagtctaccagatggaataagatactggtaaagggaaagatttgtttctaagactgcacaaatgaatgcacccaaatctgtgagttgattaatctgtgaagaaatacaactggcagtatttacatatctcaatgagtctcaaagtgtggtcgaggaagccctgggggtccttgggaccctttcagaggttccacgagctcaaatctattttcataaccatgctaagtctttatttccttttccactccagaggctatataatgtctgatgacatcatcgctttataggatgagagaatacgtgcttgtatattcttgtgtttgtaagactttccaggtttaatttattaccatatggcaattttcaataagtataacccacaaaacccaacagatttttggggcacctctaacaagggtcctaagaccaaaatgtttgaggactgctaatcgatattattcaattgtctagtcccctaaactccaacccttcttatcaggactacagagagaaaacaggtggtcttcttgacaatcgctttgtatttacattcagtgctttagtagaagagaagaaagaaagagaaagcaagccagagaggcctcggaaagagaagcctacttattaaaaatagctttctggctggtcacggtggctcactcctgtaatcccagcactttgggaggccgagacgggcggatcacttgaggtcaggagtctcagaccagccaggccaacatggcgaaaacacgtctctactaaaaatgcaaaaattagccgggcatagtggcatgcacgcctgtagtcccagctacttgggaggcagaggcaggagagccacttgaacccaggaggcggaggttgcagtgagcggagagcgagactcgcgagtactcgtctcaaaaaacaaaacaacaataacaaaaacagctttccatcccttccctgaggcttgggtacctgaaccacgttaatctgtaaatcactgcttctgtaacttttccttggtataaatcacataggcaatgaggttgggtataaacagtaattgtccttgaattgggtagatgttttcttattatttttgtctaagaggtcattgcgataggcagaattctaagaatgatccccagtgacgcttgcccttgtataacccccacccatttgagtgtgaggtgaaacctatgaatttgatgaggcaatactcctgttattatgttacgttttatgacagatgtgagattttccaggtgggcccaatctaatcacaacagccctttaaaagcagagattttccgtctgctaagagcagaagaggaagtcagagagatttgaaggatgagaagaatttgacgtgctgctgttggagggggctacataccaagaaatgtgggcatcctatagcaactgaaactggctcctggctgacagccagcagagaatcaggatatcagtcccagaatcataaggaactgaattctgctaaaaacctaaatgagcttggaagtgggattcttccgagaagagcccagccgggtcaccatcttaattttggtctgcgaaaccgtaagcagagaatccactcaagcccacctggatctacagaactgtgagctaagctgatgtggtaatattttaaagccgctaaatttttgttcatttgttgtgcagcaataggaatctaacacaaaggtaaatagaatatattttttaaatcgaggcaatattcacataacataaaattaaccattaattaagtgtacaacccagtggcattactacattcataatattgtgaaaccatcacttctgtctaattccaagacattttcaccaccctacaggaaactgatacccattaagcagtcactccctgttccctcctccccttagtccctggcaaacactaatatgctttctgcctatggatttgtctattctggaggttacatacaatttgtgaccttttgtgtctagcttctttcacttagtttaatgttttaaagattcatccacattgtagcatgtatcagtacttcgttcctttttatggctaagtaatatgtgtatatacaacattttgtttatccatcaattgataacatttggattatttttacttttgtctattgtgaatagtgctgctatgaacatttgtatgcaagtgtgtatttgaatatttatttttatttctttggggtatatacctaggagtagaattgttgtgtcatttggtaattctgtgtttatctaagaaactgccaaactgttttccacaggctgcatgatttcacattctcataagtaatgtacaaaggttccaatttgtccacatccttgccaacacttattttcctttttatagtagccatcctggtgggtgtgaagtggtatctcattgtggttttgatgtacttctctaatgactgatgttgagcatcttctcatgtatttgttggccaatcatataacttctttggagaaatgcctattcaagtcctttgcccctctttgattcagttgtttgtctttttgttgttgagttagaagagttctttataaattctaggtactagacctttgtcagatatgatttgcaaatatattttcttccattcagtaggggtaaatagaatattgagagactttttatatagtaatataaaaaagcatgaagggatgtgttttgcaaaaagtaagattacacagtattatacaactatgttatacactttggctcttggttttctctctaaggaataactcatgaagaacattccatgtgttaaggtatacctctaattctttctaatgcctacataatatcctattgcatgggtgtgctattcaccccctacttatggttattcattctgtttctagtttttggccactgccaacaatgctgcagttaacatccttgtacaatatatgtttatgtattttaaatttcagtttaaaaggatttattctgaggagtagtatttctggtttaaagagtatatgtgtttttaattttaatagatattgctcaattgttttacattaataacttacatttttactagcaatatatgaaaacattctttctgcactgcatccttgattacagttataatcaaactttacaatttttgcttatctaataggtataaatcagtggttctcaatcggtaatgattttgtcccacaggggacatttggcaatgtttggagacatttttgattgtcaaaatggcggggggacgggggggcggggcgggtggtgctactagcttctgtgggcagaaccagggattctgttaaatatcctgcaatatactcgaggcgtcacccacaacagagttgtccatcccagactgccactagtgagaaagataagaaaccatggtataaagatacctcattgtggctgggtgaggtggctcatgcctgtaatcccagcattctgggaggccaaggtgggcggatcatgaggtcaagagatcaagaccatcctggccaacatggtgaaaccctgtctctaccaaaaatacaaaaattagctgggtgtggtggcgcacgcctgtagtcccatctactcgggagcctgaggcaggagaatcacttgaacccgggaggcagaggttgcagtgagcagagatcgacgcgactgcactccagcctgagactggactccgtctcaaaaaaaaaaaaaaaaaaaaaaaggtacctcattgtatcttcaatttgaaaatctttatgaatgagtttgagcacttttttccatatgtttgtcagctacttggatttatccttctgcaaatagcctatccatattatttgcccattttttcttttggtggcttatccctctcattaatttattctaaagagctttttatattttttaatcatttatttttcctattcgaaaacatttatttttcaaatatactttttattgacttttgtagtatctttgctagatggtaaaatattattgtagacattaaaacaaggtctgaaaaaatggtcagacatactgtgtctttggatgagaaaagaagcatcataaaaatgtccttttcctaaagttaatctgtaactttaacacaattccaattggatgtacaaatcagacgtttttaatctatggactagtgcaggctagaaaggagcattgattcatacctattgtgtgacatgtagaattttagagcaaaaagaagcattaagattggtctgtccattgcattacttttctgaggaagacactaagttacagaggagttaagggacatatgatatgctaaaattggaaacattctggttagcccaatttgaactttgttctagaaatgatggaattcaataaaaaataattataatcataaactgttaattttagaaaaaaacattgaaattgagaccaagaaatgtaaatcagcttaccaaaataacctagagagttagcagcaaattctaaatagtctttggtcatgcaaacttacaattcaatactattcctccatgccatgtaacctcttaagtgcttgcctagttaatgtttcttcactttcaatatactggtaccgcaaagcagttcgcctggaaaaacagagtattgaaacgcctttcaaagatatttactagaacttggattcttacttcatccctgtaagtatgataggtacaaatacacattttttctcaatttataggtgggaacactgagggacaaagaatcttagtccttctaggtcacatttatttcctcaacatgagtatattgacagcctgttgttcaaggccttgcacttggtactacagcaaagataagacagtccccaacctcagagagctcatacggtgaatcagtcacccaagaaccactccaggctatgcccctgagatgctcctaaactgatgacttatttcacaaacagaaccaagttctgttctgacaataatcacagatgaaatgacttgctgtgccatccagtaaaatgctagttcagctcacaagtgactctcttctttgtttcttaaatgcttgacccagaattttgcatgtagtcatcaagacatcgccccacagctgagctgtgtcatggaacagccagcccatctaaaaggctgcctactcatcagcctgctcagcctgtgtgggctgggaatgtggtgccatgcaggggaggcattccccccgttgcatggtaccacataccctttgggaaagagctctgtgcctgccccataaacactctgtggcaccattcctccctcctgactctgcctgtcttctgccatcctttgatgtgtaaattggaaaactgtcatcacctattgatctcaaaaatgtcatcctatgtgaaaagttagtgcactctggaagaacaaactggttattaaccataattcagttattattaaaccactatcttcatcctctgacttgcatttatttgattgtagtttcttgcctctagtctcaccctagcccaggccaatctttataccacagtaagaagaatcttcctcaaatctgatattacccttgccctgatctctgattgtttaggaatctctggtgcttaataaataaagtagaaacttcttatttctgacttctgctaactgcttcaatctcattttctactaatgtccattaatgctcaccagtttctcaagttgtcattcagatgtcttatctccttcaccactaccaccctagttcaggccatcattatttatcttctgagctgttaccctagctcctaacccatttctctgaccacagccttcccctactagtctatttgcccagcaggtggattgacctccctaaagcctaaattgaattatgccactcttctgctcagattcctccagtggcttcccatcaaattttgaattaaatcctaagtttttactgtggtctgtaaggccctacctgatatactcactccatctcagtatatctctaatctcatctcctatgactgtccaccttcccactctgggctattcacgctggcttcttcattgtttcttgtatgtactaagcacacttctacatcaggaccttggcccttgctattctgtctgcctagaacagtctcttcttagatattagtatgatgccctccctcactactttcaggtttctgcctaattatcaccttattctacttaaaatagcacacattcccatcctggccaccttctattcttctaccctgctttcttcatcttagcactcgtccccacttgctatattatatatttatttattttgcctgtttctgagaataagcactacaataagagctccataaaagcaatggctttgtttttgtttactgttctagaacagtgcttggcaacatactcatacttgacacatatttgttgaatgaatgaagtaagtgtcaattcctctctgcacacttctctgatgcctcttgggcaattgctctgttttctgttcccttggaactatgtatatacctctactatagctatcacattttattgtaactttttttcctcaccagcctatagaatccttaaaagcagatgtcttatcatatccttcctaacacaaatttggtgaaaatgagtagagtgaatgaaggtcgaagaagaatagcaatacagccactctgcagattcgaggatggacatgtttgagccctcattaatcccatcttcaggaggctgcattggtactatatgtggcatttatttcaatagagatgctcaaggcaaaaacgatattttactggtctacaagttcccaaatttcctttaggaaaatacttgggtattatcccgtaaactacttgagtggctgaagctttaaaaacaagcatcctggctaacacggagcaaccccgtctctactaaaaatacaaaaaattagccgggcatggtggcggcgcctgtagtcccagctactcggcaggctgaggcaggagaatggcgtgaacccgggaggcggagcttgcagtgagccgagatcgtgctactgcactccagactgggcgacagagcgagactccgtctcaaaaagaaaaaaaaacaagctaatatgtaacagttctgtcataaggccatatcacaaacagtgataacgtggaattcaataggaaaatgaaatagatgttcatagaaaaaagactttaacacattatccatctggatgccatgagttctgtggacctccctcatacagactctaggaatcaatctaggggaaattttgttgtgatccaaaaatgtcactggattaggaattgagaaccctaaattctcactcaggtttttctataaataggctacatgacttcagataaatggctgcatgttgtatctgaggttcctctaacatgggtgttaggagtagatgatctccataagccttctagctataaagttcactgactctattgattcagctgggagactgtacctaagtaacaagaacagactgagtactggaagaggaatgtattctctctcaacatcaatgaccttgaatgtgagagtgattacagagttttgacacctagcagtgcctggacccaggtctcaaatcctgtttgtactcctgctcctatagacacaactgcttttcccaaacttgcagaaactggactcccactaagatggaaaagggtgccggccgcggtggctcacacctgtaatcccagcactttgggaggccgaggcgggcagatcacgaggtcaagagatcaagaccatcctggccaacatggtgaaaccctgtctctcctaaaaatacaaaaatttgctgggtgtggtggcacgtgcctgtagtcccagctactcgagaggctgaggcaggagaatcgcttgaacctgggaggcggaggttgcagtgagccgagatctcgccactgcactccagcctggggacaagtgagactccgtctcaaaaaaaaaaaaaagatggaagagggaaagggtttgagacactagctggatttgagagatatgtttagctgaggtcttaggaaggagactgcaaacttgccagcattgtagtgattggctaagctctgctgttggatttttctctgagaatgagaatgaatgtggcccagcattcagggtgtctcctttgggagttcccatggggcttccagagattgccagaggcacactgggagcagtcacagttacctatgaggtggcagttctgcaagccctgtctgtgactcaaagcagcctccttgtttcctcacatcagacagacttccattaagaatggggttcatgtgagaccagaaggggctggactatatatttagccaagacaggtggtgaaataatttattttctgatatactttatctttcttagagaatgtatcagaacttttttgggaaagagtgatgagtcttgatttgtaaaagcatgtcacctcttatggtaatctccaaagcagcatttacaatcacatgtgaatgagtcataaactaagaaatgttgaatgatctgaaataagggtatgttgatttctctcatcaaatattcatttttggcaacataatggactcaaggcacagatattaagtgctttgaaattctcaaagccacaaagacaggccatatctatgaatgtttctgatatgtgactctcctccctccttccctcttaatgaggtataaatgcattcaaacacacagtcacacatttattttatctcctctcagttatgtgttctccatgtggtttggtgagatattttaaaatactcttcaatggataattaaaggttcaaaaaattttatgtaaaattctcccagatagaagagattagtaaagaaatattctttccaagtctcaatctgaatacaatactgattcaggacccccgtccaggttctcataactgcaaattcccaata

SEQ ID NO: 433 - DNA, 162032 bp, Homo sapiens
ttttgctctgtcacctaggctggagtgcagtggcacgatcacagcttattgcagccttgacttcccgggctcaaacgatcttcccacctcagcctcccagtagctgggaccacaggtgcgcatcaccatgcccagctaattttttaatttttaaatttttttttgagacagaatctcgctgttatccaggatggagtgcagtggcgcgatctcggatcactgcaacctctgcctcccaggttcaagcaattctcctgtctcagcctcctgagtagctgggactacaggtgcacgccaccacgcccagctaattttttttctttttgtttttttgagacggagtcttgttctgttgcccaggctggagtgcagtggtgtaatctctcctcactgcaacctccgcctcccgggttcaagcagttctctgcctcagccacccgagtagctgggattacaggcacctgccatgacgcccggctaatttttgtatttttagtagagatggggtttcaccatgaggccaggctggtcttgaacccctgaccttgtgattcacccaccttggcctcccaaagtcctgggattacaggcctgagccaccgcgctcagcctaatttttgtatttttagtagggatggggtttcaccatattggtcaggcgcccagctaatttttgtgatgcagtttcaccatgttggccaggctggtctcgaactcctgacctcaagtgatctgtctgcctgggcctcccaaagtgctgggattatggatgtgagccactgttcctggcctaatttttaatttttttttggagatggagtctcgctctgttgcccaggctggagtgcagtgcactgcacctccgcctcctgggttcaagcaattctcctgtctcagcctcccaagtagttgggactacaggcacccaccaccacgcccagctaatttttgtatttttaatagagatggggtttcaccatgaggccaggctggtcttcaactcctgaccttgtgatccacctgcctcgacctcccaaagtgctgggattacaggcatgagccaccatggctgacctaatttttgtatttttagtggagacggggtttcaccatgttggccaggctagtcttgagcaatcctcctgcctcagcctcctaaagtgctgggattacaggcatgagtcacggtgtccagcctgcaagtaatttagtttgctttgaatgcatggcataatgaacagggagtagctgtttgttcattcattccttcaatcattcaacaaatattttttgagcacctatcctatttcaggctctatactaagggctaaggatgcaacaatgaacgttacctcagcagagttcactgttatgagatttggatacgactgtggaatgcactgaaaactaccctaaagagtttgtacttggttcttcagatcctcactgcgcaaactgtggactttagaccagcaacctgggagtgtaccggaagtttgttagaaatgcaaaatctcagccaggcaagcgtggtggctcgcgccagtaatcccagcactttgggagggcaaggcaggtggattgcttgagcccaggagtttgagactagcctgggcaacatggcggaaatcctgtctcttaaaaaaatgcaaaaaaatattagctgagtatggtggcaggcgcctgtagtcccaactacttgggaggctgagatgggaggatggcttgagcccagaaggcagacgttgcagtgagccaagattgtgccattgcactccagcctgggcaacatagtgagaccctgtttctacaaaaacaaaacaaaaaaacaaatccaaagtcttaggttctgccctagccacaaacttacagaatcagaatttgcatttcagcaagatccttaggtgattcttatgcacattagtgttagaggagcattgttgtaggccaactaagacaataagagagtatgtacattggtcactaagttaaaaaaaaaagaaaaaagagcatgtaaatgaatgagccagagtaagcaagaaagtaagagagctagtaagcatgcacaaaaataaggaagtaatctaatcaggattggattggatgtgaaagaaaccggacatgggactattactgtagttagatgagaagtggaaggggttagatgtgagagatagaatcttttgtaaaaagatagagcgggccgggcgcggtggctcatgcctgtaatcccagcactttgggaggccgaggtgggtggatcacaaggtcaggagttcaagaccagcctgaccaagatggcgaaaccccgtctctactaaaaatacaaaaaaattagccgggcgtgatggtgggcgcctgtaatcccagccactcgggaggctgaggcagagaactgcttgaatccgggaggtggaggttgcagtgagctgagatcgcgccactgcactccagcctgggcgacagagcgagactcgtctcaaaaaaaaaaaaaaaaaaatagagctttggctggctaacatggtgaaaccctgtctctactaaaaatacattaaaaaaaaaattaaaaaaaaaattagccaggcgtggtggcaggcgcctgtagtcccagctacttgggaggctgaggcaggagaatggcatgaatccgggaggcggagcctgcaatgagtcgagatcacgccactgcactccagcctgggcgacaaagtgagactccgtttcaaaaaaaaaaacaaaaacaacaacaaaaaaagatagagctttggttccattaactcatactgggaacattgcatatcattcaaagtaaaaaaaaatcagcaaatctagtaacagggtatttaagatgtcttaaaaggtgccagttatttgttttagacaaggcttattggtatgtctatttcctgttaacgccacaggtccaaggtctatttctaagtattgcagcatcaagcccttaatcatgtaagttcacacaggggtaatgataaggatcttggaaattaagtcattatatccaagtttacaaaaagctgatttgtaaaccagaaattcaatttattaatttgcaatagagtaattatctttccactaaccagagaattttttcagttattaccactgtcatttttttttcttttcttttttttttttttttttgagatagggtctcactctgtcttccaggccggagtgcagtactgcaatctcggctcactgcagccttgacttcaagcgatcctccacctccagggctcaaaccagcctcccacctcagcctccagaacagctgggactacaggagcatgctaccgcgcctggctagtctcaaactcctggactcaaatgatcctctcacctcagcctcccaaagtgttggaattactggcatgagccaccatgcccagccccagtgttaaattttttattacaactttttattttgaaatagtttaggactattttattttgaaatagtttagtttgctacaagaagtagcaaaaatagtagacagaattcccacgtacccttcacaaagctttgccccaatagcaccttgtcaaatccaggaaattgacaatcgatacaacactatcaactcaagtgcagaccttatttggatttcaccaggttttttcatgtacttatgtgtgtgtatttgtagttctctaaaattttatcacctgtagatttgagtaaccatcaccaaaatcaggatgcacaattgttccatcaccacaaaaaaatctctcgtgttaccccttaatactcagtcttttcccaaccctaatccttgccaaccactgatctgtcctccataactataatttttcattttgataatatcatataatggaatcattgtaactctgatttttttcccactaagcataatgcccttcagatccatgtaagttttttgtatgtattaagtttatttttatttttattttttttgagacagagtttcgctcttgtcgtccaggctggagtgaagtggcacaatctcggctcactgcaacctccgcttcctgggtttaagcaattctcccatctcagcctcccgagtaactgggactacaggtgcctgccaccatgcctggctaatttttgtatttttaatagagacggggtttcactatgttggccagggtggtcttgaactcctgacctagggtgatccaactgccgtggcctcccaaagtgcgaggattacaggcatgagccaccgtgcctggccaatagtttctttttattgctgaatagtattccattccctgatggaaccagtttgcttaaccattcaccaggtgatagatattttggttgttttctgtttttggctatcacaaataaaagctgctataagtacttgtgtgcaggtttttgtgtaaacataaattttaatttctttgggataaatgctcaggaatgagattgctgggtcagatggtaagtatgtatttaactttgtaggaaagtgccaaactgttttctggggcaaccagtataagatcttaaaacttccataagtaatacatgctcactgtaaaaaaaaaaaaaaaaagaataaaataaggtggaaatatataaaacgaaaagtaaaatgacaagtcatggaactgtactgcctctttcctgagtagtaactgttgttaggtttcctgtatattcaagaatgttttggctgggcgtggtggcccatgactgtaatcccagaactttgggaggctaaggcaggagaatttcttgagatcaggagtttgtaaccagcctgggcaacatagtgagatgccgtctctatcaaaaaaatgttttatgcatatgcaagcaaatacatgtgtatataaatatatatatattccaaaatgtgatcacagtatacaggtaattgcaacttgattttttctcataacttagacatatttttttttttttttgagacagagtctcgctctgttgcccaggctggagtgcagtggcatgatctcggctgactgcaagctctgcctcccgggttcactcacgccattctcctgcctcagcctcccgagtagccgggactacaggcgcccgccaccacgcccggctaatttttttgtatttttagtagagacagggtttcaccgtgttagccaggatggtctcgatctcctgacctcgtgatccacccacctcggcctccgaaagtgctgggattacaggtgtgagccaccgcgcccggcccatatttgcaatattaataaatatatacttgttttaatggtgggcataggactattgtatgcccaccattatccaatgtatctattgtatggatgtattataatttctttactcagtcccctgatgatgaccatttctattgttgtcagtttctattacaaagctataatgaaaatctttctatatatatttctttataatttgtatgagcatatctgtatggtaaactcctagaaatggaattgctagatcgattttacatttaactgctccgagatactttcaactttttctccagtttttaaaatttttgtagagatggggttttgctatgttgcccaggctggtctcaaactcctgggctcaagtgattctcctgccttggccttccagtgttagaattgcagatgtgagccactgcatccgaccttttaaaaatttttatttttcagtttttttttaaaatttactctcccctcaatgatatatgagagttctcagttctttaccaacactaagtattatcaacattttaaatctctggcaatctggtaggagagtttgtatttaatttgcatttattttattttattatttttttgagacagagtctcgctctttcgcccggctggagtgcagtgacacgatttaagctcagtgcaacctctgcttcctgggttcaagagattctcgtgcctcagcctcctgagtagctgggactacaggtgagctaccacgctcagctaatttttgtatttttagtagagacggggtttcaccatattggccaggatggtctcgagtgatctgcccgcctcggcctcccaaagtgctgggattacaggcgtgagccactgcgcccggccttaacttgcatttcttagtggcaaatgaagttgagcactattttatgtatgtattagccatctgtatttcttatttcttttttttcttttttttatttttgagaaggattctcgctctgtcgcccaggctggagtgcagtgacactatctcggctcactgcaacctccgcctcctgggttcaagcgattcttctgcctcagcctcctaagtaggtgggactacaggtgtgtgccaccatgaccatctaattttttgtatttttagtagagacggagtttccttgtgttagccaggatggtctcgatctcctgaccttgtgatccgcccgcctcggcctcccaaagtactgggattacaggcgtgagccaccgcgcccggcctagccatctgtatttcttctcccacaagtagactatattctttgtccacttttctactggagttttaaattttaccatattgattttgacagttctccgtatcttgaagaaattagcttttttcatccatatagcaaacattttctcacagtttctagtttatcttttgactttgtttctggtgtcttggtatacataattttttaatttctgtggacttaaatttatttatctacttttaggtttctgggttttatgtttagaatggtgtttaaaaatataaaaaatgggctggcgcggtggctcacgcctataatcccagccctttgggaggccaggcgggcggatcacgtgtggtcgggagttgaagaccagcctgaccaacatggagaaactccatctctactaaaaatacaaaaattagctgggcgtggtggcgcttgcctgtgatcccagcttactcaggaggctgaggcaggagaatcgcttgaaccctggaggtggaggttgcagtgagctgagatcgcaccactgcactccagcttgggtgacagagcgagagtttgtctcaaaaaaaaaaaaaaaaaagaaaataaaataaaatataaaatatatatatatgctgtccagaggagaagactatctggaaaacctaatttataatcagaagtctgttccatttgcatggagttaaagcaaagagatctgtgggatgttttagtccgtctatggtaaacctggaggattatctttgttgtactgtggcatatgaatttcttgtgaccagaacatttctgcatcaaatagtgtcttgccttttatatagtatcagaggtttgtaagttttaactattcaactctcctttttcactatttcttattaggcacccaaagcttctgcctttacaatattatctcataaaggacatgttacaaacaagattaaaattattttccatcagttatttcatttttcattatttcatatttcgtttgatggcattttctccctttgtcctcacattcaaagggtgaattgtttatatttttcagtaccccatgaaataaactccacttcttatgataggactggggcacctagcattctgtacatattgaagtcttgataagtatttttttgaaagagctctaacaaaaaaaatggttactgtaaaatattcttaaatattagtaaaaatttgctacaacatttatttctgatgttataccagtttgttattaatcttcagtggtatttttcacaaaatcagagctaatttgctaaacagaagaacttttcagttttgttctaagcataaaattgtttaaaatctcagttgctacatagataattaactgagaatacaaatttataaaatagataaaaaactatttgtaccatgtaccataaatgtgatgtttggagcagaaaatcagtagttttcagctaatactaagacaggaaatcatttaatatcaattgagattaaattggcacaattgaactaaattaatgtaaaaatgacttggtacacggcccaatttttctattacttcaagtggaattttgcattaacttatataactctgtaaattttccactactctctatttaatgttctagctgcatcattctgtaacttgaatctattaaaaactgtatagcattctaccaaagatggtctataaaagaaatggaaatttattttgaatagtattccactctccagagctttagaggtaagtaaaaatgtctcagattttacttcttgttattgatattcagatgtttctgtttaacttttattgtccagttgattaaatatactataactctttttgtaaagttgcagaaaaaacaataagcacagaggatgggagagaaactaacaagagatatggaaggaatataatttaaggactgaaaataatcgttatattacattaggaatgtttcagaagtgatatcggggtgaaagcttcatgatttacacggggctcaccctatttctcagttggaaaatttgttttgttattaatacgttttatttcttttcttctaattgaaatgtaatttaatatttaagaaatattttaaccaaaatttcaaaaatggaacagaaacgaagacttcttaagcaaacactattttatgaatctacgaacttctataacagcaatggagacactgcaataggtcacttcttcctgtccaaggaaaaagcggcgctttggaggggataggccctcctcgagtttttctcccccgagtaaagagctcttggcggtcaaaggtccaatacactggattcgaaacaaacaaaaaaaaagggtgacaaagattttagttaacaggggtcggaggagcagaaagggtcttttcgcacttcaaacatcttgggggagggatgggaaggcaggatgcgaagtaacctaaattcccaaccatttcgcgtggttgcacccgcccaggaaggcagtggatgcgcgggggaggcggggtaggtccccctccactccttttgcccaaatttcgatttccctccacttcgctcggtcctatctcttcccccgccccgagagtggcgaacaaattggtcgagcgcccggcctagcctagtagtccagttctttaggactcctagaacctggagatacagaccacgttttctcggagacgggaccagtgggctgtaaagcaaaacaatttttctttcttttccagggctaggtcttactggtagagaatcagctcgctctctctccacacccgaagcaaaaagcaaaacaaaaccaacccgtattccgcccccgatctagcccaagtagctccattaaaccatttaggatcaggtgccagagttaagcgacttgggttcttttggtgggaaggggtagggacaagggggcatcgaaggtacgggaactagggccacaggcccctcacaggggtgtgtcagaagaggggacttcgaagggtgatgcccgactgggctgccaccttagcgcctcgcgaggggcggaggggcccggggaacgagtcccggagcgaacccagccagcctctggattcccacggcccagggctccgccggacattcctaccgccctcccctcgacaccccactaaagacagaagaaccgcggctcgatcgggtccgcggcggaagcgcggccaaacgaatgagtaagtcaggcgcgggcacggcaccttgtttaccccactcggcggcgcgcccctgcgggcgcctggtttgcgggcggcgtcggagacgctgaacccgggagtcagtcggccacgattggtcggtgactgggaggaggacgctgggtgggagggctgggagccaggcgttgcagtggcaactctctgccgctagatgccgctccctcccaacgggagccgggcgcgggttcgtggccgacagatggcgcctgcgcgttccattcgcctccaagtcgccgaagagcgaacaccccaaacaatcccgaagcgccaccaaaaaaaaaaaaaaaaaaaaaaaaaaaaaaaaaaaaaaaaagaaaaaaaaccccgccggatccgaccgccactttcaaaaccccccaccgctctagaaccgcgggagcttccgtccctgagtagaattcgagggtgtaaagaagaggaaggggaaaaatatcttgtaccagcccaggggtgaagaagcccccggcctgagaaagaaggaggagtgggggaggcgaacagtctcgttgctgcctctgtgtacgctgaggggggaggtaagttataaaatggcggaggcgaagcttctagaagtttggaggggcacccggagggcgcttggcccaccgtgaggtgtgtatgattgaaacagggcgagagagaggagttgggagggaaagaggttgggcactctgttgccattgaatttcccctctgctttcttcgcccccatggggggcagccatggaacggggggcagagtccaggcgggaggatctttctcgcccccgcggcgccccccgccctcctttctcccttctccccccaagtcgctaccccaacacttccaaggaacttccagccccccttcctccctacctcctactcctagagtggctttctaccgcagggctcttcttttcgactaccctcgctgaagattttctcttccttccctcgcccaactctccctcggggcctctacggagaccccccccccccatgggtggcccaaaatggagaacgcggagcagcgcaagatggaggctccgcttctctgtgtagcagtagatttaggttccttttctccggcaggctcctaagcctaggagagcccgaactggaggtggggtggggtgcgagccgtagtcgggggaggaaagccgggaggctgtggttggggtgggggagagcgcggtgtcgcggtgaggggaaggcagagagcaaaatggtggtgctgggaacctaggggggaggggagaaaggaggctcagttgtgtatatttgggcctcggaccgagggaggcgagggaaaatctactctgatcacacccctccctcgtgccccctcccttctcccttcccctcctcccttccctccctcccccctccctccctctcttcctcccttcctagagagggaacaacattcatgtgacgggcccctctgcttctcccccgccccatcatctccagcgcgtggtgggggaactgctggggaaggcgattggcatcgatctctccatcccttccgaggcccgacttcggtcagttttcttcgggcaacaattttctaaattggctggggtctggcggtgttggcccccgcgcgcagaccttgccccgaagggggccctgcctgcctggcatgggcggaggggggaagggcgggagtggaaggctgtttgttggggggttttggcgccacttttgttttagttttagtgctgcttttcattcccacccccacccgcactgtctttctcaaggcacgaactgagctgatccttgccccaggtaggcagcctgtgcgttttcactccacacttttattcttgctcggggtcgactttcttttttcttctcccctggatccggagatctgcggacggcgattttgggacgaaaagggtcggatgggccgtgggagagagaaggtgtgggaaacagcatcaagtagttccgcaaaactttgagccccgttcccattttcttttggcctagaattgtgaacgtattgttgatttcggcctttttttccccccgtcgcgagaatgtcttgttttgcctttagttttttataaaccgctgtactttcgacatttagtttccgctcccccttggtgcatatgtcattttatttttaatccttaactgtaatgggttatcgtgtgattttcgtgcttcagtgctcggctttaatttttaatattgtattagtagtttcatccggtttgtgagactttctcttccgtggcctagaatgttttttatgttgttgcctaccacccctcttccctctccctccttctttctcttggatgtagtttttaaattgagggccatggtgttggattaaatggtaatttacagtttacatgatatatctattggaaacttttgatctgtaaggttagatttaaagtaaacgaggcgcttgtgttggtttgcaatggttccttaaaatgcgcgggccacccccttctcccaccataaagccccatcttcccttcacactggagtgtaaattccataccccttttctcccacggaccgccgtatttcgcagcagccacaccctgtatttgtctctgtggattggactcattatcagcttaatttagtgactcttaaaccaccatgatgggacttgcttaagcacgaagcttcttttcctgtttagtcctagtggttagtgtcgaaagaggaatcatcgaggtttcttgatgaaacctagtgcggtccaacctctgcctttttttctgttgtcttttttcctactccgggctgttggcggtgtcagcaccgctgctgggggcgggggtggaggggagaaagagtcgggttaccgaagtgcgtcattcctggctctagcagggcctgctcgggagctgctggtgtttgttactgtcctcgcagcacttttctgccaaccttctctctctgcgtattggttaggagcaaaagcaggaggcggtctcctaattctgtctgtagcctagcgcgttgcgtttaagggtatatctgaacttattttgttaaaaaaaaggctctgggaagtggatgcatttgtttaatgacatataattcaggtagtttaggcttgctctcatatactttccgatgaacagtggggttaattttcaacattttcaaccacttaacgttaaaatgcctggttttctttctacattgatatcaatctataattagggatcagaaggaccagtttaaggtatataagtgttcagcagtttttcaagtggttgaattgcagttttatgacacattatgttaaatagtcgatttttttttttcattttgaactaaggtgccacgttaagtaagttaattgcagatgtttaagttcgttttcatcacatttccctatttgtctttttaggtataattttaaatatgccctttgggtttatggacttcattaaaattcttaaagatggttatatctttgtgtttaactgaattcttaaatttatcacctaccaaagaattgtgtaaggcgtaaggcggctgtatagttacattgttggattttgacttaacatgctagtttttgatacttttgctatctttgggtagaagtgtacttagagaacatagtatcttcctcttaattctttttgaagataataatgagaggagggagtgggtaggaggtaggtgtgaagcagaagtggccttgagttgattattgtagctggatgaatacagaagcgctcattgttactattattctctctacttttgtgcgtgctgttaaacatttccatagtttaagataaactttttttgcagtagaatttccagattgtcttacagtcttgggggtaatgacttaagtttatatttacatgtcaaaattacttgcataggaaatttagccttgtgtaagtgattacacaatgcttggcaaaactttcaaaaaaaaaaaaacgtttaaacgggaactagtataaaacaggcaacataaatacttataaattggttgaactttaaatgtttataacttagcctgaatgtgctctacttttagtttcctttttaattctttgaaaacaggaaaattccatttgcaatttttgtaaattctgcttagtgtctatttcatcaagttggagttacagtgagtcagtatgaaagggatttactattaataggaggggctttggcagttgcagtaagtgacagtggaagggattgaggtaccatagggagcattcctggtagaaagatctaggtagctgaattcagtttcagaatttggtgtttaatgactaggtagagaagtgggttggaaaagaaatgtacttattagctattccttcccactgtgaagtaactatagtattctaaggtgtatcagagactggcagagagggtggagtgggtttttttttttttaactgataagaaaatgagtgtttacatttaaaatggtttaaatcacctcatgccccaaggatctggtgctataactagttagaagttgatatgtaaaatatttcaatattgtctgttaacattctgaccattacccgtaaacagtaaaaatgtgttgcaatgacaatccttggtctcccttaattagtgcatttgtgaactgctcctaaattctattaaggtaagtgccttttttttttttttttttggcagttctatactgttcagtgtcaggtttatttttttcccccaggagatacattttaaaaatacatgtcacagttccgaaaggaatccaaaacaatggatatttaatttatagcaaaatttcaccccaatctgggaacagacattttgtaactgttaccattagtctgtttgtgtatttcatattcaggattttagctttagaaggatgttaaaggaaaataggtgacatatttcaaatttttattcatatacaaatattcttagtagatggtaaggattgtggcatcagatttattttattgtggtgaggcaatagctaaactactacactaacacatgatgagtttggtaactttcaagtatatttagttaggattttttaaagcccaaatgctcaaataagattttcatgaaatcaaattctacatttctttttcaactgtattgacttctgcggtcacctgaggacttatgaattaaagtgaatgggatgggcttgggggacaggctaaggctcagatctattcctttgggaatttagggttagatgtgaaaatatgcagtttagtaatgcttaatattgtgcatgtttaactgataccacccacagtcatatgtgggaaggtagtaaacagagaatagcataatctttctgcttcgggttctttataatagatggcagacttcagtttttgatgctgcaagttgacttttgaacttaaaccaaaatcggcggggcacagtggctcacacctgtaataccaacactttgggaggctgagaggctgaagtggggggatcacttgagcccaaggagttcaagaccagcctgggcaacatagggagaccccatgtttatagataatttaaaaattaggtgtggtggtgcacacctgtggtcccagctatttgggaggctgaggcaggaggatcacctgagcccggtacatagaggctgcagtaagccacgattgcgccactgcacccagcctgggcaacagagcaagaccctgtctcaaaaaaaaattaaaaataaactaaaatgtacagtttactatataatggagtaccgttttgggagttggggagaatagcgagggagagggatagtttcaggtatgggcatcagtatatactgaagtgtgattgttggagagtaaggaaggaactttaaagacataggctattttaaaagtttttggctgggcaccatggctcacgcctgtaatcctagcactttggaaggctgaggcaggcggatcatgaggtcaggagttcaagaccagcctggccaacatggtgaaacccccatctctactaaaaatactaaaattagctggacgtggtggtgcgcgtctgtagtcccagctgcttgggaggctgaggcaggagaatcgcttgaacctgggaggcagaggttgcagtgagctgagatcgcgccactgcactgtagcctgggcgacagcgagactccgtttaaaaaaaaaaaaagttcttaacatttttctgcattggctacatgttcaggactttagttcgtgtttcagtactgtccctgtgtaataattctttatgtttctgggtatcataaatgatggttattgcgtgttctgattggcaaagatatatgataaagcaaaattatcagtttgatttttcagtctcttgagttgactgctttacgtttaatttacccaaattttatatttcttcagtgtaagtggtgttgcttagtggagtctaatttttgttgatgtgccttttaaaaatctatgcatcttcagcagctgtggtaatctgctacctgaattgtgtttttaatgtgtgcttgctatagatctttgatactcaccagtagacaccaagaagtctttacatatggttattgtagtaagtcaagaagagatttatttattttttgagacggagttttgctcttgttgcccaggctggagtgcagtggcatgatcttgggctccctgcaacctttgcctcccgggttcaagtgattctcctgcctcaacctcccagtagctgggattacaggtgtccgctaccacgcccagctaattttttgtgtttttagtagagacagagtttcaccatgttggtcagggtggtctcaaactcctgacctcaggtgatccacccaccacagcctcccaaagtgctgggattacaggcggagccaccgtgcctggccaagaagagattattgaaattgttttccattccttctgccgaagaaagagaggatgaataatgtcaatggtgtattttttttttttttttttttttttttgagacggagttttgctcttgttgcccaggctagagtgcaatggtgcgatcttggctcactgcaacctccacctactgggttcaagcgattctcctgcctcggcctcccgagtagctgggattacaggcatgtgccaccacaccgggctaattttgtacttttagtagagacggggttttttccatgttggtcaggctggtctcgaactcccgacctcaggtgatctgcctgcctcggccttccaaagttctgggattacaggcgtgagccactgcgcccagctggcctattcttttttattacagtcatgcattgcttaacggcgggcataccttctgagaaatgcatctttaggtgattttgttgtgtgagcatcatacagtgtacctacacacacctagatggaatagcctactatacatctatgccatatggtatgacctgttgctcctaggctacaatcctgtacagcatgttgctgtactgaatatcgtaggcagttataatacagtggtaagtatttgtgtttgaaaacaaaaaagatacaataaaaatacggtataaaagaaaaaatagtacacctctatagggcagctcccttataatcttatgggaccactgtcttttttttttttttagatggagtctccctctgtcgctcaggctggggtgcagtggcgagatcttggctcactgcaacctctgcctcctgagttcaagcgattctcctgccttagcctctcaagtagctgggattacagatgcatgccaccatacccggctaatctttgtatttttggtagagacgggctttcaccatattggtcaggctggtctcaaacgcctgacctcgtgatccgcctgcctcagcctccccaagtgctgggattacaggcatgagccactacacccagctgggaccaccgtcttatatgcagtctgttgtggactaaaatgtcattatatggcacatgactgtattttaattgggaaatacattactaggcttgatgagacaaactagggagatttcagtaagctctgcctaacttaagggaccattcaaaggtaaaatttctttgtaagaaataagttggctgggcgtggtgactcaccctctgaatcccagcactttggtaggccaaggtgggaagatctgttgagcccaggagtttgagaccatcctgggcaacgtagggagaccccatctctacaaaaaaatttaacaattagctgggtatggttgtgcagcctgtggccccagttactggggaggctgaggtgggaggatcacttgagccccagcaggttgagcctgcagtgagccatgatcatgcctttgcacttcagcctgggcaaaagagtaagaccctatctcaaaaagttgtttaaattctgttgtacatcgttcaaggggggtgaaaaacaagtcctatttacatttttgcaagaataacttttgaaacctgaagcattctaagaaacttaatttaactgctatttaagttcctactgaatgccagtaatgctttaatcttctgtttaatcttctcaaccactttgcaggataggttgtcctcatcattttacacgtggggaaattgacgctctcagagagtaaatgccttgtctcaagtcacatggattcacactcagattagcctggcctcaaaacctttgtgcttttttgttaaactcagttgtttcccttatctggtttaggtcttgggctatctgtcatcagagagcatgcattcttattttaattttacaaaatcaagattctttttcatgtatagtgcaaggtaaatatagatttttacccagagtcagataagttgctgcctgaggtctatattgtcttttaatagtaatagaagtagttgaaataaatctgagcattggttttgtttgcatatgcttattaaagtttgtgggataatgaattgtattcttgaattttttggggggggaatcatgtgatacatgaaatggtttcatagatattttttcttttaggtcatttatgctctatttaaaatggagattacatgtgtctgagaattgttccccagtccttcagcttgttttactgagtggttagattcgaagtaaaaagtttaggctaatctttaataattcagcgctctggttctttaggggtattttttgttatttaattgtaccttaaaaattcttttttattctgttaatatctcctgtttgcttatacttcctattttagttcatctttcactattaagttttcttgttcttactgttatcaggtgataaatagttaatatcagggccccaagttattaggttcattagtgatcggtatcttagtctcagttttctttttcctttctgttttttttttagatggagtttcgcgcttgttgcccaggctgtggtgcagtggcatgattggctcactgcaacctccgcctcccaggttcaagcgatttcctcgcctcagcctcccgagtagctgggactacaggcgcgtaccaccacacccggctaattttttgtatttttggtagagacgggatttccccatgttggccaggctggtctcgaactcctgacctcaggtgattcacccatctccaccccacaaagtgctgggattacaggcgtgagccaccgcacccggtcttcctgtttttttttttttttttttttttttttaattgtaactgaagttttttttatctgaaggaattctggttgttggacttatgacctaagataaatttatggagacaaggaaaacaaaatatatatatttgtgcttttcatagccatgagtcaaatttatatgtttatattgatcattcctttaagctttaacatgtaggaaatacttttttcccaggtgatgaacagcagtcttatactcagactctttgttcattgaggagtcttttcatccatatttccccctttgtattccaagaaaaccaagaactggtgttccatgacagaattattccccgaggcatccattgtatattataaattagtttctcccctgcacatctagaaagatattagttaggtatcattcttgggagacttcaggaatagtcactgaagtcattttctgagttctgtagtcaagtcattttctgagttctgtagttaacatgaggaacactggttgagaaaggctgctagaatattaagggacttggtttggcactaaataaagttttacttttcactgtcactttcctgttagtaactctaatatggcctctattaaaattcgtgatacaatgtgaatgctgttgatactgctattgctgtgggataaattggttagtgttgatttcaagcagttagtgctgcttagttgtttgaaagaatttaatgtgggacattaaatgcatcattttatttataagaaggaatattgtgggagcactgttcattatacagttcaaaatctataaaaagtcactgacagtgactaacatgaacaagaactaatactaactgaactcttaccatatgccagatactcttaaaaatgctttgtgtgtattagcttactttatcttagtaactctatgaggtaggatgaccatatgatttattgttcaagccaggatacttttgaacgtgaaagggattgcttcttggccttttggctaagatcaagggaagagtgagtgaaagggggcactcactgaatggcatgctgagataatagcagaaactaggactgtttgagagaaaggatgtgtgatgaccctaattaataccttctttttcagaagaaactgaagcatagggagaccaaataacttgcccacttagtaagcggtaagaagggatttaaaacctctgtagaggctgggcgcggtggctcatgcctgtaatcccagcactttgggaggccgaggcaggtggaccacctgaggtcaggagttcgagccagcctggccaatatggtgaaaccccgtctctactaaaaatataaaaattagccaggtgtggtggcatgtgcctgtaatcccagcttcttgggaggctgaggtaggagaattgcctgaagctgggggtagaggttacagtgagctgagattgcgtcactgcactccagcctgggcaacagagcaagactcttgtctctaaaataaaataaaacctgtagagatttctatgggaatgaaagtgatttaaattattttaaattgccatattctgggagtttgtttacttttacccttttgggggagtttttgttggtacatggtcaatagtaaaaagacaagatagtgttttttaaaatccaggagaatttccacttggatttttttcaagtggctgttagactgaggtgattatattgtcttaatgttgaaaagcaactttcctgagggccacctaagttaaaacaaaactctaagataacgacatctgagtttgttttccgtatgtattattcaggttccctttaccattttcttaggcagaaatgtggattgtagaaatttttactgagaagacagtagaaagaagatgaatacttttgtgactagggagaagtgttactagaaaagaaagaaaaaggtccagtttagagacttttgaaggtaaactgattctgtagcatagtttgagagttaagtcttgtagagattaatatgtcatttcataaaaaatatccctcttttattgtgatttttaaagctattttatatttctggcctgtttatgcttgtgctgtcacctgaaaaaatattactggtgaattcaaatgtggagaaatgattttggcacagttgtggaaacaactatattgtaaactaagatctttttttttcctttgagtgggagtgaatggtagtatctgatcttaaggagacttccagttttgttttcatacttggctattttaatagttcattgagtaatttgtgtttttttttttccctctagctagttgacgtttggaggttttgttggtgtaactatcattttttttttttctttttttttgaggtggagtcgcccaggctggagtgcagtggcgcaatctcagctcactgcaagctccacctccggggttcacgccattctcctgcctcagcctcccgagtagctgggactacaggcgcctgccaccatggccggctaatttttttgtatttttagtagagacggggtttcaccgtgttagccaggatggtcttgatctcctgacctcgtgatccgcccgcctcggcctcccaaagtgccgggattacaggcgtgagccaccgcgcccggccaatttttaaggtcttttatttagttcattgaaaccattatgagacaagatatagcttgaagggggactgcatttctcaccagatgaaggaatttgtggcctgtgtagtgactacgggagacaaaaggttattttgaggagatttgatttattatataagattaatgggctgggctaggtggctcatgcctgtattcccagcactttgggaggctgaggctggtggatcacttgagctcaggagttcaagaccagtctgggcaacatggtgaaactccccccctctaccaaaaatacaaaaaaaaaaaaaaaaaaaaaaaaagaaccgaatcagcctggcgtggtggcgctcacctgtggtctcagctactcaggaggcagaggtgggaggatcacttgagcctgggaggcggaggttgcagtgagctgagattgtgacattgtactccagcctgggtgatagagtgagacccccactcaaaagagaaaaaaaacagtagtaaaataaaataaaaaaaaaatgcagttggattttaaatactatattgctggtttttaagctggggtccatgaatgggatggagatttgtgaaccctctcaaattatgtacaaactgtatacatgcatttcatcagtttctctagggctcattgttaaaatcagctggtatttaaagtacttatgggggaccgggtgcggtagctcatcatgcctgtaatcccagcactttgggaggctgaggcaggcagatcatgaggtcaggagatcgagaccatcctggccaacacggtgagaccccgtctctactaaaataacaaaaaattagccgggcatggtggcgcgtgcctgtagtcccagctactcgggtggctgaggcaggggaattgcttgaacccgggaggctgagattgcagtgagccgagatcgtgccacagcactccagcctggcaacagagtgagactctgtctcaaaaaaaaaaaaaaaaaaaatagactgggcgcggtggctcacacctgtaatcccagcactttgggaggctgaggtgggcagatcacctgaggtcaggaattcaagactagcctgagcaatgtggagaaaccccatctctactaaaaatgcaaaattagctgggtgtggtggtgcatgcctgtagtcccagctattcgggaggctgaggcaggagaattgcttgaacctgggaggtggaggttgcagtgagctgagatcacgccattgcactccagcctggacaacaagagtgaaactccctctcaaaaaaaaaaaaaagtacctatgaaagatgggatatacaatggtaaactagattacatagtctctgcccttaggggaatatagtcagttggactttgtcactacagaagggttaaaaaaatacctattaaaataccgtgtattgggtttacattaaagaatattgggctaaaaccagccatcaatgcagttttggcactgtgttcctaatgtgagattagtgacatactgaaaaattagggctgcactgaaaaacttcagggaaaaataacaactgagaaaacaagcagaacaaccgagggctttaatgtagccttggaatgcttcagtctttggcagttgttaataaacaaagttaaaagagcccatgatcatcttttcttttcttttttcttttttttttttttgagacggagccttactctgttggccaggctggagtgtagtggcacaatcttggcttactgaaacctccacctcctgagttcaagtgattctcctgccttagcctcccaagtagttgggattacaggcacccgccaccaggcctggctaatttttgtatagagaaagggtttcactgtgttggccaggcttgtatcgaactcctgagctcaagtgataacacccgtcttggcctcccaaagtgctgggattacaggcatgagctaccgtgcctggccccatgatcatcttatatatgcagttactgttatccaaaggttgataccttctttttttttttttttttttgagatggagtctcgctctgtcgcccagactggagtgcagtggcgtgatctcggctcactgcaacctctgcctcctgggttcaggcgattctcctgcttcagcctcttgagtagctgggattacaggtgcatgccaccacgcctggctaatttttgtatttttagtacagatggggtttcaccatatttgtgaggctggtctcgaactcctgatgtagtgatccgcccgccttggcctcccaaagtgctgggattacaggcatgagccaccacacccggcctagtatttgattttcattacattcactcacccacacactcatcatataaaatgattgaggtttggtatacttgaagtattttcatttcaggattgggatatatgataacctctttccttagatttccaatctttttttcctttcaaaagcaagggtaatttttacagtcaccagtgtgtctactgccttgtacctaatttgcaaactttatggtggctagaatgttattacaaagaacatgtttgatatcttcttactaaaatagaggcattttttgtagtctaaagaaatagtatatatataaagataggaaaatgaacctttgagaatttcccttctacactattaaaaagaagaagataaaatgtaggaaatattattagcaaaaccataatatttttcctttgggatatgtccctccctgtttccaccactcattcagtccaaaagacattcctcagactttactcctggcaggagaattgaggaagtggtggtagtcatggttggcagagaagcagaagcatgaaggtatgtttttgaaaagcaaacttgtcaatgacaaatggatttttccagttgtgagtatacgtacttttttttgagccagagtttcgctcttgttgcccaggctggagtgcaatggcgtgatctcagctcaccggcaacctccgcctcctgggttcaagcgattctcctgcctcagcctcctgattagctgggattacaggcatgtgccaccatgtccggctaattttgtacttttagtagagatgggggtttctccatgttggtcaggctggtctcgaactcccaacctcaggtgatccgcccaccttggcctcccaaagtgctgggattacaggcatgagccaccatgccctgcggaatatgtactttttgagttttgattaaatatcagtgcataaagtgctactgttcattgaggaatatttagtagttatattcatatttgggtattctgaatatacttgaaaaatttcagaaggatcatttggacaatatgggattttattagaaaagttcctatagtaggacatttgttcctaatccttttaagttagactgaagcagttttctaagttactatggaaaaataggtttctgccgggagcagtggctcacacctataatcccaacactttgggaggcagaggtaggagcccaggagttccagaccggcctgggcaacagagcgagaccctgtctctaccaaaaattcaaaaattagccaggcatggcagtgtacatctgtaatctcagcaacttgggaggctgagatgggaggattacttgagcccaggaggttgaggctgcagtgagccaaggtcgtgccactgcactccaacctgggtgacagtagtgaccttttctcttaaaaaaaaatttaaaaagatgaaattaaattttaaaaaagaaagatttgtaactggaggcaattgtgtgtgcatatatgtataaatatatagtatttgaatgtacaatattggcaaatatccagatttatctcatagcaagattaaccttttcagtctaggaactgttttcatctgattttgaatccttgtttcattgtgcagtatatattatacaggttctcaaatggtaattgaattgaaaccttcgtttttttttaaagaaatgtaaacctgcattataattgcattattggtattcatatttaaaagctgcatattggaagaaaaatagtttcccatagttggttttacattaatgataaagtttgtatcgacaggataccacttacagcatcttcttactatatgacaagttgtactaggctccctaacatttaattttttgtttctcacaacaaccctattgaggttgtttactgaggttcagaattgttagagacttgcccaagatcacttagctaataagtggccaagcttactttttgaatccaattctgcctaattccagaacactcctttacatggtgatacactgcctcccagtgggatgatttatagatttcatagtgatactttctttggggaaagagaatataaaggatacaagaactctaaatggaaaagacagaggaggaagttaaacttctcatagtggtcaggaaccttttgggggattaagtaggaggaaagcttattttcagctgagagctgatggatgtttgaagttgcatgtgatatgtgtcatgttttataataaacatcaagtagcaactagaaaaggcttagcggcagggagatgataaagtttcttacactgtagtgatgataaagtttcttacactgtactgatgataaagtttcttatactgtactgttttaatcttgagtaaagtgacatctgaattaattttaaggaattaacctttatagaaaataaactgaaacaaaatgttaatctaaagcattgtctccataggtagtgttcccaccaaagaacaataattctaataagaataatctgttcaggtaaactggtctaagtcaggcagcattatgattccagtttgtgttttggttttcatattccactagcctcccttttctgctgttttttttccccccctccggtatctttacagtttctgtagttcttcataaaaagtagaaatgttttgatggcgatttccttattttacttttatgctgttactgctaacagtagacagccttatttgtgaggcactgaaatagaagtgatttcaaaaattaatccatttcgtgactcagaaacatttcctttaaaaataatgaaaaaaaatagaaaaattagtccatttaaatttccctacaagcctgtgaggtgttgatgctattattattttctgtttgtgtgtgaggaaacggaggcatagtgagcttaaactttttctaagcacacacatacttaggaagtgttggagccttaatgtgaacccaggcaatctggttcccaagtgtttttttttttttttttttttttttttgagatagggtctcattctgttgcccagggtggagtgcaagtggcactatcatggctcactgcagccttgactttctgggctcaagcggtactcttacctcagcctcctgagtaactgggactacaggtgcatgccaccaagcccagcttattttcatattttttgcagagatggggtcttaaccatattgcttaggctggttttgaactcgtgggctcaagccacctggccgctttggcctcccaagtgttgggattgcaggcgtgaaccaccgtgcctggccactactgagttctttttttttttttttttttaacttttaagttgagaggtacatgtgcaggatgtgcaggtttgttaacataggtaaacctgtggtttgctgcacagatcatcccatcacctaggtattaagcccagtttccattagctattcttcctgatgctcttcccccactcccacaggccccattgtgtgttgtttccccccatatgtccatgtgttctcatcattcagctcccacttataagtgagaacatgtggtgtttggttttctgttcctgagttcttaatgctacactaccatactgctgatcagtggacaataatgtgagtggtttcttcatcttggcagtgtacttttaagtcctctatttaattgtggagtatgtttgtgcatccttataggaattttaggagatagcagaggattgggcaaatctttgatcctcaagattccccagctgtacaataggtgtaatcccatttgccttataggttatttatagagactatatagtaatacaggttgagcatcccaaatccaaaatcttccaaaatctgaaaccttttaagcacccacgtgatgctccaaagaaatgttcattggaacattttggatatgggatgctcaactggtaagtataatacaaataatcccaaatccaaacaatattaatatttggattttggaatatttatgtttgaaacacttttggtcccaagcattttggataagggatactcaacctgtactttttctgggatttttctgtgtgccagataataggctgagggttttgctggcatggtaggccccccagatagctcagtaattccatttattgagtacattccatgtgtcagatacttgaggtaatatactacctttagttattacatgataggggatattatacccattttatggatgagaaaactgaacctaaagaaattcagtaatttgctcaaataggtttttactttgcggcctttgtacttgttgatccctctgcctggcttggtttctcatttctctaggatattttgctcaaatattaccctttcagtggaacgttccttggccatctcattaaaataatatcccttgctttgccagccctcctttttcagtttattttgcttaatattaccatcaaacatacatttacatgagttgtctctttccccactctagaatgttaagtgagaggaaggatatttgtcagccgcctttatattgctttaaccccagcacctagaacagtgcttggagtgtagtaagtatttaatatttgttgagctaatgtttatgtggcatccagggatacactggacttatttgcaagctgatcctgaagtaaactaatttcatatttaacagaccaaaatgggcattccttagaagtgaaatgctgtggcaggtgtttgggcctgttttgggtgggggttgggaggcagttgagtctcctgtagtttttagaggcctattctcatgaattgccttgagttccaggaggagtatatgccttcagctcagcttctaggttctgtagagccttttatctattagtacaggtctcttaaagctgctgcttcttacttaacttgcaacccctcattttgcccaaagattctttgagtgaccatttatagtgtatttgtgatgatcacagcatagagcttgatgtgaagcagagggttagctttgaacagggggatcctagctttgccatttataacttagtaggagataacatagcatacatatgtacatttctagatagatacatatgtgtgtatattttaaaaatgcattgtgctgaaactttcaataattaggttttggttaatatttaatattttgatagcacatagttttttctgacatcttggaatgcataccctttttgtttctgcttctcaaaacatttcttgcaataatgtgtgtagttggaacatagtagtaataatattttactgtactcttgcatccaaatgcaagctgattttggagagaaagagacattggattttagatacttcaaccttaagttgatattatgtaactgtggttcagcagagataagagcaggagatttttttgggatcattatgcatagtgtacattggcttttggtgggggtacttagaattaaagagccggagggtcagaggtgaaaacatcatgcttaacttggcaggaggaagaagtaggatcactgataagagtggtcaaagaggtaggagaaaatttaggataatgtagcatacaatccataagcatctcaaatttgaaaagaatccagatggcatgttctcccatctgggagatgcttttaaattgtatacagtataaaaactgttcttccaattatgtcaagttaaaattatctttaaagctgatatgatcaacaattatccttatgtagattgtttcctttgtcgcatctcatgggaattgggttcttctcccacactgggtcccaggttacaaataataggtttaagctgggaagtggtcagggacaggaagggagggcatatttggctttattgaattctacaaagtcaaatagaattgtattggaattattttacatgcaacattggtattagtgtggctgatcaaagaattgattgtacttaaatatgcaaatagtattaggataatacaatactgcaatttgatgtcctcttcaaaatagctctgaaaaatatgattggaatttctggagtctattttgaaaaggaaaactttttttttcttttttccttctgtacttcatgtgaaataagtgtgtaggcaactactttagtttctttaagttttgtgtaaaagctaacttgggtagaaataatgctggagatgagtatcttataaaaatcacttcatttttctgcttcttgagagaatattttacagggaaattattatcaatatgaaaaatgactcataattctacttttctcattccagaagttttttttcttaattttggtaaaatatatataaaatttgccattgtaaccattttaagtatacagttcagtggcattgagaacatttacgttgttgtgcaaccattgtcaccattcatacccagaatttttttactatctcataataaaactgtacccattaaacaatagggccctgttcctccctccctccctcgctccctcccacctcccagcccctggtaatcactgttcttctttctttatatttgactattctaagtatttcatgtaagtggaatgatacaaaatttgttctttgtggctatttcatttagcatgtattccaggtgatacatgttgtaacgtttatcagaattcattcctttttaaaagtgaataatattccattgtatgtatataccatattttgcttatctactcatcagttgacagatgcttgggttacttataccttttggctattataggcattattcaagcatgaataatggtgacaggaacattggtgtacaaatatctgttcaagtcactgcattcgattcttttgtgtatatacccagaagtggaattgctccacaaatatttgagtacctagtatatggcaggcactgtgctaagcactggggatgcagcagtgaaaaagaggggcctggttcttgcccttatggaatttacagtctagtagggaaaaaagatgttaaataagcagttgcagttaagtgggttaaatgttacaaaaacgttaagcacagagtgccgtgtgtatgtttcatataattgtaataatatatatatgttaagccaaaagagactataaaacatcaaatactttttccccttccaatataatcccctgcagcacctcactacccctggccacctaccacatggaaatgtcttctgctgcttttcttcacatttaaaaatgcaatgccgctgggtgaggtggctcacgcctgtaatcccagcactttgggaggctaaggtgggtggattgcttgaggctaggagttccagaagagactgggtaacagcaagaccctgtctctactaaaaaaaaaaaaaaaaaagccatagtggcatgtacccacagtcctagctactcgagaagctgaggctggaggatcccttgctcccaggagtttgaggctgcagtgagctgtggtcataccactgaactccagcttgggtggcagagtgagaccctgtctttaaaaaaaagaaaatgcatccagaatttactttttttgtttttttgagatggagtcttgctctgtcacccaggctggaatgcagtggcacgatcgtggcacgatcttggctcactgcaactttcgcaccactgcaacctccacctcctgggttcaagcgattcttgtgttttggccttctgagtagctgggattacagtgccaccacgcctggccaatttttgtatttttagtagagatggagtttcaccatgttggccaggctggtctcgaactcctgacctcaagtgatccgcccaccttggccttccaaaatgttgagattataggcgtgagccaccgcaccctgccggaatttacttttgaatatgatgtgaggcagggctgtacactttagtctttttttttttttttgcctttttttttgcccttttttttttttttgccgtatcatgaaccaaaaccaactactttccttgtacatttgtctgtttctatatcctcatttttaggtagcaatacttctataagtagctttatctttttccctatctaattgtgtccagcagttggaatcacgctgtcagtcagcatgaacatttttaaagctcttggtaactgaagttatattgttttctaatagggttgtactgattttacagtgccatcagtgctgtgatacgtggtaaccacattttccctgcttcggagatgttaaacagtccgtgcagttcctcagatttctttaatttgcatttctttgattactagctgaaattaatatttccccttgtttttcagcaaggtattgtgaatgtgactgacaaacttaagtttaacctgagagggccttataaattatgagtatacagtagtttttagtaaattactggcacttttttttttttagtatttagatgtatctactttttttaaattgagtttgtgtattttgtaatgtctgttcaccttatttgtggttctcctagttcatttcaatttactacttaggaaacctgaagtaatctatccatcctcttgtttagcctagtagtgctaagttgcattcagtggatagccaattcgtggatgagctgagttcaagtgttttgtaaatagagtatgagagaatcagtgggaagagcccagatttttttttcttactgtagtgtaatctttttagcagtgaagcctatagtgaaatgagatttttattagtaacttagcctgcttcttgatagtaatagttatttatagtcatgagccggacggataaagtaaaattggctgtttgacataattcttttgaaaaataattatataattgtatttatctttatgccaggtggtagtagtctacataaactacttccaggtaggaagtccgcagtattctccttttggggatttgtcagtaccaaggcattgcagaacctatggaaaaagatatcctttatgatatctgagaatgttctggactagctaactttagagtggttaaagagacactaacaacttagtggtgaaaaattttccaggtgtagaaagagaagttaggggcaaataaaacattgtatagagcagttaattttgtttcctttaacctgtgtcagaaaaagaataattttcttttcttttctttttttttttttttttttttgagacggggtttcgctcttgttgcccaggctggagtacaatggcgcgatcttggctcactgcaacctctgcctcccaggttcaagtgattcgcctgcctcagccttcctgagtagctgggattacaggcatgcgccaccatgcccggctaattttgtgtttttagtagagacggggttctctatgttgatcaggctggtcccgaactcccaacctcaggtgattcgctggcctcagcctcccaaagtgctgggattacaggcatgaagcatcatgcccggccaaaagaataattttcaaacatcctttatagattgacttatttaggaagatagaatgtattatttatagttttgctgaaaataatcatgcatgttacattacatttaaatgcagtgaatggagagccctgttcccctttcagcgtaatcatcttgttttattttcatgctagcatttaccagtacttggtattttctcatttttcttccccctcaatagactttaagctccatgggggcaaaaacttctctcttcaatgttgtaaacatggtgtctctaatagtgcctgatatatagcaggctctcaagaaatatttgttgaatgatttaatttagtgctttatctggatactgatcaaaatattttatttaatttaaatttttttttgaggtgaggtctcactctgtcaccgaggctggagtgatctcagttcactgcagcttctgcctcccagggctcaagtgatcctcccacctcagcctacggagtagttgggcccacaggcacacgccaccacacctggttcattttttgtatttttggtaaaggcagggcttcaccatgttgctcaggctggtctcgaactcctgagctcaagcaatctgtctgccctccttggcctcccaaagtggtgtgattacaggcacaagccaccgtgcccagcttctgattaaaatatttataaataaataaatttagtcttagttgtgaatataactgcatttctgaacctaccactcagattcttaaacatcagtctatgaagcaggaaaaagttttgagatctgagaggcttgtcagtattactgtagaatacaagaaattggagccaaggttaaaaaatacagtctgaagctcattaaatacttttttttttgctctatttaactatgtctgaactcattattggcatgttttcttctgatcagttgtccttacaagttaagacaaccgtttattccttttttttgaaacaaggtctcactttttcacccaggctggagtgcagtggtgtgatcacagctcattgtagccttggcgtcctgtgcccaagggatcctcctgccttagcctcctgagtagctgggactacagatgtctgccaccatgcctggctaatattttttattttttgtagagatggcgtcttactttgttccccaggctggtcattatgtgctttaatcaaatgtaatagtagcaatgattccacgatagttttagtttgcatagcactttcactctgtcttcatcataataatgatcctttagggagggaggtcttatggtattttttattttttatttttagacacgattttgctctgttgcccagactggaatacagtagcaagaccacatagctcactgcaacctcaaactcctgggctccagtaatccacccccttcagcctcctgagtagctgggattacaggcacgctctaccgtaccaggctaattttttttttttttattttcggtagatacgaggtcttgctatgttgcctaggctggtctcgaactcctgggcttaagccatcctccctgctccacagccagcctcttgtattcatgctactttacaaagaaggaattagcctttcagaggagctaagaaacttggcccagggttacacaattagaattagtaatatgaacactgggacatatatcctgtgttctctggttctggttctgtgttttttagaaccatagaattttagaggaggaagaagccttgaagagtagtactctaacctcacatatatatatatcatatatatgtgtcatatatcatatatacatatatgatatatatcatgtatatatgcatgtatctatatatacatatatgtatcatatatgtatatatgatatatatgatacatatgtgatacatatatgatatataatatatgtatatatgtgtgtatatatgggaaatatttatttacaaatatatatgatgttaatatatataataaactaactttataaagctaatatggcagagttaggattccaacccaggtctcttccttagatcagtcctgtgatctttctaatcttccatgtctttgattctggagatgtgtatgctacctgatgaaatgtctgataacaaaggtatttgagtttcttaatagttttctgtcacatgtttgttcttgtaatggtgaatagcttccaaaaacatttgaatttattttgaggcagcttgggatggtggaaagaacttatgctttagagacaagtagatttaagagcacctatgacacctttattgactgtgtgaccctgttgtttactaatctgtaaaatgggcagaatatcatctaccttgaactaaaacatagtgtattatgttgagtgtctgacatagaatgtgctcgataatgttaccattgttttagaaaatgttacagagatgaaatgtacttcattacagtatagaaagggacaactaagatgaaaaaacgttttggaaagcatttgaccaaaggttttatatctgcattcatacagattgatatgaataacttatgattttaaatgttagtgaacatttttttttttttagaatatcttttttgaaacagggcctgcgcagttttctctcaaacttctgggctcaagcaatcctcccacctcagccttctgagtagctgggactggaggtgtgcgccaccatgtccagctacttaaaaaaaaattttttttttaattttttttagacggagtctcgctctgtcacccaggctggagtgcagtggtgcgatctcagctcactgcaacctccaccccctgggttcaagcgattctcctgccttagcctcctgagtagctgggattacaggtgtgcgccaccatgcccagctaatttttgtgtttttagtacagacgggtttcaccatgttggtcaggctgatctcgaactcctgacctcgtgatccacccacctcagcctcccaaagtgctgggattacaggcgtgagccaccgtggtgtcgcccaggctggagtgcaatggagtgatgtcggttcactgcaacctccgcctcccaagttcaggcgattctcctgcctcaccctcctgagtacctgggactacaggcatgcaccaccatgcccggctaattttgtatttttagtagtgacggggttttgccttgttggccaggctggtctcaaactcctgatctcaggtgatctgcctgccttggcctcccaaagtgctgagattacaggcgtgagccaccatgcccggcctttaaatttttttgtagcgacgatatctccctgtgtttcccaggctagacatctatcattttaagttcttcataacttttcaaggaataggtgcaaatctctgcattttacaaatagaaaaaattgtagagatgcatcttgtctttaatcaagagccctaaagtaaatctacttgggtctaataatgagaaaataagggataattcaacataaaatctgtacataggaagcgttgttagttattacaatgaagtgttggggtcagtcttaatgtctaataataaatgagtagattatcacatctggtggaatctcataaaactattagaagtttgtattatgaatattacagaagtgcctagaagtgcatatggagatgaaaagttgtgtacaattgtatccattttgtggttatagttttgaaaaatctacaaagtcatacaggcatatacatgtggacaaaggctgggaaggaaaatgaaaataggtgatttttcagggtattataatgctatgtgattgttctgattatttttaaagataattttgtgtaataaagagggagaaaaccaagatgatatatttcccatgtagtgtgcactgaagagcattggcattaaaacagtcaggggttccacctagatgatgtggtttatagtatattgtatcttatactttgggggaattttaatagtcttgactactggcttttaattttttattagtaaacttttagcatactatcattcaacccattgcattttaccatggagtttcactattattttattattttcttcttcttcttgagaattatggccacaataagtagacttgtatgttatgtaaataaatcttaatggactttttttttttgagaatcttcaacttggtgtcattaaagaagcatttttaagcccgagatatatgttccattgcagtattatgagggaaatcatccattataaacttctatgcccatagctttttgtgtagcttgtcttgtcaatcagcaaagcaaatactttactgctctctgccttccaaattacttcatatattttatggttgatatactttatggtatgtgtgttcttttctgtttcattgcttccataaaaaagactggttgaggtgttagtttgatttcttctctttttccattcatctgtgagtactactacaagacacagtgcaccattgattcttgcattcctcatttacattctgattttaaaagaagcttgttaaaaagaatttgcctgggtaaatggtactatagtcttggtggtttgaaaacttagagaatgctttttcagttgtttcattccagttaagcatattgttaaactgataaggttcattctctctgtgtgtctctgtctatctgtgtgtgtcttgcctgtctctcccaccaccttctcccctcagcccccaccattttgttttaaactaatcttcagggagtatgtccacagtgaaactattcagagttccctgtactgtatgtaattccttggaatgtttgcctttcttgagttgttgtgtattttacagaagtagttagtatccggtagacttaatgagttttgtagcatggtcttcacatcttcaaagagtttttgactgtttagagcatactacttcaaaagaaggaataattttattaataattgtgtaaaaataatgatccctgcccatagcaaaaatttagtacaaaaggggtataaagtgaaagatttcatttcttccattccaagtttttagaagtaaccactgctgatagttttttgtatcctagaaatttcctaatcataaacgaattgaattatatgtattgcattgtaacttgctcttttcactttattatagtaccttatattttacaatatcagcatattttaaagcagcatatacattgtatttataaatctaatcatccccatggcttttagaaatgcaaaaattttatttaaaactcatatatgtatatgtatgtgacttagtgttttttcttccaggaaaagtggtattatataattattttctttttttctttctttttttttttttttgagacagaattttgctctgttgcccaggctggagtgcagtggctccatctcggctcactgcaacctccgcctcccgtgttcaagcagttctctgcctcagcctcccgagtagctgggattacaggcgcccgccaccatgcctgggtaatttttgtatttttagtggaaacagggtttcgccatcttggccaggctggtcttgaactcctgaccttgtgatccacccacctcagcctcccaaagtgctgggattacaggcgtgagccaccacccctggcaattatttctttatactacgttagcctaacatttttttttgttgcattgaggatgtgatttagggcatactttatgttaaaagtgttactggtagagggtcttgactgcaagttgtccaggttcttggcattttgaacgaagaattggacaaaacacacatcaaagcaaggaaagaatgaagcaaggaaagcagatatttattgaaaatgaaagtacactccacagagtagaagcggctggaccagcggctcaagagccctggttacaggatcttctggggtccaaataccctctagaggttttccgttggccacttggtgtacaccccatgcaaatgaagtagtggcctgtgatcagtctgattgattgtggaaagcaagcaattgggggctgaagtgaagttacaaagttacgctcctatgcaaactttgtaactatacaaagtgatactcttaagaaaggtactttcagttttccctctgccacacagaggtactttagtatggagagttacttaggtatggagggttgaggttttccttttgatttagttctaggaagtcagggtgaataggccttattccacctgcctccagaccccattctcttgcctcaaaagaacaaactttactatgtacatattttgatggtgtcttttcagagttgtgtttaagatgcagtttttgttctcaatgtccacagtcttaatacagaaggtagctaatgaaacaaaaatactagaatagagtcattattgtaatgatggaaacttacataaagtataggaacagaaagaggtagtgattatctcagagatttcaaggagtgtgtcttacagaggaggcgtagtgattgaggttcagtagtttatcacgacattccaaaccacctgacctccatctcgcataactctaactgctcttagttccctggggacaccaggctgtttgcctagatatttctttgcttgggctgtttctaatgcctagaatattcctgtacccacttgccagcataacagtacatgtccttccagatttagattgaggttacttgaaaaccatacctgaggtttcctttcccagaagagctactttctggtgccctgaggcttcctaagcatattcatgccagtgtgctttcagtgtaccctatagtaatcacttgtgtgacaccttcactatactttaaattcactggggggagagagtatgttttattcattttccctgaacattttattatgaaaaactccaatgtacataattgtatagtgaatactcatatacctatcacctagatttgacttttagctttttgctctacagtcagcccttcatatccatggttacccatttgtggattcagccagtatttgaaaaaacctgctttaatctgcactgaacatatagagattttttcttgtcattttccactaagtaatatggtataacaatttttttttttttgagacggagtctgactctgttgcccaggttggagtgcaatggcatgatctcagctcactgcaacctccgcctcccgggttcaaatgattctcctgcctcagcctcccaagtagctgggactacaagcatgtgccaccatgcctggctaatttttgtatttttagtatagatggtgtttcaccatgttggcaaggctggtcttgaactcctgacctcaggtgatctgcccgcctctgcctccctaagtgctgggattacaggcgtgagccaccatgcccggcccaacaactattttctttttttttttttttgagacagagtttcgctcttgttgcccaggctggagtgcaatggcgcgatctcggctcaccgcaacctccgcctcccgggttcaagcgattctcccgcctcagccttccgagtagctgggattacaggtgcacgccaccacgcccagctaattttgtatttttagtagagacggggtttttccctgttggtcaggctggtctcgaactcccaacctcaggtgatccacccgcctcagcgggattacagtgctgggattagaggcgtgagcaacgacgcctggccacaacaactattttcatagcactttcattatatttgctattacaagtaatctagaagtgatttaaagtatatgggaggatgtacgtaggttagatgcaaatattgggccattttatataagggacttgagcaactatggattttggtgtccttggggtgtgctggaaccaatcccccatggatactgagggatgactgtatttgttttgtcaggtaccatccatctagcttttgtgctctgcgtttttaaacatgcactccaaagtaagttgcagacattggtgtatgtcacctctgaagaattcagcattaaaatccttaattttatttattattaactctttattttaatccttttttacattttaaaatgtgtattatttttatcatcaggcctaccacagtgctgctacagatatacttaatatttgaattgaaatctcttaaaatttttaaattttactttttttttaaatttccgtagcctttttactttgtgcatttgagtctaagtttactgcactcgaagagatcaattcattgagggctgtagtagggagagtttcatggaacaaatgctgtgtttttcttggagacagggtctccctctgtctcccaggctggagtgcagtggctcaatctcggctcactgaaacgtctacctcccagacttaagcaattctccaacatcaacctcccaagtagctgggaccacaggcacacaccaccatgtccagctaatttttgaatttttttgtagagacggggtctcaccatgttccccaggctggtctgaaattcctgagctcaagagatctgcccgccttggcctccgaaagtgctggggttacaggcgtgagctactgtgcctgtcctatggttttaactggtccttaaagaatgattctgcattgagtacaaagggggtggttatggttacaggctggagaaacagagatgggaatgagtactttccatggaataatgagacaaacattgtgattgaaactgtaggttcaattttattaatagaaaaagcaggtctttggtttttgcaggatcttgttgggattgattatatttaaatataagtgcctaaaaatgataccttgtatttttcttaaacgatacatttttctagttgggtaaacttttgagttatttagactaaaaactgggtggcttagtgtttctgtagaagatagaaaatgaacagaggagccagtcacagtgactcacacctgtaatcccagccctttaggaggctgagtccaggagttcaagaccagcctgggcaacttggtgagaccttgactctacacaaaaaacaatttttaaaaaaattccatttaaagaaaatcggggaagatcccagtggtgagttgaaatctatatggaatgaacttcctggagattttcaatctcgcttaccttaaatttgagcaatacctttcaggaaaggtacattttttttttcttgtggaaagaagagtagtgtggccactggtggcttattctctggaaagcttcttaaggacattctggggaaatgcatcattgagctgtgggttcctggcatttgagtgaataatgttcagatgattaagtggcccaaggcaggaagcagggagaatgtttgcttctcttccctagctactcatacctcctgtttctctaaaactgggtaatcctatatataacaggttgctgattccatgacttagaatagcttttcttaaagtggagtatggattcacctatattaggggatttatgaataatacaaatacctgagacctgtatacagatctactgaatgagtccttggatgtcggacctgtgaccatgcatttaaacgaacattttatatgatttttatgcatattggaatttaagagaactgctctcatataggtggaattttccataatttatttattaaacaaccacctataggcattatgggggagttactgctcctctttaggaagtataattacaggcagtaaatgctgtcttagtccatttgtgttttgctgtaacagaacacccgaggctgggtaatttataaacaaaagaggttttagctcagtgttctacagtctggaaaataagagaagcattgcaccatatctacttggcttctggtgatggttacttgctaggtcaaaacatggtagataaggtcaaaggggaagtggacacattcaaagagagaacccaagggatagcttggctttatagcaacagccccactctcttgggaatgaatccatttccaggagaactaatccagtctcaccagagtgagaactcagaatctcactcattaccaaaagattggcaacaagtcattcatgagggatctgccaccatgacccaaacacctctcagtaggctttacctcccaacacagccacgttggggatcaaatttcaacatgagttttggtggggacaaacaaaccatatctaacccaaagcaaatgcctattgctttataataagattgatggtaaagtgcagctgttggggattttctgctgctcaagattttgctaaagatcgttttgtgtacacaattgtaaggaaactattatttttattgcatgtattgaatgaagagtaagatatttcaggggtttctatgtgatagttttagatagttccttaagtacaaaggaaggaaattaagaccttatgtttgaaattgagtgattcacaatactttaagagtgtagtcttatttttgttctgaagagctattatgtggattatcctagtaagacaagtatatatttatgagacaaatatgtagaagatgagttcaagcctagattcttgcctcttagctgtgtgaccttgggaaaagcttttaacttaaaaacaaattcagcgttgattagtatttaggggaagttgatttgctgtagaaaccatgttatgctattacttgcgtaagtattttggtaacacttctggtattaccatggtagtataaaagcatttttttccctctcgtataatacagaaacaacaacgtaaacaaaaaacctctgcaaactcctatttttagcacacttggagacataaaatgtgccgattacaaaaaatgtgtagaggggccggtaggtcgtgcatcaaagaagtgtggagaatagtgagctggcccagagatggtagatcttagaaagcttgactgtaaaatacaataatatcctttgtatgtgacaatgggagcaggtaaagagatgagcaggctacaagataaagcctttatggaaaaggtttagtcacgactagggagatatggtagggcttttgcacaacgaatccgttttagcaggaaatcatctctgtggaagcagtggagagaacttttgacttaagaagcctgaaaggctatttatcctaacatataaagagctctttggagtcagtaagaaaaagatcattagcagtggctcacgcctgtaatctcagcactttgggaggccgaggcgggtggatcacgaggtgaggagatcgagaccatcctggctaacatggtgaaaccccgcctctactaaaaatacaaaaaattagctgggcatggtggcgggcgcctgtagtcccagctactcgggaggctgaggcaggagaatggcgtgaacccgggaggcagagcttgcagtgagtcgagattgcactgctgcactccagcctgggtgacaaagcaagactctgtttcagaaaaaaaaaagaaatcattagcttgttaagaaaatgcaagcagcatttatgaaaaagataatatgaatggcgcttaaataagaaaaatagagaagtgcttattaaaatgacagatatcccttcttagacctgtttggttcctgatttccttagcaagagttcagatagtgattaatactgcattatccaaatctgtttggttgatgttttgagtaacaagggatttattgaaaatgtatgcttggttcctgagattgtgaagtagaattttgtgtagggaggttcaccagtatcctgaataccactgttcacttagcagattgccaaaaatctctaaagtcttgacagcactgttggtgactgtatagaaactgacagatccgtacatacattgccggtggaagtataattcgatataacccccgaacatggagggcaattttgatatctgttaaaattacaaatgcatatcgcctttggccaatgccttcaatcatgtttcagtcagtatgagggactacttatgtgttaattggttaaaacaatcacagcaacatagaattaaatattaaatattattcagatagctgaaacagatagctttgaggttccaatgtagatgttgatgaaataacatcagaagaaagcatttgagtatgggcaggcgaacactgatggacataaattaaaaaattaagatatttatatacagtctaatttacactttttagcggatagttctgggagttttgacaaatgtatacagttgtctaaccatcactacaattaagatatagatcagttccagtacctctatttccacatccctccaatattccttggtagtccttctttcctccccaaccatagcccctggcaaccactgatttctttctcatttatatgttttttttgctctttccagactgtcatatacatggagtcatatagtaagtagccagttgagtctggcttctttcacttagcataatgcatttgagattcatccggggtgttgtgttagcagaaatttgttcctttttattactgagtagtattccattgtatgagtataacataatttgcttatccatttaccaccagttgaaggacatttgggttatttctgcttttggtgactacaaataaagctgcctagaagttttgatagttttaggtttttacatttgagtctagcatccattttgagttaaatttttgcatatggtacaaggtatggaaagaattaactttttttgacatatggatatccagtcattccagcaccatttgttgaaaagactatctttcttcattgaattgccttggcacctttgtcaaaaatcaaatgaccatatgtgtgtaggtccatttcaggactttctattctatttcattgatctgtcttgatcaccattcgcactgtcttaccgtagctttatagaaagccttgacatcaagtagtgtgagtcttccaactttgttctttttcaaaatggttttggttattctaacttctttgccttttcacctaagaatcagcttgctgattttgaaaaaaattttagtagaattttgatgagacagatttctaaaaattgtggtagcatatatataacaaaattttctattttaacttttgaagtgcacagtttagtggcattaagtacattcacattgttttgcaactatcgctaccatctgtttctagcaacttaaaaaattttcccaaactgaaactctggacccataaacaatgactccacagtggaggaccactacacccagcacctggcaaaccaccattctactttgtctctttgaatctgacacctttaggtacttcatcccgtatttgtagaataatagaatatttgtccttttgtgactggcttttatttcacttagcccattgtcttcaaggtttatccttggttggttggttggtttttgtttttttgagacagagtctcattctgtcacctaggcgggagtgcattggcacgatctcggctcactgcaacctcctccgcctcccaggttcaagtgattctctcgcctcggcctcccaggtagctgggattataggcacccgtcaccctgcctggctaaattttgtatttttagtagagacaaggtttcaccatgttggccaggctggtctctaactcctaatctcaggtgatccgcccacctcggcctcccaaagtgctgggatcacaggcgtgagccactgcgcctggtcccttgttgtttaatatgtcagagtttataatctattgtatgtatataccacattttgtttgtccattcatctgttgatggctcctcgggttgcttccacattgactgttgtgaataatgtcgctatgaacatgggtacataaatgtctttttgagtgcttgctttgaattctttggggtatatgcccagaagtgcaattactggatcatatggtaatactgtgtttaattttttttttttttttttgcgatggagtctcactctgtcacccaggctggagtgtggtggcatgatctccgttcactgcaacctctgcttcccagtttcgagattctcctgcctcagcctcctgggtagctgggattacaggtgctcgccaccatgcccaactaattttttttttttttttaagtagagatgggattttgccatgttggccaggctggtctcgaactcctgacctcaagtaatccacccgtcttagcctctcaaagtgctgggattacaggtgtgagccaccacgccctgccgtgtgtgtgtatgtgttttttttttttttaaggaacagttatatcgttttccacagttacatccccacagtttcagtttctccattttctcaccaatatttttttgtctgtctatccatctatctatctatctatctatctatctatctatctatctatctatctaactaactgatggccttcgtaatagatatgaagtcaaatcttaatgtgatttgatttgtacttccctaataattagtgacctgagtctctttcaagtgctttggatagatttttaaatatagttttaaatattcttataaaagttgtatatgtacattgtagaaaaaatctacagataactaaaaataagaaagcaaaaccaggccggacatagtggctcatgcttgtaatccaagtgctttgggaggccaaggccgggagtatcacgagaccagcctgggcaacatagcgagaccccatctctacagaaaatgaaaaaaaaaaattagccaagcatggtggtgcctgggtgcatgtctgtagtcccagctattcaggaggctgaggcaggaggatcacttgagcccaggagttcgaggtgacagtgctctccagcctgggtgacagtgagactctgtctctaaaaaaatagaaagaaaataaaaccatcctgtttttatctttcagacatttttctatacacatatatatgtgccattaaaaaagaaacaccccttcagagtagaggaagcagagagacattattctatacatgtgcttttgtgtctgtcttgtctttttcttccctccttttcttccttttttatttagctccaccatttcatgtcagtaacatttaattttaatgcccagtccacattcacatttctccaagtattcataaacatgtatcatatctggtttatccaaaccatacatgcattgaatctggtttctctctccctcctcctaccctcctccctcccccttctctccctgtctctctcagacaggatctccctctgtcacccaggctagagtgcagtggcataatcatagctcactgcaatctcccaacttgtgggttcaagtgattctctggcctcagccacccaagtagctgggactacgggtgtgtgtccccatgtatgcctaatttttttgtttgtttgtttgagacagtcttgcctctgtcgctcagggtggagtgcagtggtgctatctcggctcactgcaacaacctccgcctcctgggccaaagtgatcctcctgcctcagcctcctgagtagctgggactagagatgtgtgtcaccatgcccatctaatttttatatattttgtgtagccggggtttctgcatgttgctcagactggtcttgaattcttgggctcaagtgatccacccacttggcctcctgaagtgttgggattacagctgtgagccaccctgcccggccatagtttttttttttttttattttttgtagcgacagggtcttgctatgttgcccaggctggtcttgaactcctggtctcaagtgatccttccatgtgaatctggtctcttaagcctcaactctaataacctagcacagctcaccctccttttatataaactacagtcatgtgctgaataatgacgtttcagtcaacgatggaccacgtacagcatgatcgtcctataatattgtaatggagctaaaaattcctttcacctagtcatgtcgtagcctttataacgtcttagtgcagtgcatttctcatgtgtttgtggggatgctggtgtaaattaacctgccctgccagttgtataaaagtatagcacatacagttatgtatagtacataatacttggtaataactgtgttacttgtttacatatttactatttatcattattttagaatgtactattacttataacaaattgtggccaggcatggtggctgatgcctgtaatcccaacactttgggaggctgagacgggaggatcagttgagcccaggagcttgagatcatcctgggcaacatagtgagatgccatctttacaagaaaaatacccaaaaaaattagccagacatggtggtgcatgcctgtagtctcagctacttgagaggctgaggcaagaggatcgcttgagccagggagttcaaggttgcagtgagcagtgatcacaccactgcattccaccctggatgagagagtgagacgagaccctgtctcaagggaaaaaaagaaaaagttaactgtaaaacagtcttaggtccttcagtgggtattccagaaaaaggcactgttatgacagatgacagctccacatgttattgtccctgaagaccttccagtaggacaagatgtagaagtgtaagacagttatattgatgatcctgaccctatgtaggcctaggctaatgtatatttgtgtcttagcgtttaacgaaaaagtttgaaaacaaaacaaataaaaattttaaaaatagaaaacttacagaataagaatataaagaaagtatttttctacagctgtgcaatatgtgttttaagctaagtgttataattaggagtcagtgtaaaagtttataaaacaaaaaagttacagtaaatgaagtttaatttattattgaagaagaaaaaaaatttttttttctttagagacggagtcttgctttgtcacccaggctggagtgcagtggcgcaatcttggctcactgcaacctcggccttctgggttcaagcgattctcctgcctcagcctcccgagtagctgggactacaggcgcgtgccaccacgcctggctaattttttctatttttagtagagatggggtttcaccgtgttagccaggatggtcttgatctcctgacctcttgatccatccgcctcggcctcccaaagtgctgagattacaggcgtgagccactgcacccggccaaaatatttaaaaaaatacattcagtgtctcctaaatgtacagtgtttataaagtgtacaatagtgtctagtaatgtcctagaccttcacgttcactcaccactcactcactgactcactcagagcaactttcagtcctgcaagctccattcatggtgagtaccctatacaggtataccattttttatcttttatatggtatttttactgtacccttttttaggtttatatatgcttatatacacaaatacttaccattgtgttagttgcctacagtatttagtacagtaacatactgtataggtttgtagcctaggagcagtaagctatgccatgtaacctagtgtgtagtaagcctaggctataccatccaggcttgtgtaagtacactctgtgatatttgcacaacgacgaattgcccagtgatgcatttctcagaacttaccccattgttaagcagcacatgactatatattgaggtataatttacatacaatagacatcacccatgatatatactcccttgcaaccatccacaacaatcaagataacatcatggctgggtggctcacacctgtaatctcagcactttgggaagctgaggcaggagtatcgcttgaggctaggagtttgagtcaggcctaggcagcaaagcaagaccctgtctctacaaaataaacacacaaaaacacaaaaatattagctgagcatggtgggatgcagttactgaggagggaggatggcttgagcccaggaatttgaggttgcagtgaactgtgatcatgccactgcactgtagtctgggcgacagagggagaccctgtctcaagacaacaacaacataaaaaccccatctccattaccctcaagtttcttcttgcctcctttctgtcaaggtagattagtttgcattttttgtaatttagaatttcatataagtaaaatcttacaatagtagatacaccacagtcttcatataatcccaactctttgggaggccaaggcgggagcattgcttgcactcgggagttataggtttgaatatatcctaggtgattttgtatatttgttgtatctttcctgtagatacgttagtgatgataaagttaattcctggcttagggtgatgactgtccaattttcttattgtactgctaggttttcaccttatgagtagaaaattacctgtgtggttttacttgggaactaaaagatggccagttctgcgtcagccatacacctgattttttttgagacgaagtttcactcttgttacccaggctggagtgcaatggcgcgatcttggctcactacaacctctgcctcccaggttcaagcgattctcctgcttcagcctcctgagtagctgggattagaggtgcctgccaccacgcttggcaatttttctttctttctttctttctttttttttttttttgtatttttagtagagacggggtttcaccttgttggccaggctggtcttgaactcctgacctcaggtgatccacccgcctaggcctcccaaagtgttgggattacaggtgtgagccactgcacccggccacacctgattttttgtttgtttgtttttttgaggtggagtcttgttctgtcacccaggctggtgtgcagtggtgcgatctcggctcactgcaacttctacctcctgggttcatgcaattctcctgcctcagcctcccgagtagctgggattacagggatgtgccaccacgcctggctaatttttgtatttttagtagagacagggtttcaccatgttgaccagggtggtctcaaactcctgacctcaagtgatccactcaactcagcctcccaaagtgctggattacaggcgtgagccaccgagtccagcccacacctgatatttttaattacagttgctaatcttgtttgcgtcactgatttcattgttagttagggaataatttccaaaatcactcctgtattcactggcttctttagttttctttcatcaactgagattgcttgttacctgaaatataatttttttttaatatattttttgagactgagttttgttcttgtcactcaggctggagtgcaatggcgtgatctcagctcactgcaccctccaccttccgggttcaagcgattctcctgcctcagcctcccgagtagctgggattacaggcgcctgccaccacgcccggcaattttttttgtatttttagtagaaatggggtttcaccatgttggccaggctggtcttgaactcctgacctcaggtgatccaccctccttggcctctcaaagtgctgggattacaggcgtgagccaccgtgcccagcctgaaatataattcttaatgaaaaggtagggtaaatacttaattttttcctttagttaccaattttcaaattaaggtgttaatttagtaactataatgataacatagatttgttcttttatctttttttgaggtttattatagatttttattggtttaatatattttaatacactatagtcatgtgtatttgtttttgatgtattttaaaaatcagtttatattgatactcctgatgaaacattttttgctttaacttttttatggtaaaatacagataacatatacatttgaaccatttttaagtgtacagttcagtagcattaagtgctttcacatttgttgtgcagccgtcaccaccatccatctctggaactttttcttttttgaaaactttctagaggttcatatttattggcatttgacctagagtcttcctcatgggcaaggtgcagccctgggcaggactatcagcatcctgctgtctcctcaattctgttaatccaccaatcctaatccctcctaaccccactcatagtccagagaagataaaaagttcagggacatggtgtactgctctccagatcctttcccagctgaaactctatacccatttagcactaatttcccattttccctagcccaagataaccaaccaccattctactttctctttgaatttgactcctaggtacctcacatatatattcctatttagtggaattgtagactatttatccttttgtgactggcttatttcacttagcactgttttctaggttcatccatgttgtagcttctgtcataatttccttcccttttaaggctgaataattttccattgtgtatatgtaccatattttgttcatccattcattcattgatagatacttgagttgcttctaccttttggcaattgtgagtgatgctgttatgaacatgggtgtacaaatgtctgttttgagtccttgttttgctttcgtgcattctattaaaaatgttaaggttctttgctttttacttttttttctcttttatccaccttttgactttattcttaaagttttatcttggtataataatttatggtatgttgcagaattaggagcaaagtcccgtgtgtccttcactcagtttcccccaatggtaacatttttcataattacagcacaatgtcaagaccgggaaattgacattgatacagtccatatacaggtgtcccttggtatctgtgggggattggttccagaaccctcgatgataccaaaatccatggatgcttaagtttattagataaaatggcatagtgttttcacataacctacacacatcttcctgtatactttaaatcatctttcgattacttataacacctaatataatataaatgccgtgtaaatagttatattgtattgattttatttgtattttttttattgttgttatttttcattgtgttttttccctgaatattttctatctgtggttggttgaatctgagcatggggaacccatggatatggagggctaactgtatttattcagatcttgctagttatacatggactcatttagataactatgtttgcatgttttatgtgtataattctatgcagttttatcatgtgtggataggtgtaagcactaccaccaccatcaccatcaccatcaagacacagaactgtcccatcatcacagatatccctcacactactcatttagttacactcactcccccaccccttctctccttcctctatttggtttctaatctgtgtcaaccactaacctgttattcataattttgacattttcatggagtcatataaatggaaatcatactgtatataactattgagtttttgttttgttttgtttttgcatttagcatagtttccttgggatccatccatgttgttatatttcagtaattcatttctttctattactgagatgtagtctgcggtacagatgtaccacagtttgtttaaccatgtactcattgagggatttttgggtttgtattagttttttagggctgcctaacaaagtagcacaaactgggtggcttaaacaacagaaatttattgttctggaggcaagaagtccaagatcaaggagttggcagggttagttccttctgagagaatctattctgtccccctctcttagcttctggtggtttgctggcaatctttggtgtcctttggctggtagaagcattacctcccatctctgccttcattttcacatggtgttctccttgtgtgtatgtctctttgcaaattgtccttttttttattagagtaccactcatattgcattcctccctaaggacttcgttttaacttgataacttcagtaaagatcctgactccaaataaggtcatattctgaggtactgggggataggacttcaacatatgaatgtttgggagacacaattaaacccatagcagagttgctttcatgttttggctattacaaacaaaggtcctatggatgtttatgtacatgtttttacgtagacataggttttcatttctctgggataaatgctcaggtgtaaggttactggtggttatggtaagtgcatgtatggtttttaaagaaacgtctaagctctttgccagagtggctgtagtttacatttccaccagcagtgtataagaatcagtttctctgcatctttgctatcatttggtgttgtcactattttttttttttttttttttgagagggagtctcgctctgttgcccaggctggagtgcagtggcacaatttgagctcactgcaagctctgcctcccgggttcacaccattctcctgcctcagcctcccgagtagctgggactacaggtgcccaccaccacgcccggctaatttttttgtatttttagtagagacggggtttcactgtgttcatcaggatggtcttgatctcctgaccttgtgatccgcccacctcggcctcccaaagtgttgggattacaggcgtgagccaccgtgcccgggctgtcactatttttttattttggcaattcttacagatgtagtgatatcatgttgtggttttaatttgtgttttcttctattcagtttaacatgtgttttaaaagtttgtttgctaattatctcttttatacttaatatcttgattcttagggtcattaacaagattgcttgccttctcctatagtataaagaaaataacttcagaaaaacagaattagtgtagcagacaacagaagtattgtatgaagtttaattttctttccttcttttttttaaaaatagagacatagtcttgctctgtcacctaggctgcagtgcagtgacctaatcacagctcactgcagcctcgtactcctgggctcaagcgatctctctctctctctctctttcttccctccccctccaccctttccccctctcccttccccgctttcctccctctccctccctctccttttttgtagagaacaggtctcgctgtgttgaccaggctggtctcaaacccctggcctcaagcgatccccccaccttggcctcccaaagtgctgggattacaagtgtgagccatcccatcctgctttaaattttcttctttttgtccttaaaattcttcccactaaggataagcaaagtgttgtgttctgacctcactttatatgaatactttctctgtatgtctgtgttattgatttgatgtacatgattaggtttttttttccaatttgtctttaatttcagaaatttctgtttctatgacagtgacataacctaacaaaattcagtttcatttgaatgagtatgacattttccttattcaaaagttaaaattatatgcaaaggtatatatagaagtcttccacagattcctgtctcgtatatttcttttatcatcccttcctccttacaacttggaaaaagtgtttcttgttaatcctctcagtatttttttgtgcaaacaaatacatccattcatatacatgttcttactttgtgaaaggcatcacattttacattatattacataatttgatgtaaacttaaatattaagtagcagacctaacagaagactttcagagttgtgttaatgctgttttttatgttgtgagagttgaatctgctacactgacttccacattattttgtgatctatgagttatgatcaacatgagatagtaggttcactagtaactaagttcaagtatgtaacactggaaaaactgcttgttgctttatgactttgggcagaaaaacagacaggtgaaatgcagttgaatactttgtaaattatggttagccaaagtaggtgacataggactaacctgtgaaaggggacataatgaagtaaaacattcaagtaaaatgacatgataatggcatatttggcaaacatcttcagaatagattatatgtagaagttggaggagaaaagtttttccctttcctagttgcaatttattattattattaattttctttctttttttttttttttgagatggagtttcactcttgttgcccaggctagagtgcaatggtgcgatctcggctcactgcaacctccgcttcccaggttcaagcgattctcctgcctcagcctcctgagttgctgggattacaggcatgcgccaccacgcctggctaatttttgtattttagtagagacagggtttcaccatgttggtcaggctggtctcaaactcccgacctcaggtgatccgcctgcctcagcctcccaaagtgctgggattacaggcgtgagccaccgtgcccagccctattattaattttttagagacagtctcgctgtgttgcccaggctagtttcaaacgcttgggctcaagtaatcctcctgcctcagtctcctaaagtgctggattaggggcatgagccaccatgcccagctgctagttgcaattaatttattaatcaggatagctaagcacagtcatttatggtgggtggagggagacagagggagagggagattgtgtttcatgatgaaaagatcattttgagtatttttgccaaaataataatcatagaataagatggagatccttgcatatgaataatcttctcaatcatgttgttctcagtgttgctacgttatttggcagataactttttgccaggaggataattataacacatttttttttgaaagagttttctaattgagaagtttctttcctgactaatgacttaacaaataaaccattgttacaacaaactgtgtcataacagcaaagttgcaataactatgaatctaagatagtttcaagttctctgtagtagagtgtactttcaagtctatccaaaacaaaaacgttagctctaatatatatttgtttttaataatatattgctcttaatattaaatatatgttgagtcattatttcgcctcctttcttagcatctcgatagttcttttggggatattgattttgcaggatgctttaatgtatttgttgttgtttagaaataaggcagtcttttggtcatagttctagggaaggtttaaaaacttcagtcatcttagagctcagattgagttggtctgtttggatggcatgctaaagtatatgaaatttgcttggttacagggcaaaatgtgagagtcccctaatgatatctggtaccagtaatctaaccaggtaggtaggtaggtaggtaggtaggtaggtaggtaggtaggtaggtaggtagatagatagatagatagatagatagatagatatctcttcttactggatctttttcatgctgtatgcttcctctcgagtttaatggaatcaagtgttgcattttagggtaattcctaaatcttagtatcatcacatgaggccatttagtatgctaaccgttggatgcagttagtttgcgttgctgctggaagattgttgctgctttttaccctggctttaagttgtgtgctcttgtgggtaactatgggacttgacttgtactgtcatattttgaacaagggaaataaatgtttaacatttgttaaataggtttcaatgacagttttcatactctatggtgagcaacttaaatgtaaggttagctctggttgttcaagtgtttccatgtttttttggaaaagttagattatttcttttgatattttgctgtaaatttaacataagctttggtgcattttaccttattaaacgggagacaaaaagtctcaaaatattctgagtgtagatatcaatgattagtgtcttaatttacaaaatgacatctcaatagatcagtagttatatggtatgtggtatgcttgtttagtagaaaggtgttcttaaatgatcgatgatttaagtaaaatcctgtgagtttataccatatgagagaagcttgcttgataaaagaggtttcaaatttaattttttattgtggtaaacaacaacatttaccatttaaccattttttaagtgtataattgagtaacgttaaatatatccaactgctgtgaaacagatctacagaaatttttcatcttgaaagccagaaactctatacctattaaacaacaactcccgtttttctcttcccctagtccctggtaaccattctactttctgtttctatgaatttgactacttcagatacctcataagttgaatcatatggtatttgtcttttttgtgactagcttatttcagttagcataatgcccttagggtccatccgtgttgtaatgtagtacagatgttccttccttttaaaaggtgtgtaactcattttatgtatctactacattttgtttatccatatctgttctattccactggtctatttgtctttatgccagtacctcacagttttgattactgtagctttgtacagtaagttctcacttagtgccgttcttaggttcttggaaacttgggctttaagcaaagcggtgtacagcagatctttgaacaatatcaatttgttcagtgttgttttgttataatgttgatgaggaaaaaaattggtttcattcattatacgtcattttgcttaacattggagtttccaagaacctgttggtgatattgaggactttctctaaaatgctttgaaattaggaagtgtgagtcctccaactttgttcttttcttcctaaaattgtttgggctttttggggtcccttgagattctatatgaattttcagcttaatttttttcatttttgcaaaaagtgctattggaattttgatagggattgtgttgaatctgtagatttctttgggtagtatggacttcatgataatattaagtcttcgaattcatgaacacaggatgcctttctatttgtgtcatctttcatttcagcagtattttgtagttttcagtgtacaagtcttctacgtgcttggttaggtttagtattttacagtttttgatgctgttgtaaatggaattgttttcttaatttcctttttggattgttagtatatacaagaattttgtgtgttgatttaatatcctgcgactttattgaatttgtggttattagttctaagagtttttatgtgtgtgtaaactttgggattttctacatataagattgtgtcatctgggaacagagataattttacttctttctttctttctaacttggatgccttttatttgttacttttcctgcctaattgctttggctaggccttccaatactatgttgaatagacacgtagtgggagtgggcatccttgccttgttctgtatgttagagtaaaaactttcagtcttttacccttgagtataatattagctatgagtttttgacttttactatgtagagatagcgtcttagtccattttctgttccttacaacagaatatctgaaattaggtactttataaagaaaaagaatttatttcttacagttaaggaggctgagaagtccaagttttgagggtccacatctgatgagagtcttcttgctagtgggaactctgcacagttcctaggtgttgcaaggcatcacatggcaatgggactgagggtgcttgctcaggtctctttctcttctaaagccacctgtcccactctcataactattaaatcattaatccagtaatccatgaatggattaacctattcatgatggcagagccctccttacccaatctcctattaaagaccccacttctcagtactgccacattggggattaaatttccacgagtttttgaggggacaaatattcaaaccatagcaggtgatttttttctagttttaacttgagtgttttttatagtgaaagggtgttgaatcttgtcaaatgcttttcctgcatcaactgagatgatcatgtggtttttgtccttcattctgttgatgtcctgtgttacattgattgatttttgtatgttgaaacagtcttgcatttcagcaataaatctcacttggtcatggtgtataatattttaaatgttttaaatgatgaattctggtttgctagtattttgttaggaattttcgcatcaatattcatcagggatattggtctgtagttttcttatagtgtctttttctggcttgaatttaatttttaaaatgtaatttgcatgccttactctttgtctaggaatgtttaagattagagagaattaaaagaattttagagtaccacatatgtgtctcctgttgttaccactgtgtggaattaccaagtgaagaatcaaactcttagatctgaaatacgaattgggaagtactatagtgtgttgacaaactgaattatgaaagcatatttgatttctgaacttgaatatgcatataattcaagcctatgaattgtgtactgtggttgttagctaaaaggttagtgggtaatatcaagtggctggtaatgctaaatattttaataaggtcagctaatcagaagtgaaaggaacaaaaaaattggacatgtgacatatatgtgttcttatatagtcatgctaaaatgaaaaaagaggcattacatattaatagtcaccacatttttaaattttgggttaaaatttttcattctctataaagtggtttatttttcacattggttttattgtttttaatctactgaattgttttttggctacagttctatcttcattatcatgcaaattattaataaaaattcagtaattcattgagatactttttactaccttgagtaaataaatgtgaaaacttgtgatgtaatctattgagagtatgtgaaatgaaaatttagatttcccccaacatcaagcaggattatcctgtgttcatctactcttctatgaaatctgcctttttttgaaatttgccagtgagccagtgatgcccagtgtgaaatggtttagatggcaataatatattgtgcttatatcatgctgtataccatttaacccttcttgtaaatttgatttttggatctggatattcatttataccagctaatatggtctcattggaaatgttgatagccactacaccaagttgtaattacccatgtttatttgttatgtcttaacattacaaattgacatcacaagttacatcacaaagttatgttaataagatggagatgtatacacatgcacacacacacacacaaacacacacacacacacacacacacgcacaccagtccagaaagctaactgtagaatgtggtattcagatataagtgagatgaagagtggataatgacagtattaaaacaattattagctattgaccttggcagactgagaaatgattttaaggtgatagtatatgataaaacaaatattctatctgttttgatatttgtcttaggatagagccagataatgtctagtcagctgcagcttattagggctgactggggaaaatagtagtcttcaaattagatagcagatatgtatccaatatgtcaactataatatggtatccagtgtctagcagcagccagtgccagtatggtcagacagatgagaggacaatattgcggcattcaggttaaggcaactcaagagacaaatggagactttttagggtgggtttatgggcaggattccagtaccagaatgaaggtagatgtattacagcaggaacatgtcagacggggtaggatctttgggtgattcaggtacaggttacaattgagtactgagcacaagttggctctgtgggaataggacataagccttttcttgtctccctccaacccctaactaagggggttgctaagttcacaaggcgtgctaggttttctacagacatcaaaaatggtcattgagaactgggacagcctgagtatgtaggtttgtcaaggtgatcacagttgtggtgatggctcgagtcatgttttgaaagtattggggaaagtgagtagacaagaaaactaggaatattgctgtgcacctactataatacgcttaaaaataggaagggagcaggtggatgtatcccgttttgtaaattttagtttctggcagtgtgtagtgatgctgtatctgtagactgccccagcttgctccttccccaattcctgaaaataaaagttatttttgtaatgttgtggccttaggcctgttcagtttgtctacttagttattttagaaaggccttttactttggcctccttccatcctttatatatatgtatgtataaaatttttttttttttgagacagtcttgctctgttgcccaggctggagtgcagtggcacgatctcggctcactgcagcctccacctcctgggtttaagcgattctcatgcctcagcctctggagtagctgggattacaggcctgtgccaccatgcccagctaatttttgtatttttagtagagatggtatttctccacgttggccaggctggtctggaactcctggcctcaagtgatctgcctgtcttggcctcccaaagtgctgggattacaggcctgagctactgcacccggcctgtcctttatattatttttaaagtttgtaaatatagatttcctactattagttaggaaatatagacagggtcattaatcttcttacatatgcagatttcttccaggcatgccttctctggtttacctattcctgtaccagagcagggactaccattaggaattctgtaggactccatccaggtttgtgtaaaagaaaagatatttgcgaatgatatatgtggtagctgtaatgtgagtgtgttgtcaagaaacttttaggttaagattttactactgggctgagtacacatgatcattgcttagtttgacgtacttttctttttttttttttttttttttttttgagacggagtctcactctgtcgcccaggctggagtgcagtggcttgatcttggctcactgcaagctccacctcccgggttcacgccattcttctgcctcagcctcccgagtagctgggactacagacccccaaccaccaagtccggctaattttttgttgtttagtagagatggggtttcaccgtgttagccaggatggtctcgatctcttgacctcgtgatcctcccgcctcggcctcccaaagtgctgggattacaggtgtgagccaccgtgcctggcctagtttgaagtattttcaccatgtcatttacttagaatagtatagcacaaattagggagattaacagagggaggacaaatatcttttaggtaagaagaatttcttttttttttttttgagatggcatcttgctccgttgcccagtctagagtgcagtggcatgatcttggctcactgcaacctctgtcccccgggttcaagcgattctcctgcctcagcctcccaagtagctgggattacaggtgcatgccaccatgcccaactgatttttctattttagtagagatggggtttcaccatgttggtcttgaactcctgacctcgtgatccgcctgcctccacctcccaaagtgctgggattacaggtgggagccaccacacccggccgaattcttgttaaagattgttactcatcaaaggggcagtagtttttttctttttgaaggtagatatttatgtccacattttgggttagcttttcatttttttgcccgcatgtacatcatttgacatagaaatgatagtaactttcctgtttggatcaaatgtactactgcaggaagtagtctaccttttagcattcacaacctcaaactaaacaacagacttctgtatgctgtctcctgagaaagtacataggccaataaaaggaacatacctttgggtcttgttgtcaggagcctgtaagaaagtttatgttccctgctaatcttgagtaggcaaacataataaaggtaattttatgatagaactcagagtttttgtacatttaattttatatgattataaacatgaaatatgaatagattttagcagcatagttttgtaattccttaggtagcttaggtttttaaacagttttttttttctcctgaggacagtctcactctattgcccagactggagtgcagtggcatgttctcagctcactgtagccttgacctcccaggctcaagcgatcctcccacctcagcctctcaagtagctgggactataggcacgcgccaccatgcccagctagtagttcacgttttaacagagtacattaaaaactgaatttccccttcataatttccttttttgtactaacaataagattgtaaataaaaaattaaaaaattacccaccttgatttgttactgtattcctttgcttcttttttgttgttattatgtctgtttacccacattggtacacagtcataaatagtttcagtgtatgaatattacattaattacattgatgtactatcagtggtacttggttggatgaatttttagtatttagaagctttaaaaatcctatttcactagaatagggagttggccaggtcaataattttttctgtgtctatcagaccttgacacaacatttttttcttttaaaattatatgtacctgtctgggcgcagtggctcacacctgtaatctcagtactctgggaggttgaggtggacagattgcttgaccctgggagttcaagactagcctgggcaacatggtgaaaccctgtttctacaaaatacacaaaaattagctgggcatggtggtgctcgcctatagtctatggataattggacattttggtaattcctaattttaagtgtttgtattatagtgatggtggcattttagaagggtgtatacatttcctggatgtgatccttacatatagaagtatgtgacccttttgggaggagtgttaagggtatggcatgtggtgtgtgaatttgccagcttttagcagttgaatatttctgcatttttagtgagagaattaacataccagctacttaagtgttcccctcccctgtgctctccagtaatatattattaatatatggattctggggaaccttgttagtgatggctttgttggtagcttttcatttttttgtcttgagaccacttgggattgaattaaatacctttttttttttatggagatggagtctcactctgttgcccaggctggattgcagtggtgtgttctcggctcactgcaacctccgcttcccgggttcaagcgattctcctgcctcagcctcccgagtagctgggactataggtgcacaccactgtgcccagctaatttttgtatttttgttttagagacgaggtttcatcatgttggccagactggtcctgaacccctgacctcgtgatctgcccgcctcagcctcccaaagtgtttggattacaggcgtgagccaccgtgcctggcccctaaattaaagacctttaaaacagtaattattttggggggaaaaaaattaaatcatatcaaagcaagatattaggatgttttgtgtgtgcttttattttgttggggggtacttttgatgaatgtaggaagtcattctttttttggagttgcaaagattcaagcatcatcataatttttacttgcttgtattaatgtgctatagtaataggtatctgacaggtgtttcttgttattgaatttaacttgtaatctaaactttgagtaacagcccataaatatatactaattatggataacctgagaagttacggtgattaagtttcagcttttaggtctgtttatattaaaagcagtgttacttgaatttaatatttagaattagaaataacgcgatcatctgttactttttaatctaataattaatagcctttaatggcagctcactatacatgtgaacttaagcaagtagttttactttaatatatattgtttagcttatctacaaatgggattgcctggttttcagtaaggaaaagcagaagctagttgttgctggataggtttttttcccagaaggaaaatagtgattgagacttaatgcaaattttatttctatgctttatcctccaaagctgttagaatgttaactcttttatagtaggtatagagaattgttacatatgatgaaaacctcaaaagttttttctagacactaggagagagctccaccttgtgatcttggagcatattttttaaaaagttaataacccgcaatagtgcagaaattgtttggtgagtttgatttttaaactgatacttttctttgagcattacatgtttttatagttttgggttacccagctgaagtcaaatggtattaagcacatttgaagatactctgaatttgttaatgtaagtctgtgggggaaacacattggatggatggatggatggatggatggatggatggatggacagacggacggatggatggatagatggatggattgacagagtcttaccccattgcccaggctggagtgcaatggtgtgatcatggctcactgcagcttctacctcctgggctcaagcaatcttcctgcctcagcctcccaagtagctaggtctataggtgtgtgccatcatgcccggctgattttttgattttttgttgagatacggtctcactgtgttgtccaggctggtctcgaactcctgggtttaagccattctccaacctcatcctcccaaagcgctgggattgtaggtgtgagccatcatgcatggcctgcaaattgtatttatatgcagctgtagacatttaaaataaagatgtaaacattctcagctcttcctgtagattaaagtttacatttagaaactactaatcccaactcatccgttgggttccttcccttctaaattacaaagcaattttaatatttgtaattttttgttgagctatgatgaactgtttttatggcaaataagtcatttagagaatgactagcaaacactcggatacatggaatttagcactcttttttttttttttttttttttatttaagatggagtctcgctctgtcacccaggctggagtgcagtggcgcagtcttggctcactgcaagctccaccttccgggttcacgccattctcctgcctcagcctctggagtagctgggactacaggcgcctgccaccacgcctggctaattttttgtatttttagtagagatggggtttcaccatgttatccaggatggtctccctgaccttatgatccgcctgccttggcctcccaaagtgctgggattacaggcgtgagccaccgcgcccggccagcattcttatatttaataataataagtggcaagtaggtaccttctcgtagaaataataatcacatttcttaacaggtattaaggacaaggatcattgttctcctgttcactgttgtattctcattgcccagcactacatttggcacatggtggatactttcacttggttggatgaattttcaacatttagagactttaaaaaaatcttatttcactaggatagggaattggccagttcaataatttttctatcagaccctgacacaactttttttttcttttaaaaatatatgtacctggctgggcgcagtggctcacgcctgtaatctcagcactttgggaggctaaggtgggtgaattgcttgagcccaggagttcaagactaacctgagcagcatggtgaaaccctgtctctacaaaataagaaaaaattagctgggccatggtagtgtgtgcctatagtcccagctacttgggaggctgagatgggaggatcacttgagcctggggaggtcaaggctgtagtgagttgtgattgcgccactgcactccagtgcgggtgacagagtaagaccttgtctgtctgtctctattttttatatacgtataatacgcacatgcgcgcatctatcttgtcttgagagatacatcttacatctttgattttgcttttgtgtttgctttggtttctaattacaaagtacatgttagtatagcctatgctttgcaaaataatttggcctgggaatgcttctttcttttacagtagaaattaattttgtgctatttagaagaatccagtatatcgcacaatattcattttatttagtattctctgcttctcagagatgatgcattctttatattcatcacctgtgattccttaggtgactgtatttacgaactacctttaaagtgtgcttagaaattatattgaaggaaagcagcaactttggttttgatgaaatgctcagagacgcagacagatacagcaaggatcacatgaccttttttattttcatcttgccgtctagatgacctgacctgttcattagaatttattagttctgtgcctctccagttcctttaaaagaaacaaaatgattttcttttataaataagttagcattttaggaggtgaatgtgtatcttacatatgatgacaaacttcagaaaagaaaaaattagccagatgtggtgagtacctatagtcctagctactcagaaagctgaggtagaaggatctcttgagccctgaagtttgaggctgcagtgagctatgatttgtgccactgcactccagcctgggtgacagagtaagccctgtctcaacgaaaataagattttaaaatttatgtatgtatgtatgtttgagacagagtctcgctttgtcacccaggctggagtgcagtggcatgatctcagcttgcttcagcctcccgagtagctgggactacaggtgtgcaccaacacacgaggctaatttttgtatttttagtagagacagggtttcgccatgttggccaggctggtctggaactcctcacctcaagtgacctgcccgccttggcctcccaaagtgctgggattacaggcgtgagccactgcgcctggctgaaaacaagattttaaaatctgagtatctttcagaaaaaaaataaagtggtggtatatgttatttgattattcaggatttaatttgtggattattcattcttgtttctcctattgcctcatttgttattttgctgttcacaaaacataaaattaatatttttctgttttagcttaagtaagctaggaaatacaatgttttgaactttgtatattaattaaatattagtaaccattgatgatgttttctagagagataaaattaccaagacaaattgagctgtttcttgtgtgatatctaacctactgggagaagtcattaggagtttgtcagtatgttatatttgagcatttaatattaattggatatgtttaatcttacctgctttttctttaggtggccaccgagtactaaattcacttgggaataaaagaaaaacataagaaaattataagagaaaggtacacataagactaagagctttagactttagcttcagcctgttttctccttccttgtttgcttttaggtcattttcttcatttaggaaatgcatccttgactttcaaaacatagacataataccctttctgtctgccatttttacatgtactttggtcaaaaatggcattcatttgttgttcgtatgaaattattggcatttaaattgatcgtaagttccttgagggagaggaatagatcagatctaacattttttcccccttctcttctcaacaaagtttgttattatcatgaagtggttatttatttaataagccaggctttggactgtatgtttccagggcaggaaaatctgttttaaagttatatcttaggttttttttattagctccttttaactgtatgtgcatgataccagcaaaaggttgtattttcaggcatctcatattatggtttaaagttctcatagggatttcaggaccagtaagagtcatatcctgtttctatttaggatgtattaatatatatataaagccaggcggagaatcacaagaaaatttaaaaacaattgttttataagcttctttttcccctatgtgttattactgtggggctgcgagtgttacaacaagtccatatctagattaagcagtcaaggtcaggcacggtggctcatgcctgtaatcccagcactttgggaggccgaggcaggtgggtcacctgaggtcaggagttcgagaccagcctggccaacatggcaaaaccccatctctactaaaaatacaaaaattagctggtcatggtggcccgcgcctgtaatctcagctactcgggaggctgaggtaggagaatcgcttgaacctgggaggcagaggttgcagtgagccgagatcgtgccactgcaccccagcctgggtgacagagtgagactgtgtctcaaaaaaaaaaaaaaaagaaagcagtcaaatgcaagggaatgaaatccttatttactaaaacacattagtaggcactggggaatttaacttttgagtatggatatcctttccgaatatttttggtgcatttgtaataaatgtcattttctcctttttaaaggaattgtcttagaagaaagaaggcaagccaccattttacccacgtaaatatatgaatatatttctgacattgaggtgttccagaagatgataaagaaatgatagcagctccagaaataccaactgattttaatctactacagtaagtaaattatattctgataatttttaaatacttgtttattccacaaaatggggaatgcattaacttcagttaaatttccttctgctcgagaagatctaatatataaaatagcttttatgctttgcaagagtttatatcagcactcatcaaggctctgtaataataattattctgtacttttttgttgttgtgttttaaatttgtcttttagtttacatgctgcagtttattattttttgttgtgtagttctgagtccatacttggttttgcaatagcaactgttttgagagagcatcataaaattcctaaaaataaagttttctcattagtgaggtataccatgtggcactatttaggatgtaatgtcagatttctgttacaaaatcaaatgatgattgcagaaataagttacatgtatattggtccagaaagtgttttcaacataggtatcctctttacccccatctgaaaagctaactgtactccttagcttttattctaattactccttggttttgaaagattttgaactactctatgtaacagtgattttcatactaaggtacagtttcatgagttgcctcagtgaaaagtgaacttttaaattgcccgtgaatccctttatttacccacccccaccactgtattttttattaggatctttatgagacttgacttgaaaagagagtttagttgctaaaaattttgaaaacaacagactaatacctttgtacataatggcagccagcatttacttttgatcatatgtagattttcatatttttaataattttgttatcttcagtggagtttatgaatcttctgggaccaaatacattcaggttcccacaaaacagcatttttagtgaggattttatgtattctaagtctcatatctttgtaaaagttaattattacctttgttaatattaagtgtctgctgtatacaggatgttacattagatcctgtgaggaattaagttaggtacttcctgctgcctttatgagttcatattttaaagatataaagagaagattatgaagtttcttatatacttggttagagactataaaaagggtttatattatggactagactattgactgttagaatatctcaaataatgaggacctgaaataggataatgaataaaagggaattgatgttgttcgggtggaacaggcccagcatttgactgggtatgtggggtgcagggcacagtaaagaggaatggaagattcagtcgtgtgatagatgactcaggatgtttcaggtcactgaatggttaatacagtatgtttaataaacataactgttatttcacctagggtagtttttgttgttcttttgatcttaaaaacacaggaaagcattgaagaacggcttaggagagtatttcttctttggttgggagtattttagacttccattctgattactcacttaagctttctttagaaagtttttcagtaagttaccaaacctctagtgcttcactcttagttgggatagcttggagatgagtattaagaggataattgagcccttgattactctggccattggaacattgtgaagactatagtgattttcttcagacttaaagcagttacttagctctttaagagagctggtgtcctacgaaacgcttgggaagaaataaatattacttatacatcaagatattttaaattttcattttttttttgcaagaccatatagacatgtgagaagattattgatgacaacaatcttcttaagatgtaacacacatgagcttcagggttaatattatagtagtcattcagtttttggtgcattaactctagggaatggtatttattacaggccctttcctctcaacattgtaggatatagttaggattgccaccaccttccatacattgtttaaattactttatatgtaagtgctgtataaatagtattttttttcctgctagcatcttaatcattattttagatttatgaaatattcttacctcacagcctctgctacctcatagcctctgggcaactggttattgtagcaataaaatggaaatagaagaaatctagattgagaatactagttttataaagatagcctttcacttcgattccatttattttaagcagagctggtgctaggtttacacatttagggtggaaaaacctttatcttttatggatgtggctcaattctaaaatccagtgtgacccaaatactaatataagtatgccttgctttaagcatttaaatgagggtatgttactactatttagatagactcatgtttactcatttggaaagcatcacacatatttatttaaatcggtcggcttccatatgtttgtgagaaaatccagattatacaaactagccttaccccaacccagaacaagggacagttgtttaggactatagattcatatgttggagattgtagagactttagagatttcgttctttcctgcgtatatattatttatagatgagaagattgagattgtcacttgtataagatccacagttacttagtaccaaaactgttctcctgactatagctcatcacctctttacttcataaaggatattgatcacttagcataattccctagtgtatttcaaatgctttagtttataaaaaggttttataagtaccctttcagaaatacatgttttgtatattgactcacctagatttataaatacttttcgagtgaggtaggagagatcagaggatccataatcataaaactccctaataaagttcctccaatgcctagtattaaaatacagtttttccgcagcactgtgatctttgaagtaggaaatggaaccaacgattacatggaacaccacagttcctagggttaaattttgagacccactggattagttttcatactttgattaaaaattaacaaaaatgtttaggtatttgtattttagattattatttttgtagctgcttatgtaatcttgtgtgtttggtaacgtgctatagtatgatgttttggggaaacatcttaattacttataatgctaatatgaagttttgtaatgagttaaccaagcctttcttttagaaaatatggcaaaaattagaaactcaatataaatttctaaggaagggttttaattcttatctttctgtcacagggagtcagaaacacatttttcttctgacacagattttgaagatatcgaaggaaaaaaccaaaagcaaggcaaaggcaaagtatgtatcaaatatttgactttattttgtttcctaagatctcacacacacacagatttaagttatgtctcagatagttttatcttttaaaaatggctttttaagggggtgggagctgattggtatggtaagccttctgagtaaatgtggtccttttgtcttctagaccaggtagcctttgggatctatttacactgctgtaaagttgcaaataataataataataataataataataataataataataatacatttccagtagtttatttcgtaaagcacagtatgtgaagcagaatgcaatgttctgttggctttatttttgttttcccacaagtaataaaatgtaaaggaaagcaatatataaaatctttaaagcactctaaaaatgtaacatacaaccagtttaaggctaatgggttacaaatgacaatagttttactctttataagtaatatgaaagataaaaaattacaaagttaagttctgagtcaatataatgtaagtttaaagtgtgagtgggttagcctgagggctggatataacttggcgaatggctaaattattttgttgttttggaaagtatatttgactctgcatgtgtgtaaatacattatgcaaaagataacttgtttttgttgttcagcatttgtttttcaaaatgaattttggatttatattgtctcatgacatactttgaaaaagtcttaacaatacagaagtttacgatgaccaaagtgaaatttttccataatcctatcacctggaggtaatttattctttaaacattttgatgcacatacttctattcatacacctatgtataaacatgatgataacattttatttaagtggagtcatactatgcaaacagtttaatgtgcttttaaaactcaatggtatgttgtcaacagctttcccataagtgactgtaaaactctcttttattttttttctattttttaaattaaatttatttgtttttttggagatggggtctctctatgttgcctagactggagtgcagtggctattcactggcacagtcatggcacactacagcctcaaactcttgggctaaagcaattatcctgcctcagcctctcgactggactacaggcaccacaggcctgtgccacgatgcctggcttctctgtaattccttttattttttatttttgtagagatgagatttcactatgttccccaggctggtcctgtactactgggctcaagcagtcctcctgcctcagcctcccaaagtgctgggatttacaggtgtgagccaccacgcctggccattctcttgtgatttctaattgtggcaaaacatcacgtttaatgtatggaacataatttatttaactaatgcttggaatattttttgagtgctcataattcatgtgtttcataattttgtgtgctctcttatttctttaaaaagactcgagagagggatatgaatagaaatattaacttacggctatccaaagataaccttaattctattggacagtataatttattagaaaaccattttttttccattaacctattttgcctttgatttaatttacaagtttggacaagattcttggtggcacctgagtagatgactctgaagtttttgtgccacagtttggttaaggttatatagctactactgtgggtgaggtgttgggacaggtcaaggatttattacaataatagcaactgcattttgagactatactatgtatgttccatgtgttgtgctaacaatttcacatgttaatctaatatttgaacaactgcgtagatgagaaaacaccattattttataggtaggaaactgaagtccagagaatcccagtggttaaaggatttgagttcaggtctgtgcccttaaccctctatactataccacttcctaaagtctttatgtagaagttttttttctctccaaggttgtacacaggttagcgtatttgctttttgtataatgcttcctttgttattatcactccttgcacatttttttttctagcacagcatacccattctgccattttaattgtcccaattagtttttcatactgacagggactattgaggcatttgatagataaactgcaaatatacagctccatgttaattaacattttatattttactagtctattctgttgtagttgatcttttctttcaaccttatctctgaaaatgcttttactggggacaaaagcctttcattgtgcaatcaggaattaatgaattaggttcacaaagactgaatctcatttacagaatatagcagtctcccttattctcagggatacattctaagacccccagtggatgcctgaaattgcggatagtacagaaccttgcatattgaattttttcaatatggtaaccaaaatggctagtaagtgactaatgagctgcgtggatatgctggacaaagggatgattcacgtcctgggtgggatacagcaggatgatgagtgattctatcatgctactcagaatggtgtgcaatttaaaacttttgaattgtttatttctagaatttcctactgaatatttttggactgcagcagaccaagggtaactgaaactgaataaagtaaaacccaggggaggactactgtattgcaaattaacaagtaatatgtttcagatgtttcaggtgttccccttcagggaaggggtttaaagtaactgttaagagttgagtcgttttggactcttggaggaagaagggaccctctaaggaataaagtacataaataccacaggctttcagtggaaagaaatttgtaggcatcgctatagatcagagatccgcaatctgtggcttgtttttgtactgtccaggagctctaagaatagtttatatatatatatatatatatatatatatttttttttttatagagatggggtctcgctctgttgaccaggcttgtcttgaactcctggccttaagcaatcttcccatctcaacctccgaaagtattggaattacaggtgggagccactgctcccggtcgttttaatatttatttatttatttatttttatttatatatatatatatatatatatatatatttatttatttatttatttttgagacggagtcttgctctgtcgcccaggctggagtgcagtggcgcagtcttggctcactgcaagctccgccttctgggttcacgccattctcctgcctcagcctcctgagtagctgggactgcaggtgcctgccaccacgcccagctaatttttttgtaattttagtagagatggggtttcaccgtgttagccaggatggtctcgatctcctgacctcgtgatccgcccaccttggcctcccaaagtgctgggattacaggcttgagccactgcgcccggcctatttattgctcgagacagagtttcgctctgtcacccaggctggagtgcagtggtgtgatctcggctcactgcagcctccacctcctgggttcaagcaattttcctgcctcagcctcccgagtagctgggactataggcgtatgccgccatgcctggctaattttttgtattttagtagagacagggcttcaccgtgttggccaggctggtctcgaacttctgagctcaggcaatccgcccacctcggcctcccaaagtgctaggattacaggcgtgagccaccacgctgggctgtttttataattttaaatagttttaaaaataaagaatgtgctacagagactgtatgtggcccacaaagcctaacatatttactatccagttctttacagaaagttggccaacacttgctttctagatcgtagagatgtgttggtctaaaagagacctttaagaaatcatcaaatccaggggtcggaatacctttctgtaaagtattttaattcaaccctggcatttgagaaatgaggattccgagttagggaatggcttgttttcttaaagtataagagctatgggaggtatttttatagcttaggcatatagggaaccttttcactgatttttttgatgcccctacccgcgcgtccccaccccccaccaatactgacaacttttgttataatgggcttcatttccatagttttcattaattgaattttcatgatgactaaatgttggagggaggcctagaacaagaatgagattgataaacctactcctaatgttcagaattccttgttcagagcactgcaatgatttctaagactaacaatacaaataaaatgttgaactgagtataaggtacatatttgataatgagtttggttattcttgctgcccacttcagtctgcatccaaaagctgcataagggagtaatataaaacttggagatagctaccttgatttactacacccttgagaattctctgattatacttgagagatatttttgcagtgtttttcaaactttgttgatattttgagggcttttaagtctgtgattttatattacttttcaaaatagattcaaatcagtattttgtgtcattgtttctgttggtcttcctaccagattaagattcatgtaacatttactgaactccttttaacataattttttcattttacagtgataacaatagctgacattttttgactttattatatgctgggtatgttgctaagtactttgtgttttcattatcgcagcaaccctatggggtaggcacagttttatcctcactttacaaattagaaaaacatcactgaaacatagtgtggttaagtaatttgcctaaaatcactcagctaatagtagcagaaatttgcacccacagagtctgtctgtctgcagaggctatgctgctaactactatgtcatgtgaggcatggtagtatacttgaaaaaatggacaccacaaagaggctgtcacagttatatcattttgttataagtggatggaattctttagggcaagtttaagcatgttatgtaccctatcagctacttctactgtagctgtgttttgaactctcaaggatagtgatataacttaaccacctcgtattttttatgcagacttgtaaaaaaggcaaaaagggcccagcagaaaagggcaaaggtggaaatggaggaggaaaacctccttctggtccaaaccgaatgaatggtcatcaccaacagaatggagtggaaaacatgatgttgtttgaagttgttaaaatgggcaagagtgctatgcaggtaagatttatgttgttcttcccagttcatttgtacattttaaactttaatgagttatatagagtgtagctctgatttttctaattgcattttaaacatacactacttattagaaaaaagcaacaaaatcatcagaaaactcttgggatgtatttcttcatatataagacttttgtgctgtgttttgattcattttctgctgcatgcttttttcttttttcttatttattttattttattttatttttttttgagacagagtctcgctctgttgcccaggctggagtacagtggcatagtctcggctcaccacaacctccacctcctgggttcaagcgattctcctgcctcagcctcccaagtagctgggattacaggtacaaaccaccatgcctggctagtgttttttgtttgtttgtttgtttgttttttttgtttttttgtttttttgttttttttggtgggtattttcagtggagacggggtttcaccatgttggccaggcttgtctcaaactcctagcctcaagtaatctgccctccttggcctcccaaagtgctgggattacaggcggaagccaccatgcccagcccattatttattattattattattatttttttgagatggagtctcactctattgcccaggctggagtgcagtggcacgatctctgctcactgcaacctccgcctcctgggttcaggcgattctcctgcctcagcctcccgagtagctgggattacaggtgcccgccaccatggctggctaatttttggtttttagtagagatggggtttcaccatgttggccaggctggtctcaaactcctgaccttaagtaatccacctgcctcggcctcccaaagtgctgggattacaggcgtgagccaccacgcccagccccaacccattatttttttttaatggcctaaggtaaaaaataatttggtcaaaaatatgctgatgtaaaccatggctatgaggtctcaattttccctgaatttatatagatgccattaaaatacgaagtcttctacccatatggaattcctggttgagtgacctaatataattattatccactttagtggaatgaattattttagttactgttgtctattacaaattttattatttgtgcttgtttcttagaagaataaaaagttggaggcatattcatgtcgaatcattcgaattatgttttctctgcatacttttatgacaatagaagcatttaggctttctaatgttggctaaaccattagaaagtggaataaatacaatactcaaggagtatatatacttaataaagttttaatttaatttataaaagctacaggcaatagtttttttttttaatttcaacttttagatacagggattacatatacaggtttgtacatgagtatattgcacctaggaagtgagggtagtatccagtgggtagtttttcagtccccaccccctacccccagtagtccgcagtgtctatgttttccacatttgtgtccacatgtgctcaatatttagcttccacttacaagtgagaacatgtggtatttggttttctgttcctgcgttaattcacttaggattattgcctccaactctacccatgttgctgtgaaagacacaattgcattcttttttatgactgtggagaatagtatttcttcatagaaataactttaatcagtgatgggtgcacatgaatggttatctgagaactatccgttcaggctttttgttaataaaaactgacacaaataccttgtttagaaatatagaattagcttaatatgtgtggttttataaataaaatgtgtcaaatgaggctaataaagaacagttttacatgtaaaatgtgaaaatacttgttaattgtttgagctttcgccaattttacagagcaaagaacttaaaaggtgccagatttattcataccattctaatgcacctttttaaatccgtttattaatgtttgcttgtatatcatgattagagtgtggattctttttcttgtgtaatgttttaaattactgttttgaatatgtttggcttttaaaaaataaataatgtcttattatattgctgtactatggtttatttagtcattccccaattttaaaaattacttttctctctctagttctccttttgggttatttttatcaagaggataaattatttcagttacattgtattgcatttcattactttccttcttttttttgtattatacattttctctaatattttgttctaagtagttaaatgcactaatcttctttcttctgctatctttttaacatcagtgtcttagtccatttgggctgctattaaagaaactaacataggccaggtgtagcagctcacataatcccagcactttgggaggccaaggtaggtggatcgcctgaggtcaggagttggagaccagcctgcccaacatggtgaaacccagtctctactaaaaataaaaaagttagctgggcttggtggtgagcacctgtaatctcagctactcaggaggcttaggcaggagaatcacttgaaccctggaggcgtaggttgcagtgagctgagatcgcaccattgcactccagcctgggcaacaagagtgaaaccctgtctaaaaaaacaaacaaaaacaaaaaaccaacataaactagaaagcttataaaaaacagaaatttatttcttacagttttgcaggctgcgaagttcaatattaggtgcctacagattcattatctggtgaaggcctgttttctggttcatagatggcatcctcttactgtgtcctcacatggaaggggcaaggcagctctcaggggccttgtgatcttattgccatctataggctccacttcttaataccataacattgactacagttcaacatacagtttgaacacaaaacccttcagaccacagctatgagaaatcctgactcataaccacagctaattgggctattccatttttatctaaaaatgaatattttctttatttttgtgttgcttatggcttgtcatattaagattgtacctctatctgtgccatttttgttttcattttttattttaagatgaggtttcattatgttgctcaggctggacttgaactcctgggctcaagcaatcctcctgcctcagcctccccagtaagtgggactacaggcacatgccattgtgcctagcttgtttttctgttttgaaatgtgtttccctcttaagagagaatgtctgcactgtctttccattgatttcctggaatcttttcaacaattttattttgttatgtgtgttcccacttgtgttacccttttaagaccaaatttgatggaggaagtcctctgtttagaaacttccaagggttcttatctaaaatttctagctcagatttccttatgccatgttttctgtcctccagtcacagtatatactctgcccttagacttttctttttgtttttcttgttgtttgcaatagttttattttactccccccttgcatatcaaataggactgagcgaatcaaatgtcagtcttctgaaaagcattctcagacactactacttttcctttccaatgtgttttttactcttatcttttcattatatagcacttatactgtgcctgactttgactctagattgctaattctttgatcaaagatcatgtgttattcattatttttgcattgccaggatatacctatctcagtagttgttgttgttgttgttgttgttattattattattattattattattatcattattcgagacaagatctcactctgtcacccaggctggagtgcagtggcatgatctcggctcactgcaacctccgcctcccgggttcaagtgattctcatgcctcagcctcccaagtagctgggattacaggtgcatgccaccacgcccagctaatttttgtttgtaccttttggtagagacggagcttcatcatgttggccaggctgtctctctcagtaattataagtgatagtcaataaatgcaagaatggctgttggtttaaaactggttgttatgttttaagaatggagaaagtatgcgtgtgccccttaattttattatataacagatgttgaattttgttacataagttctcagcatactatttgattaaaaattttaagcatatttcagtagctcgcattatttttattatagcagacttattttcctagtgtaaactctacttgatcttaatgaattactttttaatgtgatgtagtggtctctttgtaagagttcattgaatattttgcatctttattgatgagagtagccattgttccagttatctattgatgcataacaaaccaccccaaacttagtgatgtgaaacaacaatcattttattatgcctaatgattctttgggtctggaattcagacagaactaagtggagatgacttgtgtctgctttatgatgtcaagggccttagcttggaccatttgagtgcctggcactaacacagttagggactataatcatttggaagcttctttactcatgtttagtgcctagtctgtagtgatatgaaggctggacttagccagaactgttagctgcataactacaaatggcctttctatgtggctacggcttcttacagtatggcgtctgggtttggagagaatgtcctgagagaagtgtccagtttgctagtgctccaagagaccagtgcagttgctgcctggcattctgtgacctaattttggaagcatcactgcattctattctagagaagatgacatagaccctcttactggggagcaatgtccaataatttggggccatgttttaaaactgtcacagtctctatgatatattcttttgctgtttattgcctatatcatatttgggaaaaatactgagcacatttcttttgtaaattatgttggttaatataaacaagctgttgtaaatacaacaaagtagaaattaagtaaagttttagaataattccagtcagtctatctgaaccaggtatttcttagatatttttccttgatttatctttattgtgtaatcatagtatcttttttgtacattagattctacatgttttagtcattgtttgtacctggatttcctatttattggtatataacttagaaacatttccctctcccaaccttttgttttttatactagctcttgtttatcatcttgattttatttaatttgctctatttaaaaagttttgttgttgttgtttttgtttgtttgtttgtttggagacagagtcttgctctcttgcccaggcgggagtgcagtggtgcgacctcagctcactgcagccttcatctcccgggttcaagtgattcttctgcctcagcctcccgagtagctgggattataggcatgcaccaccacacccagctaatttttgtatttttagtagagacggggtttcaccatgttggcctctcgaactcctgacctcaagtgatccgctggcttcagcctcccaaagtgctgggattacaggcgtgagctaccgcacccagcctaaaaattgaaaatcagttttgtcgttgcctctcttgccccgaaaggaataaagtattccttttatttttagttctagcctattttcttttttaagaaataaccatattgagatatatttaccatactataaaatttaccctttaaagtgcaaattcagagttgtacagccaccattacaatataattttagaatattttatttatttttattattttttttgagatggagtctcactcactctgttgtccaggttggggtacagtggcatgatcttggctcactgcaacctccatctcctggattcaagtgatactcctgcctcagcctcgcgagtagttgggattacaggcgtgcaccaccacgcctggctaatttttgtattggtagtagagacaaggttttaccatgtcagccaggctggtctcgaactcctaacttcaagtgatccactcacctcggcctcccaaagttctgggattatagacatgagccagcacacctgccctgtattgtcttaattatttgaaattctctcctttctttaatgtcactgagaaatcataagtaattatacttgatggaattgacttccatagtttccacattcttttcaatgcaaaataaatagaagattgataggtcattttgtgttatcagataattgttttactgaattcgattctattttattattgttaaaattgaactttaaatttcagtgtataagtatttatattaaagtaatgtgatactatataatcttgaattttatgactttatcagacttaattgattttgagaaaattagaagaagctaatgattttatttttttccctctgctgtagtcggtggtagatgattggatagaatcatacaagcatgaccgagatatagcacttcttgaccttatcaacttttttattcagtgttcaggctgtaaaggtaagatatatttattttgaaatcagcagctctcaaatagtcacttcgttgttccacctaaagagatgttgttagcactttacatggtaaataacgctaaggcattatttgcatcatatccatataaaatttgtaaggaaaaaagagcaaaggacaaagtaagagagaaagtctattgacaaagttttattcatatgtgaaagttatctaaaaacttagcagtttataattattatgttacttttattagatatatttcccactttcagcatctggttttaggaacaaagaaattgattaagaagggaggaggaagataatgaagagatacaggttcagatgacaggtaatcgtacagtgtagggagttaaaaagtgccatgaataacagtaagtaagcaagcaagcaagtaagtaagttacgttaagtaagttaaataaggtattgataaaatcgacatttcttctaaaaggtaaagaaattttgttgtgtgtagtggtgtctttaaagtgttttcactttattttaaaaatattttgaactgggaaagatgaaagtacaaaatacagaaatttcttccctaagacagaagtatttaggacaaacatttggcagggggacaaaattatgtaagttggggagtcatatatcctcatatggatcaataaatgagccagtcaagattacgggcaggttctgatgtatctggtgtctcccaatacttagctcatccttgaaatttcagatgatgcccgggcaaatacattttatggagatttctgggggtattttttttttttaatgaaagtggcatcaacaacattagagcattagaaattgggagaggaagttgcttaaaaatagatataaaacgttaagatggtaaagaatgatttatttaaacaaatgcagaaactgaattgtaagaagcaattcaattctgcagtattcctttaaagataccgtaatatctttgaaaaacaagtaacattggtagagtttgatcacaacattcagtgtagtatgtgtattaaatgttacctgtctgtgaggcctgaaagatagacaactatattaaattcttgagcctgtgatctttataatgtcactaaggtgttgagaaatttaaaaaattgtcttaatcatagcatatagaaagctgcctagtttacttcatttgcctaaaataaaagtagctttaattcaatattagaaaattcagctgacttctgctcagaggagatgttgtcatgatgttactatggtatccttaaggttctgaaccagattgactgtttaaagatgagctatactaaaattatttttccctatatccagtcatttttttctggggtaggatggatataagtacctgcttgttgtgtcatataatcaagggctatgtcctttctcattaggctctttgcaaatggaaggttgagtgcagacagctgaacagatgccagaaataacgtaatgagttgaaattttaaatcttaagtctccccttttatttattattattattattattattattattattttatgagagagagtcttgttctttcatccaggctggagtgtagtgtcgtgatcatggctcactgcggccttgacctcctgggctcaggtgatcctcccaccttaacctcctgaatagctgggactacaggctcacgacaacacgcccagctaattttttgtttctgtttttattttttgtggacatggggttttgccatgttgcccaggccgcaagtgatcctcttgcctcatcctccgaagtagctggggctacaggcgtgcaccaccatgcccagctagtttttatttttcgtagagacagatctggctgtgttgcccaggctgatcctcaatctcctaaactcaggcagttgtcccacctcagcctccaaagtgctgggattacaggcatgagccaccttcctggcatgagtgagtttgtttgtttgtttgtttgtttgtctgtttttggcatgagtttctttctttctttttttttttttttaatttaatttttttttgtagagacaggtctttctctgttgcccaggctggtctcaatctcctagcctgaagaagttgtcccaccttggcctcccaaagtgctggaattacaggtgtgagccacccctcccgcctgagtttcttaattaggcttctgagttgtagttttttttaaaacaaggccgcagagcatgttccctttgtcaaattcattccttttttggcatcagtttgtttacaaatcaggagcttgctaactcaacatttggaccttgtcacaagtgagtttgtcaagatttctaaaaacttaaggtgttgaaaacttaaattgtaaggttaatttaagcactgctgtaatatttatcttagaatcaggcaatctccatgaaggggaatttactatataatcaaagataaagccattaattacttatacacacaaaattattttaatataattcttttataaatgacttagaaacttctttaagtatacttattgtaatttaacatttcctgcagacccaaagttgttataagcatcagttattttttctacaatacattgatggcttctgtagctgttgaagcatggagggatatttaactccatgctgctcctgactgctccgttggtgattctgtggccagtgttttcttctttttttcctagtcagctgtcacttttctttttttctttctcttttcttttaaaatagagatagggtcttgctctatcacttttagatttaccggattttagcagtcttgctaaaaatgtcccccacatttttaaggcagcaggctctggccttatgtcctaatggtggcttcatacctgcctcaagagttaaatgaatggagtttgtgatagctactttcttttctgctctgaggtccttttctgcttgtttttgggtttctggatgtcttgtggtttatgagacggggaggagctttagaaatgagggattgttgaaaagtatgcagtatgtttgctttgagatatatttatatgtaaatgttaatttcacagaaatgttcaggtcattagttactttttgttctctagcattcccaggtatacagcacctgggtatgaagtatgggaagattttgaagagagatacgtgattctagattaaaaacaaaagcctttcaaaaggtttttgagagtgttttctcttctcctcttctctcttttttttttttttttttttgtgagacagagtctcactctgttgcccaggctctggagtgcagtggtgtgatctcggctcactgcaacctctgcctcccagattcaagcgtttctcctacctcagcctcccaagtagctgcgattacaggcatgcccagctaatttttgtatttttagtagtgacggggtttcaccatattggccaggctggtcttgaactccagacctcaagtgactcgcccgcctcagcctcccaaagtgctaggattacaggcatgagccaccgcacccggccaagagtgtgtttctttagccagagaaatggtgctttctcctgagttcatcaactttttaaaacaatcatttttttttttttttaagttgcggtaagtaaggattcttctagggtacgactagaaattaatctcacccagataagagggaggcagcatgatttaggtgaatagtctcagacaaattatttaatttcttttagccttagcctaagccttagtttcctcatctttgaagctgggattatggatttacagctatgtatatacacaggcgcgcgcacacacacagatgcatgcatatacaaaatattgctctggtcaattgaaaaaaatctatgttaattatatctagttcttatttataaatctcatcttcttgtaccaagacattcttcttttagatattactatatttatggtatttctagtgagaagactagtaagcaaataattcaacaataaaaacaggattttgaaaatctagtatttacgttgattacccctgcccccatctctctctttctcagtctgatgccccatcagtggaagttcatgtatctcttcttactgcacactagaaatttcctttctgatgtttggtctccacctgactaatgttttactacttctaatgtgtaccttttcttttttcctctcccatcctcctgtgtaagattctaaaggtccttatcaaattgtttctctttgacatagttctttattttctaacttataacatgtgtggtttttctggtgggtatggagtggaggtggagtcagagctatagcatttggcatttccacacatcagggctttgattatgtactacttttgacagcttctttttctttttggtattctttagttttaacttttaactagattacaggcgtctaggtgggcaggaactacaatttactacttagctcttttagaggatattaggatgtagttactttacatgcaatagtgcttaataaagagacttgactaaagtgaactctagctattactcttttccttatcttcagcttcatccccaaggttttaagtgttatactagatgctatctcactcttgataacatatggtttatgttaaagagacaaagccaatataaatattacagcatgagtaaagtgagtcaggtagaaatggccaaagttaattgtgttaggaaaaaagatatctgtcagaagtatggggctgttttcttgtgcatactgagaatagatagcatttgtttgtgctttatttatagattagagtatcatggtaaagattattagatgatggttgaagaagtatgccttttattgtgtgaccatagacttcttagtgttagagacttacttggaagttttctttatttttttatcacaccatatattaacttctgacatttgcaaatttcaggagttgtcacagcagaaatgtttagacatatgcagaactctgagataattcgaaaaatgactgaagaattcgatgaggtaacttactaccttaagtgttttgataacttatgcatgtttatcttgacttatttttgaaagtattattaaattgtaagcattaggctgggcatggtggctcatgcctgtaatcccacactttcagaggccgaggcaggcggatcacctgaggtcaggagttcgagaccagcttgaccaatatggtgaaaccctgtctctgctaaaaatacaaaaaaaattagccgggagtcgtggtgtgtgcctgtagtcccagctacttgggaggctgagataggagaattgcttgaacctgggaggcggaggttgcagtgagccgagctctcgccactgtactccagcctgggcaacagagtgagactccatcaaaaaaaaaggaaaaaaaaaattgtaagcattaatgttgtaaataagagctttggcattagatttaatcaaatgatgcctgtgcgacctttggcaggttgttgtcttagtgtcagttgtttttttttttcttttttcctgagacaaagtctcactctgtcgcccaggctggagtgcagtggcatgatctcactgcaacctctgcctcctgggttcaagcaattctcctgccacagccttccaagtagctgggattacaggcacccaccaccacacctgaataatttctgtatttttagtagagacatggtggggggtggtgggcggtgtgggtttaccatgttggccaggctggtctcgaactcattacctcaagtgacccgcccaccttggcctcccaaagtgcggggattacagcaggtaggcgccactgcatctggccagtatcaatttcattatctgtaaaatgggcctaatagtactttactcataaggctgttacgaagattgaattgagtaatgtttgaaaattgcttaacattttatggttcccagaacatagcaaggacttaataaatggtagttattattgacaaaaatgaaaatgtcaaggaaaagtataagaacatatcctggaatgttgtaaaaggaaggtttcagcaatatttagggaacctgatagctagggcaaaggagtatatagatacttttattgtttaaaaactcttaagaacaacaaagattacatattagtttagactgagttgtcccccccttacctccctagggctagattgagttgattatttcattgagctctttgaagtattgttaccaataaatacatacatagatttactataaattaagcttcttcaaggaagggatttgggtttgtttgggtcacggctgtatttcagcaccagtacttttactcttccaaaatttttcgctgtgggttttcaagtagaaaatgttgtctgatttgagttttatttggtcttttttttcttgcttactctgatgaaggagctttgaactattattctaaaagatagatgagttaaaatggctttgatgatcgctaagtgctattaatcactccccaagtagttgagaagtaattttgaatagtggcattttttacccttttaatattgaatgttttagtgagaactttctcactaaaagggaacaactatttgagataattgtcctgaaatatgatttgaaaatgtcagcaaaccaagttgctaacaattaagatgctatatttcaatatagtcactaaattagccaatcagaaaataccaaaaaaactttttttgtggaatatcaggaccttattctcagatgagacgcaactgcacttacatgtgacatgacttcagattttaaaaaatgttctgttgacaaaaattaatttttaaaatttactgaactgaattaccttacatctctaggatactcttgtcagagaccgttacttttagatgttctatatggtattggtctctgcttttatttctaagtacttcattgtttttaatgatttgtggagaatctcagtttaccctgagactagagaatgccctcttgttgtgcaaaggaaaaccagagtaccagtcttccaaggcaatactagctacatttccatttctttaaaaaattatgattgtttatatctgttgactgtgtgatgtatttgaagctaataacatatttctaatgttttgttgatttatacatcatacattttatttgagagtataatttccatcattttgaatccatttaaaaatataattttggtttggtttgggtttgcttttgctttatatctgtgcttatcacaaggatgttttgttttgatgagggaggcttttaaaatttttaacctgagtaattggtatatattttcattgattaaagtgaattcagaatatctatcttgatcttaaataaagagctgaagtgttcagaggtacccctacctttatatattgttctcttgcctactttgaggatttattggagaagaaaggtgagataaagataccttttcatgcttttgtctagggtatttcaaaagcaagtgatatgttaagtcatgcattctaaatgaaattgctgttttaaatttttgttttaggatagtggagattatccacttaccatggctggtcctcagtggaagaagttcaaatccagtttttgtgaattcattggcgtgttagtacggcaatgtcaatatagtatcatatatgatgagtatatgatggatacagtcatttcacttcttacaggattgtctgactcacaagtcagagcatttcgacatacaagcaccctggcaggtcggtatttagaaatattttctgcatattgtcttagatttgagatgaaaaagattctcatttaaagagaaaggaaataacagagatacaaattaattttatttataaagtgaccactaagaggacactcccccatccctcctgcgaattcctggaaatgggatgataatttcagttttgattttgtgaaggtatactataactagtatttggtaattttcttgtatactatgcatactgtgccacagcaggggagaattggacaataggtatgtgttgggttcttgaaaaatactatgccacagcaagggaaaattggactataggtatgcattggattattgaaaaataccatgccacaagaagggaaaattggatgataggtatgtattgggtttttgaaagatatgttaccagggaagatattgacagcagatttggagatatcatcacagtcattttggatatgtgatcctgatgccatttagtttgtctttggtgtgcgttgcctctccaggtaggatggcccctactagatgatgcctgttctttcagtcacactgcaaaaaattgatttttcttatgtttctgggtaactttaggctggggcaaattctttgatctttaaagtttaatgaaataaggtatatttttatacctcataacatctgttagttcctcttttgtgcttaaggtaaaattggtgatacactgctgttgaatttgttgcttttgagtttcaataaataaaataggcattaattgttatgatagtattctgaatcttctgaatcttaatgatattttgatttttaactaaaaaaactttatattctctgttggtttgttttttatttataagattttctcaaagaattaaatctatgattaaagatatgcttctacgtccttcattattaaagagaaaatgcagtttcccgtatgttgtttttgtttttagatttgaagtcagaaaatatgaatgtgatcttgctttatgcacttgtggtagcaatgtcaataacttgatggctaaagtaaattaaaacagggattatggtgcaagatggatacttttagatcagagtgacagactggtttgctgggagcatgaaattaacttagagcagaaaattgggaaatctttctttaagagagccaatagccacaaatttaagatgtagttttattgttgttgtatcatgcaatgcaccaagtctgagaagtagtctggagtaagctaaagaaagcaaaaagtgatcagatctttcagttaataaattttaaatcccaggcaataagaatcttgtatcaggagtaagagtttagtaacagaaggtagagatctggaggaagttttatgaaaaagcactttaattaagtcacattttgccctttgttcttttgactttccatggagatctgttcacagtttcatcagtcatgttatagagtaaaatgaaaggaaagcaaatactgataaaattcctcaacattttcataaaatataatttgatgtaaagccatcaagttccttttaattactgaatagctaaataacttctgtgtgaactaaaatttactttagaaggtgaatcatgatctatgaaaatgattattttagaggacatattatagaataatgggatttaaggatagactggagtcagattgccttggtttgaatcctggtttgactgcttatatgaactgaggcaaattttaaaatttccctgagcttcaattttgccgtgaatgaaatgggtataatacttacctttgagagggccattgtgaggattaggagataattcctgaaaagttattttattttatgttattttattgtcatttgtagcagctgcatctttcttttgttagaagcagattagctcatttctgcttaatatttctatttgatcttaaattgtaaatttttgtgtctgttagattagtttcaccatacttttactctttaaaaatagctatgaagttgatgacagctttggtgaatgtggcactaaatcttagcattaatatggataatacacaaagacaatatgaagcagaacggaataaaatgattggaaaacgagccaatgagaggctagaactcctgctacaaaagcggaaagaggtaaacttttatattgaatatttaggctattgtgtgaccaacttggtcaccattaattaggatataactttgctagtggctcagataattgtttttgaaatatttaaatgtaaataacatttcaaactatttgcccaacaaaattctgatgaatatccgtgccaacaatactgttttcttattttcaacctgcgtggactagtattaagagtggctttaagtaaggggactggggttagtctgacaagttgtcttaagctttagtattattcatctctacggtgaaaaaccttttgtcaggatgaaaagagatttcacaattaaaatcactttggaaaataaaatcactttgaaaaataacataagctgtttattggcatctaaatcagtgttttttatacagtagaaggcatttgtttaacattaatgactgaccaccaaattcaactctgaatgaggaaaataattttttcagccttatgcgaaataacagtaaataaaatcttttgatgctgcggctgtaatttaaattctttcttcattggtgataaaatattttgctatctcataatggagatgtttgttttcatatcaaataggcaaagtctgatttttcaaaaatattagtaatgcagttgaattcagtagttatcatggttatctacgaattattgacctgatcttgaatttttttggggaggggaattagtagctaattttaaattggttatttctgaaatagttaataactttaaaacatatccagactcaagaattgactaagaaaaatcctgatcatatttcacccatgtctaaattcctcatatttttcatataatttgaaataaagtgttgatactttttccctttaatttatgtatatgctatatagtaagtgatatgtagtagcaaactacattacagatttctttacagtgttttttttggaggcagaatctcactctgtctcccaggctggagtacagtggcactatctcagctgactgcaacctctgcctcccaggttcaagctcctgcctcagcctcctcagtagctggaattataggcttgtgccaccatgcctggctaatttttgtatttttagtagagtcggggttttgccatgttggccaggctggtctcgaactcctgacctcaagtgatccgtctgtcttggcctccccgagtgctgagattacaggcatgagccactgcacccggccttctttacagttctttagtggaaatttatgagcattagaaaaaaaatctactagctaaatattaaaatcccaatcaaatatttcaggtattaagggactttatctacctggtaatataactgttaatttttctatatggttactgttgtctagtataattcaaaattccccaaaatactggggaattctgctttttttgtgcttgtaacaacttacaggtgttcatttggttgtcttcctttacaattgaaaagaaatgatgtgtttttttacagcttcaggaaaatcaagatgaaatagaaaatatgatgaatgcaatatttaaaggagtgtttgtacatagataccggtaagttgtgacagtttttttcataaatagcattatgtaatttctactcagcaagtttgcatatttcgtggtgtagggaatctaaattagcaggaagaatgttatagtaaaatcaatgttagactccattagtgccactgagtcactctgggcaagttatttaactcatgtgagtttggtgtttcccatctgaaaaatgggataatgctgtgcttgacttgcagccagtagaagttactgctatttggagttgggctacacaatacttaattgcctttggatgcactatgttagtagagcctgcacgtgctgactcctgactctcttcccttccattgaatatcagtgggaacaattggataggttaaagtgagatattttcttttgctgttttgaatgaacagaggaaagaaatagtaatcttataaatttatgctgtaacctattcttaaattttggtagtatttttattcagcttccacatatcctcaacttggcagttactgaatcaggttaatgcttactttttgtaatgtctccatgtccattcttaccttttcacttctattgtcaccattaccttagtctgtttcctcattctcatgcctagagattattgcagttttgccaaaatatccttttattgtgttattcctctgccttcaatgactcaccagtacttacaagatgaatttaaaatcatttattctaacattcaaatcccagttgagcttgacctcagtgtaatgtataaataatacttacctggaaattacgctctagccagacaagtgtgcctgctgtcttctgaacacaccatgcccagcaggtgtgagcaaaggctgggatatggtatggtataaaaggtggggatgggattttgtttgtagttttatataattttaaatgtttatgtgttgataattatgctttgccacctaagcttttggcattcaggcccatgcttcatttctattttttaatccctagtaataagataatgtcatattcatagtagatctgaagtacttggcatctcttgaataaaccataagttttgtggtatattggcactaattatgcatcgtttttccttcccccattcagtgatgcgatagctgaaattcgagctatttgcattgaagagattggcatttggatgaagatgtatagtgatgcctttcttaatgacagttatttaaaatatgttggttggactatgcatgataaggtaagatgtgcccttcagactgcttctttctacacatcggcgtggctgtctgcacctctcattcatgagttatctcccagtatgtatacctggtgacacatttctggaagcctcccctttattcttttctatcttctctgtaaaaacttattttctatcacataaagtctgctagatatttttgaatcctggccactgatttaaccattaatggtgaatcatttttttgctgaaatattacagtcatgaaggtagtaggagtgaggcatttcttagggcacgaagaagaaccattacgctgttgttatctgagagctatatacttaaaaaaaaaattattcaattttgatcctctcttttgacaaacctgtatcttagccagattataccttactacttggtttctgacctttttaatatgttttcattaaactaccattctcttaggctgcctcttcacttgccttgaagaaattgattgtatataattctttccaaacattacttcccatagtggaaaatatactgtgacacatgcttctattgtttttcacaatagatttgttctgaacaaattttcaaaaattatcctttgaactacagaaatagtaaccccataggtatttagtcataaatgtatgtactgattactatttttgcattatcaaacatgatagtttctgaaggaatgctatggtatgaaacatttaaaattttaaagtagaaaatattgtgtacatcttgaatattgaagttgaaaatacatagagttttaatgcattgtctcatctttttttttttttttttttagcaaggtgaagtaagactcaaatgtcttactgctctacaagggctttattataacaaagagcttaattccaaactggaactttttaccagtcggttcaaggttagtattacttaagaatttacaaataacttgtcatttgcaaacacttttctcttgctttccttttaaaaatattttaatttttttgtccttaggatagaattgtgtctatgacccttgacaaagaatatgatgttgcagtacaagcaataaaattactcactcttgttttacagtaagtatgtatttgttgcatatttgcactaatgttcagatatctaaataatatattagagtatttggttcagactcatctaggtctaaattttagtagcttacgtcatggaggtttacagctagaagttgaatttcttcatgtatagttgagaaaacacaggaagaaggaaccatagaatatggaaattcttttttttttcttttttttttctgagacggagtctcactctgtcccccaggctggagtgcagtggtacgatctcagctcactgcaagctccacctcccaggttcacgccattctcctgcctcagcctcccgagtagctgggactacaggcgcccgccacgacgcctggcttattttttgtatttttagtagagacggggtttcactgtgttagccaggatggtctcgatctcctgacctcgtgatccgcccgccttggcctcccaaggtgctgggattacaggcgtgagccactgcgcctgaccgaatatggaaattctaactgagctaggaattcatgtgttcccattctcttggcagattgatttccttcctgtttttctgtttttgatgctcttgaaataagcacatcagtgtattaaaaaacatgcttattgtattttgttacacttttagagtatgagcatttataagaatgtctgttatacttctcatagcacctttaaacaatctgaatttaagacctattctgtgttaatatctgatagtgatgttattcatatttttcctttttaaaaaatggtagtaaaatatagattatgtaaaattcaccattttaaccattttaaagtatggtttactgtcattacctatatttacgttgttgtacaactgccaccactatccattgtcagaaccttttcatcactttattctggagctctgtacccattaaacactgattcttcattgtcccctttccccagatcctggtaaccactgttttattttctatctctatgaacttgcctattctagatatttcgtataagtggaatcatacaatatttgttttttgcatctggcttatttcacttggcataatttcttcaagtttcatacattattatagcacgtactcctgtttatagctgaatatttcactatatgtatattccacattttatttatccatttttgcattgatggacatttggactgtttccaaatgttattgtcagttattgtcagtaatgctgctatgaacatagatgtgtacaagtatctgtttgagtctctgctttcagttcttttatgtatacccagaagtggaattgctggatcatatggtaattctgtttaatttttttttgaggaactgccataatgctttttacaaaggttgcactgtttcacattcccaccagcaatgtacaagatttccaatttcttttttttttttttttcctgagatggagtctcactctgtcgcccaggctggagtgcagtggcatgatctcggctcaccgcaacctccacctcccgggttcaagcgattcccctgcctcagcttcccaaatagctgggattacaggtgcctgccaccacgcctgggtaatttttgtatttttagtagagacgaagtttcaccatgttggccaggctggtctcgaactcctgacctcaggtgatccacctgccttggcctcccaaagtgctgggattacaggcatgagctaccacacccagccaagatttccaatttctgtacgtcctcaccaacacttgttttctgcatttcaggataaatatttatcaagtgatgtctctataccaagcacttgggtggtatgttgagagagttaaaaatcagagccttctcatttcaaaataatatgacgttttataaaaatacctagaaataagaaatccaccagatatatgcaaagaaacattaataaaatgcaactaagggacataaaagaaggcttgaatttggaaagcttacctaggaaaactcagtatttaaaggcttgtaatcttcccattctgtatatttaccacaatgtaaatagtaaaggcaaaggaattttttttttttggccatagcaagcaaattgtgacatttcatatggaaaatttatcatgtaagagttgccagaagaatatgatacaaactaatgagtgaggactagcccaatgtatttttaagtcatgtattataaaatcatagtaatttaaaaattttggtcctggtacatgaatagacaaaaaagatcaatgaagcagaataaaaatagagatgaacacatatgcaccactaaaatgaccatgtaaggctttcatgagcatgacacaaaagctagatataaaaggatcaatgaattaactatataaaaacctaaaaatgtctgtatggcataaaataccataaactgagaaaacagatctcagattgggcaagatatttttgcatcaaaggagttaatttctgcaaatcaattaaagaaatctgtaataataggaaaacagtcaaatattataaatcagattattgacagaaaagtatgaatttaaacatatgaaaagatgttgggccacacttacaaacatatatattaaagtgagacttttaaatctgtttgcttggcaaagatagaaagtgtttggtaattacactatattgttgaggctatgacgtaacaggcccttttacattgttgatgggagtataaattggtctaagctccttggagaaaaacttgacagtatctgtcagaatttcaaatgctcatgttctctaacaaagcattgtttgtaatagcagaattttgaaaacaaccaagggtgcatatcactagaggaagaattaaattagtatgtaagataatagctaatataagcactttatatggataatttcatttaatactgcagctcagtgagatggtagtggctattcccatttctgtgaatcggacaacattgcagtaattaaaaagaaggcagttctacagatattgacaattcagggaactcacttaccttggaatttcttgagcagtctgttaactgttgcattctttaatttttaattatattttaaaatcataaatgttatacacacatgttgtatataaaaattttgaaagaattctgaaataaagtaacagtatgctacatatatttctatagcttctttcccaccatcctccacagtacactagaaacatcttctttctgatatttttatcaaaggtaatagacatacccattcatgttgattttcagccatctatatacctaataatttaaatttcttagaaacgttccttttcaaaaagttaaaatgagtgaacttctgtagagttacagtactttaacttgtttgattcagtgttttttttgttttgttttttagagacagggtcttgctttgtcacccaggtggtatgatcatggctcactccagcctcgccctcccaggctcaatccatcttcccacctcagcctcctaagtagctgggactatagctactgtagtcccaccatgtccggctaattttttttttctttccgttttttgtagagatgaggtctcatgttgcccagcctagtctcgaacacctgggctcaagtgatccacccacttcagcctcccaaagtgctgggattacaggtgtgagtgaccacacccagcctgattcagtgttattttgttaaaaacacacaagttatttttccaagaacaatctgatattatataaagagcaattgaaatcagtgtgcttttgaaacttgaattttaacaatttagttctttttctctcaaaaagaagtaatacttcttagacatcagacttctggaagctttcagcacaacagaaaaccaaaaagtaaagaggatctgtgtgcttcaactatccagtattcttaggcttttttcctctggcagtggtcctatgatttgaatttacatataatggtaaaaacctagattatatatatcacagtagactagaagcatattgggagagaaagagctgccaggggccaggactctgaatgcagttgcaagggaagaatgcaacagcgtttaccctggggtactgtggttgatgggccttaatgatgatgatttatcgaaaatattttgttaggcttattttgttctttaaagataagaaaaataaaatgagcattacattttagtaagatttttttccccagtgattgcagttaaagatctttggcacttagattttagttatttgggaaaaccacttgcattgccttacatggtgttcagtacatggtggatgaagcatttttgattgatgtgatataaatgggccattagtatattttgatgtaatgttgtgacttaatattactatgaaatataaggaaagtattatattatctgtgatttttaactctaagctcttagcttgctgcccctttactttctatatgggttttcattattttgtcttccttttctgttagcatccatgtgacataattcttttaaacgtttatttgtttaccttctgcattcacttttaattttacctgccatttatctttgatagattttggtagatggtaattaaataagcttgatttggttttttttttcctttaacacaaattcatgaaactttacaactttttaaaagtatgagcataagtttttgtactgttaatatgcttagaattaggacgttactaaaagcacctgttactgcttatttcttaggagtagtgaagaagttctcactgcagaagattgtgaaaatgtctatcatctggtttattcagctcaccggccagtagcagtagcagctggagaatttctctacaaaaagtaaatctatatatctgttactcattttctaaggcatactttcataacagtaatttgttatgttatacttgacattaagattatatatatataacttattttaaaaattactacagatcatatcgaagctttcacattttactttttcctttaaaagtttagatttctcctaagttctttgatttattttaagttagatctttaaagggaaatgtaggctgggcgcagtggctcatgcctgtaatctcagcactttgggaggccgaggcgggtggatcacgaggtcaggagatcgagaccatcctggctaacacggtgaaaccccgtctctactaaaaatacaaaaaatcagccgggcctggtggcgggcgcctgtagtcccagctactcgggaggctgaggcaggagaatggcgtgaactcgggaggcggagcttgcactgagccgagattgggccactgcactccagcctgggcgacagagcgagactccatctaaaaaaaaaaaaaaaaaaaaaaagggaaatgtacccatgtctttcagtaaacatgcttagaaagatacctaactatattataatattaagactgatctcttcctaattgtttacccttttattacctgcttcagcatctaaatattgcttatgctataattaggcttttttttttttgagacagagcctctctctgttgcccaggctggagtgtgcagtggtgcgatctcagctcactgtaaccaacctctgcctcctgggttcaggtgcttctcatggctcaccctcctgagtagctgggactacaggctgtatttagtcttcaacttatttttcctttcctttagaaaatattaaaaggttcttcaagtatttaataaagtttgacataagaatcccaagaattctacagtctctttacttttgtgatcctatttaactcagattaggtagtatgagtagaagtgtgaatatctgttcacagaaaacaaagattgttatataatggctttcaaagagactcttttgagccatatagattaaacttttcttgttcctatgatgttattaaaatgcctgttgggggtgcagcaattattaggaagagtaggtggtataaaacatttacactacagttttctattcattgctgtttagtgttaattctctttgttgtttatgaggaaaaatgctcatgctatccatagtaaaaggacagtaagttggggtaattttgccagaaggatggaaggaaagtatatgtttagttttcaagatgaatatgtatcatagattttttagcataaatggtgtagctttgtcaatgtactacttttatggaaggcaacagttatataaaatacagtaaggtttttaaaaacaaatagtttataactcagtacaattaacttgagaaattagtttaaaaggacttagaattaccatcaaacatgaaatgaaaaaggtttatagcaattatttgcgtggtgtgccatgttggatgatattgtacctacccagttctcctttactcctttgttagatccttagatatgaaattgaaacagttaatttttttattagaaaattttttgttgttgttgtcgtaaaataaatattttacttttttcacaggctcttcagtcgtagagatccagaggaggatggaatgatgaaaagaagaggaagacaaggtccaaatgccaaccttgttaagacattggtttttttctttctagaaagtgaggttagttgatagtatttattttatacttaggttcgaaaaattttggaaaaggggttaaaatgaggcacatttaaaaaaatattccttgtagcacagtaaattgtgaatagaatggagagccacccactcccccactcccccaatttttttttttaaatatgctttctacttttcttctttttttttttttttttttttgagacggagtcttgctctgtcacccaggctggaatacagtggcgccatcttggctcactgcagcctctgcctcccaggttcaagcagttctcctgcctcagcctcccgagtagctgggcttccaggcgtgtgccaccacgcccagctaatttttagtacagacggggtttcaccatgttgaccaggctggtcttaaactcctgacctcaggtgatccgcctgccttggcctcccaaagtgttgggatttacaggcatgagccactgcgcccggtcactttcttcttctagtaagatgttcaaacagtaggatttatgtatagtgctgagaatattaattttaaagttcaaaatcctaattgtcagttgggctactctgcttactatttgtgtgaccttggtttagctacttattctttcaaagcctcagtttcctagtaaaaagatgggtaataaattcttagttaacactgaaataatctgtataaaacttaacacagatctctagaacattgtaagatttcagatgttggtacctgccattgcaattgtagatgtagacttaaactagtctccctaaagttggaaacctacaatgttagccagattttgagagggctcaaaatttatttttggtgttcatattacatactattatttaattagtgatcaggccttttaattttctagttatttctatatatggatatataattggttttttattctttaggattttctacattacaccatcaggtcatttgtaaataaagataattttccttttcctctccaacattttttttttcatttgttttcttgccttattgaattgtctaagaccttcagtagaatgttgcgcttaggtgcggtggctgacgcctgtactctcaccacttgaggaggctgaggcgggtggatcacttgaggccaggagtttgagaccagcctggccaacatggcaaaaccccgtctctactaaaaatacaaaaattatccaggcatggtggtgcatgcctgtaatcccagctacttggaaggctgaggcacaagaatcgcttgaaccggggaggcagaggttgcagtgagtcaagatcatgctgctgcactccagcttgggtgacagagcaagactctgtctcaagtagacatctttggattgctcctgatcttatgggagaagtgtccaatatttcgacattaattacattgttagctataggtgttttgtagatatttataatccgattgagaatgttcccttttattcttttctttgctgaaagtttctaacatgaatggaaattgaattctgtaaaatgcttctgcattacttgagatgattgttttatttttatcctttattatgttaatgtgtcgagttatgttgaatgactttttaaatgttgaatcaacctacttgttcatgatgttattctttttctatattgttggattcagtttgcaaatattttattttattttatttattttatttttttaagcaacagtgtcttgctctgtcactcagcctgaagtgcagtggcgtaatcatagctcattgcagccttgaacttgtgggttcagttgatcctcttgcctcagcctccctagtagctccgactacaacttcgtgccaccacacccagctagtttattttagaattttgtagacagtaggggtgtcttgtgtcccaggctagtcttcaactcttgggcccaagcagtcctccctccttggcctcccaaagtgctgggattacaggcataaaccacagcacgtggcccggtttgccagtttttgagggcattccctctatgttcataaaggatttagatttagattttttattatttgtaattgctttgacagcttttttttgtataatgattatgatttgcacaccccctcctccccccgccaaaggagtcgggaaacagtagggtttgttttttgttgttgttgttttttgatacaaagtctcgctctattgcccaggctggagtgcagtggtgtgatctcggctcactgccaatctctgcctcccacgttcaagtgattctcccacctcagcctccagagtagctggaattacaggcacccatcaccacacctaatttttgtatttttgctaaagacagggttttgccacgttggccaggctggtctcgaactcctgacctcaggtgatctgcctgcctcggcctcccagagtgctgggattacaggcgtgagccaccatgcccagctaacagtagggtcatttaagcttcacataatgaagagaatgatttgcttatatattgaattgacaaacatgcattttgtgttttaattaaccattatcactccccttcagttaaaataaattcatagcatacctaagaattgagagtagctgactaatacattaggtccaaataagcagtaagtatgtatataatctttttataaaatacttttcaggacgggtgcagtggctcacacctgtaatcccagcactttttggaggctgaggtgggtggatcacctgaggtcaggagtttgagaccagcctggccaacatggtgaaacctcatctctactaaaaatacataaattagccgggcgtggtggtgcatgcctgtagtcctagctacatgggaggctgaggcaggtgaatcatttgaacctgggaggcagaggttgcagtgagccgagatagcaccacttcccaacagcctgggcgagagcgagactccatctccgccacccccccaaatatatataatttattataaatatatatattttatataaaaataataaaaaatttttttcatattaatgttttaatgataattgttaatgtgtaatgatgctacctaacacgtctttcttacagcaagcaaactaaggcagtttcttctctgtcctttcatctatttgacgtcaaaaaatagattgctgtttgagagtttgtagatgatgtcaataaagtttccattcttttgagttaaggctagtatgataattgtctaagaccacattgctctttttaaattttagttacatgagcatgcagcataccttgtggatagcatgtgggactgtgctactgagctgctgaaagactgggaatgtatgaatagcttgttactggaagagccacttagtggagaggaaggtaaggatgtttaattatgatatttttgtttagacagttttgtaagtagatttttactcattccatttatttgtccttttagttttaagacaatttgatagaaaaatcttacttcgtgcatagttttgttttcatataaatattatgctatgtaaaaagatgtaattgctgtcaacattctttatttttttgtatctgggttattttttttacccaaatgtatggatctgtggtggatagatttgggatgctgagggttttaggaaggtgatgttttctgtgataaagtaatgggattttctttagtaccttagggcagattctgtttacaggcagaagaaactgttatgtaataattacaagtggcatatagggagaagaaataagctaactctttctgactttttttttttttttttttttttttagcactaacagataggcaagagagtgctctgattgaaataatgctttgtaccattagacaagcggctgaatgtcatcctcccgtgggaagagggacaggaaaaagggtatgccaatcaatgtcttttcaatattctaaactccatttctcctttttcagtatctttttaaaaattccattttagccatgaaacaattttgttttatttttcagacaacctttgcttataaatttgttagaggtaaattttaaagcattagcaatttgagaaatttgagttctctgtaatatacttttttagttgctgcaggagatatgattgacagtccctgccttcatgactgaatgtagcatacaccatttggaatggtgcagttgtatgttttatttatggatttgctttctatttcttctaaaataaaatcagaaataaaaatggagataattttttattaaaatagggaaatttctatttcctggaatcagattttaatgcattattgtaaagtttacatgaacttgcattttataccaacaattccacaggctttcaaacttttgactgtaaagcataaaaattcattcttatattgtgacgtattacacatgaatatgtttgtgtgtgcataactgaaacaaaattttatcaaagacaatgtgatgctttctgtgttttctatttctgttttttaaaaatttctgtttcttttttgctaattgctgatagcaatttagtgttttgaatttgttacttatgtgtcatgtcccacagcctagagtaagcagaaatgctggtcaatcccagtattttatatataagctcttaaactatatttcctatttttaactgattctcctaccatctgaaggtagagttggttagtcttattggatattgattttccctataggactatccaaatttttttttgttatttcaggtggctttttgtttttataatgtgtagttttctctttcatgtcacttttagggttaatgttttatagtgaaatttttgtgtccatctcttaaaatatagttttagtaatcattttgtatgttttaactaaaacttgaacacttaacagtgctaatgggcttaataaatacagaagtctttctgttcctttaggtgcttacagcaaaggagaagaagacacagttggatgataggacaaaaatcactgagctttttgccgtggcccttcctcagttattagcaaaagtaagtttgtgtcaatatcatagtgttactaagaaatgagttttttttccctaaatgcctcacagaatattataatgctttcttattgtgatatttttaacgtgatctttatatttcacagtactctgtagatgcagaaaaggtgactaacttgttgcagttgcctcagtactttgatttggaaatatataccactggacgattagaaaaggtaagattattttgtgtaaaaaaaacctttaagaaaaattattcagttcattatatcatagcgtttgtttatatttcttaaaatgtttttttggaacgtattttaagaaaggaaacctatagcttaggtcttctgtactttagtttgacttacagaatggcggtaatgatgcttccctttgcttcatgcccacaactgtaccttcattcttagctattatatgactatgtcactgatcatttatagagactgggggtggataactagataataacaattagatgagattgggctcattcagggtggtatggccatagacgataataacaattataagacaaaatcaactaatatttattgaacacttttgctatgttctgtggattaatgtaagctcttagtatatgttagcattctcaccatagccctatgaggtaggtaatatctcccttaaagttgaggaaaaagtatggatggatcagtgtatttatttatcatgattagaaaagcaccttaaaatgtacgctctgtgttgtagacttactgtatttgaaaattttttccatggtggtatggtcatgtagtcactttatacctatcatatatgccttagttttgatgaaaaatattattattttgcagcatttggatgccttattgcgacagatccggaatattgtagagaagcacacagatacagatgttttggaagcatgttctaaaacttaccatgcactctgtaatgaagagttcacaatcttcaacagagtagatatttcaagaagtcaactgatagatgaattggcagataaatttaaccggcttcttgaagattttctgcaagaggtatatattataactattacaagtattttgtcagttgagcccctctactgcagtaagctaattagtcacccaagtgttaagtcttggtgatagtccctagcagtattttgaaaagatgttcaggcttttcattctatgactcatcaggctactcctccaccaaaataggaaagtggtaagaatctgtgactcagagaaggtgaaagcaaaactaacatcttttttgttttgagaaatgatctgaacagttacctggtttttattgaaccagggctgttaaggaatagggtgttaatggaacagaaaaggagagctagatttagactaggtagcctaaaaaaagtagagtatttctaagtgttttggcagtgtaggttagggaaggacattatgttttttttttttttttggagacggagtctttctctgttgcccaggctggagcgcagtggtacgatctcggctcactgcagcttctgcctcccaggttcaagcgattctccggcctcagtcttctgagtagctgggactataggcgtgtgccactgtaccaggctaatttttgtatttttagtagagatggggtttcaccacattggccaggctggtctcgaattcctgacctcaggtgatccactcacctcggccttgcaaagtgctgggattacaggcgtgagccacacatccagtctgggttttgatattataaaactttaataagttattattattatagccgctgctactgttggagtttcctgtgttttctcttgtatttccaaagaggcttagtgcatagtacttaaatacacttgtatttttgttgtgattgttattttttccagaaatatatatttacattcagtttttttgattaaaataaaaattcataattgtcaaattaatgccattagccttttccacatcacttttatcattaatgctgtaagatcatatggactttgtgatttctagttttcttgttttattaattactcatttaacttttatttggtgtatattgttattccgggcttattaagttttactaattggaggtttgtgcaaatatgttgatgtacgatgattacattcttagttaaaaattttaatagctctactcttggctgaatataattttgattaggacaaattaaaatcaagcaatggtttaattaaatttaattactttgtagaagagttatagtttaaaaacaagtgcttttttgagagaactagagttcaacacagtagattgagtaatgtgtaagcaattttatgtttcctgtagtaagactggtaaaatttttcgaaagttaagttaccctaagttgaaaagtatattaatagatgttgatatccaaatgggaccagcatatctagtcatttttcagagggtttttccctgtttatctgtgattagtgtcatatgtcttcatgatgatatatgtttaaggtacttagattttgtcctttaggtattgtccttctgatcttcttgtcatttaagtattttattgtcctagtgcatttattactgtgaaaaaatagatgcctttataattttgtgtcaagtttacttagaagaaaaagaagaatgtcattttcgttttttctctcagttgtgatgtttctatgataaacttgtgttgacttacttccccagccatattgccttaaatttggccagatctaggtattgaatgacaaagttcatttgtgggttttgttatgttatttttcatttttcaaggtaatagtgacattttgatagcctaggagttttcactttgatggttcttaatgtataattaatatttatagggtgaagaacctgatgaagatgatgcatatcaggtattgtcaacattgaagaggatcactgcttttcataagtaagttgaattttgaagttcctgttttcttaaatctgtagaaataaacttgcatgttttgtgggttatgttaatttctaagctaatttgttgttgtcgttgtgggggcattttaaagtttactgcatttactgcattctgttaacagtcaagtccaaaacaattgtcattaggcttagctttttaataaaacttaatttttttttttttttttttttttttttacagtgcccatgacctttcaaagtgggatttatttgcttgtaattacaaactcttgaaaactggaatcgaaaatggagacatgcctgagcaggtttttatttatttgctagttacacatttatctttgaaaagtgaagtcttgtgacttttaaattttaactgtatcctttgattctttttacagattgttattcacgcactgcagtgtactcactatgtaatcctttggcaacttgctaagataactgaaagcagctctacaaaggtttgtggtggttcagtagtgtttttattagactaaatatcattaactgttttcagcaaactcacacatttaatgagatcagttatttcagtgaaatgttgcttgtttctaatgtactgttatttgtagtttgatgtatattcagtggagaggatatcgatatggtttgtttcaaggtatgatttttaattaaaaattgttgttcacatttgaaggtggcataatctgtggttttctgtattctcaaagttggtgagcaagagcctttgaaacagatataagtattagattacataaattgaagataataaaccaactccccctagatcttcttatgctctggtattgttttgggataaccttattcatattcaagatctctctagtgatgttccaaattcatgatcaatcattttctgattgaatatataatgtgccagcgccagctattagtacatatagagcttttaaagctttacccataatgataatccttaatgtgtttagtaattgaactaaacaggactgccttttccatttgtaaactggaagcttaaacattgtacttgtagtgctggatattaccttaaatattgtttgggctcatttttagaaatatcacacagtttctaagagttctggagttaggtgtttgtaggcattttcttcaaaaagtaatcctcttgataataagtttgtgttgcctaaacccacagaataatgttaaatacttagaatttctctgggcttttaagatgttgttatatctacaaatggatttttcctcttgaaaaatcaatatagtattgttaacattgtgtgcttcccgcccccccacccccaccaccttctgaggcagtcttgctctgtcatccaggcgggagtgtagtggtacaatctcggctcactgcaacctctgacttgcgggttcaagcaatcctcgtgcctcagcctcctaagtagctgaaactgcagtcatgcatctccacgcccactaacttttgcatttttagtagacatggagtttcaccatgttgaccaggcttgtgaactcctggcctcaactgatccgcgcattttggccttccaaagtgctgggattacaagcctgagccactgtgccctgcccattgtgtgctttttatcaaacacttaggaaaaagttaatttaactaaatgttaagcttgtagtaggaacggtgactatattaccatgtataattgctcacctatgttggaagttaaaaactaaactggaaaaaaggcagtatttttagtagaggaaagggatgaatataaaattatttatggtaagccaggcacagtggctcacgcctgtactcccaatgctttgggaggctgaggaaggccactcacttgaagtcaggagttcgagaccagcctggccaacatggtgaaaccttgtctctattaaaaatacaaaaattagccaggtgtgatggtatgcacctgtaatctcagctactcaggatgctgaggcaggagaattaattgcctgaacccaggaggtagaagttgcagtgagctgagatcatgtcactgcacttcagcctgggcaatagagtgagctccatctcaaaaaaaaaaaacccaataaaaataaaaagtttgagatattttaaagtttatagtaataccacaaaatattttccattctgagtttttataaaatacagcagtatccttccaacaagaaatggaagatgctgtttcttttttattattttattccatttatgggttgaccacccttgaaataatgtgagcatggagcgtaaatctttattagcattctgtgctagtggctttattaaagattgccatatcaattatataagtcttctcatcctcttaatatcctaaagccttaggatattatctattaatgtacctcatatttttaaggctgcaatttggtgagatttgtaagacaaaccgtctctttgttttcatttcttataaattataaggaagaaatttaaatcaaatgcagaagtagagttaataaagctatgagataatgttttacataattgaaaacattttaaagaaatgctgaattgtttatacaatattttttaaaagttaatgttaaattttttcaaggaggacttgctgcgtttaaagaaacaaatgagagtattttgtcagatatgtcaacattacctgaccaacgtgaatactactgttaaggaacaggttagtaattactatagatggtaatctttttgtaagcaacctttataaaatctgaactaatgtagaaagtttaaataatactaagattgagcaaagcagaaatatcttgtatctgcctatgtatattatactaaaaaaataggttaatatattggatttgtgcataataaaattgattaatttcatatggggtttataattgcattatagattacccttattgtcattttatgttgttgtttctttatgacacatggtaaacagacttcatacaaattatagatgtatgaaattaacaaaagtcattcctgaaagcaactaatatgacaagtttgttccagggtagaaaagtccacagggttttgttatctctgagagtatcagatgttggcattctcgctcatcctgatcttcctgtggaccttctctgaaataaacatttataatcacttccctgtcttccaagtgttaccttcccaacgcgtatgccttcatgcttccattacttctaaccttttcagttctcgaaatagactgttacctggtttgatcctagaactaacatcatgttcaattctaattccctaattgagaggattaagcttcgttggaaacgtgcttttcaaatgcttttatgggaagatgttttcacaagcattccataagaactattaatatggtatagtcaaaatgattatggtgatttcaaggtttgcaaccatttcatacagcttaacctttgttttttcaggtagaatcccaatagtcaacctgactatgatttttggacactgtgatatgttaggtactatttattttagttcagtgttattcaaatataaccagccctttgtttggcacttgtctttatttaatttaaaaataccgaagctaattttaataaaacatatttggatttttatagtttaaaatgttcattcaatgcccagctggtagtctctttttttcttatttccagctctctcttgtccctaccatacatatatgcttggtcacacatgccaagatgcagttactgaattttgctatttttttccaaaaatatgaagtatattgccataactattgcattgcagaattctctccaattttacgtgtgtagttttgaactatagcaataaagggtgtggtactttaattttcatctctataattcagatgaaaggaacaagatttctgatggtagtaaattgaatttagatttaaactcttggaataggattttaatgacatgcacagatcgaaacctaatgcacgaaatattactttataattgcatgggacaccaagatattcagcataataatccctatttttatagcattaacacataatccttgtgggttatcctgtgtaacctcctatataatcccttgctcaggccatagagattaattatttagttattaaacagcttatgtgcccagtcttcccaacagcttcccagaatgtgtcctggtcagctcacttgatttgccagttcagctaattagtaaatatcatcatacttaatactttatatccttactctttatgttgcaagtttttgtagactgaaatatgctaataggtataaattactactatagtagttaggagaagagactgaaggaaggggtaaaaacataaagagaaaaagtaaatgtggttagttccaaagtggcaaaactcttaataagatctgctttgtgctctgtattatattgtctttccaggaatgatcttcctttaaatgtattttctggtttactttgtgaccctaaatttctattttcattaccccttcccaacaaataattaattagtctgtgactccatttaaaacccatggcagagtttttattaagctccttgagatacaacttcagccttatgtttattataatatgttcaggtttacctgataaatagtaagcagccctgtatctggttatgttttcgctacttaatcagtacacgtgtgaacaatgagagtgcttaataagtaccatagattttgtgatctctattctaatacttatctctttaatgttttttcttctgtagagtgaagagtggtaccaagtttatacattatttcatatttgagaatgaataccttggggcattgcaatatagagcaaagtaggggatttggagttagaaaacatgagtttgagtcctgaccctgcatatttttgtagtgtgtaacatattgtacaagtcacttaatgttgctgaaaattaaaaaaaatttgtgaaattactttgcagttagtaaagccttatacaaatataagcattcgttgttacataaattatacttcgcagctttagaatcttaggaaaatactaaacattgatttctcttaagatttttaaatatagaaagttggattctgtttctgtgttaaatatgtaaattatttgtggcagttagtgagaaaccttggattatagcatgctttcctcttttttttttttttaaataggccttcactattctgtgtgatattttgatgatcttcagccatcagattatgtcaggagggcgtgacatgttagagccattagtgtatacccctgattcttcattgcagtctgagttgctcagctttattttggatcatgtcttcattgaacaggatgatgataataatagtgcaggtaattttattgccatctttttattaaatctgtgtccaccataaaatcaaacttaagtaacaatgatgtacatcggtgcactaaaatatattttatccttaaaaacgtgaaacacaggtatatattccagcacaatttatgttcatttttttgtactattgtaaagaaaacgtgatgttgcagagtataggctttcaagtcagatcgctgcttctcactagcactgagtctgctttctaatttctaactacctcataaaactgttaaaaattgagtcaaatgactagtacagtgcctggacatatagcaggtactcaataaaatttattccctcttgcccttattcattggtaataccaatatgcagataatttggaaagaataaagtatttatgtgactttttgttgtgtacttgtataccgtaggttttttttgttttttaatttggggagtattaatttgatttctgaatgttagaaaaatgtttgaaactgctctgtaaaagtctggggcagtatataatgtttacaggaaaagaatcaaaccagcctttcctagtgttaagttactcttcacaccctaattgtttacacaccctaattgccttactttagcatgaggttatggaaaagaagtgatatttggcggcatctttctgggtttgtttttagtttgaaggtatattttttgtttatttttattttttagaaacagagtctcactctgttgcccagcctggagtacagtagcatgatattagctcactgcaccctcaaactctgaccaaagcagtcctccccctttagcctcctgagtagctaggactacaggtggtgtgccaccgtgcttggctaattttttgtagacatggggtcttgatatgttgcccaggctggtcttgaattcctggtctcaagtgatcttcttgcctcggcctcccaaactgtgaagttaaaacttaaaggaaaatacaacatcaacatgtatatatccatactgatgtatcactgcatatcagggtgtaagtatatatgtaattctgtatatggcatgtagcttacttttagcaatagagagctttgtgctcatgtactaaaaacttaacctcaacacaaatgagaaacccagagtagccaaaacagttgtcagaatccatgtagtgaagtttatatactttgagtttttcatctgtcactctaagctattggcttagttatgcttttgttcataacattgatttgacaaacatttattggtcagcaggcagtttactagatggtatggatatgaaaagatgagacaaggtctcatccttcaagaattaaattcaggatgaaaagaaccaagtaattatagtgttgttgttgttgtttgtttgtttgtttgtttgttttgagatggagtctcactctgctatccagggtggagtgcagtggcacaatcttggctcactgcaacctctgcctcccgggttcaaatggttttcctgccttagcctcctgagtagctgggattataggtgcccaccaccacgcccagctaatttttcttttttttttctttctttctttctttctttcttttttttttttttttttttagtagagacggggtttcaccatgttggccaggctggtcttgaactcttgacctcaggtcatctgcctgcctgggcctcccaaagtactgggattacaggcatgagccactgcgcccggcctatagtgcaatttttgataagtaatggaggcatgtacaaagtgttgtgggcatgtagagtaagttctcactgatctgcaggtattgaaacatcttttgagaagctaacaactgaagttaatccaaaaaatgaataggactttataaaacgtctttttttaaaacttctaaaacgtctatgagaaagtacagttggattctaaaacctgatacaaaataagttttagtacataaccgttttgttaatttggggctgccttagcttcatttagtccatggggagttgaattagagtaagcttgccaaaactcttgatttatctaggagcttcctagaattacccacacttcttatctccttagacttgtgtgtgtgtatgtgtgtgtttgtgtgtgacagggtctcactgtgtcacccaggctggagtgaagtggtgtggacttcatatagctcattgcagcctaaatctcccaggtacaaatgattctcccacctcagtctctggagtagctgggactcaagcgtgtgccactctgcctggctaatttatttaatttttagtagagacgaggtctcgctgtgtagcccagcgtggtttcaaactcctgggctcaagcagtcctctcatcttggcttctcaaggtgctgggattacagatgtgagccactacacctggcactattttcacttttaaaatgaagtgcattctagtccaatggaagagtataaaatataacagatttttacataaccattccatcagtctttgtcaaatttagctgtgtttgttttaggttttttaaagaaataaaagcacagttacaaaagaagccctcatttgtattcctcccttatcccattatcctcccattttccctagagataactgctaccccaaatttgttgtttatcacacctttgcatttcaattttattttactaagaatttgtatctgttaataatacatagttcatttattcttgctaacttccatgtaaatgatattaggttgaacattttgcaatttaccttttttcttctttttaaaatatgaaatgagatcttgctatattgctcaggctggcctcaacctcctgggctcaaacagtactcttgcctcagcctcctcagtatccgggattataggcacatgccactgcacccagtgcagttttcctttttgaatttacattcttgagatttttttcagtgttgacatgtggctacaattcatttattctaactgctgaatattatatgatacaagttaactacagtttatccattttcttatttttagacatttaggttatttctactttttcctcaattaaaatagcgttacaacaaatatttcaatgcttagctccttgagcacatatacatttgcttttctagtgtatacctgagtggaattgctagattatgtagtgtgtgtgcatcttaaacttgatcatattttgctaaagtggttgtattgttttaccctccttccagcagcatatgatagtttccattgttactcatcctcacctaacatctagtattgtagacccttggatattgtatttgttagcctacatcagattagaaagggagagtaaaatagggaatgctcctagaggcatttcattgacaatacataataataatggcagctgacacttatgaaaggcccagtgtgttaggtacttctctacattccttaacatccacaagagaaaaagttggctaattcttgacaagccattagtggagaaaaataaaaatcaggacttaaaaactctgaatatcataggatagtttagtctttagagggaaaatgtctgtatgcgattggaaacaatgtcatgtagaaattgtccattatagtgacagagctattaagaaaatgttactttatgtattcagtgtaatgatatgtcttaggtttctaagcaaatagtgttgcatcttgggacatacatttgagataaaactttctctgatggtctatcttaaattcttactctttaaatttggttttagtttactagaagttatcaaagattaccagagacaggatgaaaaattaattaaatgaaggaacattcttactatacataaaatagtttttgatattgggaaccttatattggagcttataggatatgcgcagactgttcaccagaggaattataaatggctaataaacataaacaattttaatttcatttaacaagggatagtggtttgtttgtttgtttagatggagtttcactcttgttgcccagtctggagtgcagtggcgtgatcttggctcactgcaacctccacctcccgggttcaagcaattctcctgcctcagcctcccaactaggtgggagtataggcgcgtgctaccacacccagctgatttttgtatttttagtagagatggggtttcaccatgttggccaagctggtctcaaactcctgacctcagatgatccgcctgctttggcctcccaaagtgctgggattataggtgtgagccaccacacccggcctgggatagtggtttttgttttgtttttttacaagtaatttcatttgtaaaatctgtccagagggaaaaatttttgtatgcagcttttttttttaatataaaaagcttcatctagttttatttacagtatccaataagtaaaacaattattttgcattacttggaggctgcagtggggcttccctgactgcgaatttggaaataagtttgtcttcttgagaattgaatgtcaagatttcacataatggatcagagtagaaatatgcaagattattttaaaaagacagaatggtttctggggcctgtctagctgaatatatgtacaaaggaggactgttatagccagattttggggtttgaggtaaggtgggatcatccttggaagggataggagaaattctgaggttggcagtgttcaggaacgtaggagccttaactaacagactttgagtgtgcagattttgttgacaaactatcctgctagggaagtagacaaatgttaggcaagtttagcctgacttcagtaggtgaacatggaatacgaacaaatggagtgattcagttccatttgttctgatcatcatttgatgtcacaaaaatttagtctattggaataaattatgaatggttataattttaattttaatgtttttcccttttcaaattctcttataaaagcatgtttcatagtgagaattaaaaaaaatacatggttgaaataaaatacaagatgcttaatgtttgggactttttctccagatggtcagcaagaggatgaagccagtaaaattgaagctctgcacaagagaagaaatttacttgcagcattttgtaagctaattgtatatactgtggtggagatgaatacagctgcagatatcttcaaacagtatatgaaggtaaagttgaaaaatggatagcaagatagttttaaaatgcaacgctagtttttatgcatggctgccattgaattctttaagggcaaattacatttctagtgtaaaagagttgtattttaaaatatttagtgttttcaatacatttccttatacctctactccagttaatggacattttgggtttattgtgttcgtttgcatttagaatattggagatggcccctctcaatttgtcactatcagaaatagcatgtatgattcagtttaagataataggatggcattcctcctctgcttgatgtagcattaaaaagagtttcaggagtcagaagacttgggtggtagttttggcttggttactatgcatcttgcgaccttgaataactccaagcattttgtgacctgagttcctttatctgttccactgtgattgttaaggttttcccctttggttctcaaagtctgatttgattaaccataggttattcataattttcataactatatgtgaggttttgttaagttgaaagtagtgataaacaggatattgttgattatactaacagaatgtgactaaatgtggtaagatagcttaaaaatccttcctcaactaaaatctaattataaatgtaaactttttaaagcctttgctttcaagaaataaaatatgtaatatatttaaacctagttaatcctctctggaatattttgctacttgaactctaatatcattgaaaattattttggaacttaaatcatttgggatgataattaccaggtttttttttttttaaactaaggttgtttatgaagttatttaacaaattttaaagttttagtcttaggtattctaaagtcacttactagtcatagggacgtggttattctgttatctctgataattgttattgtacgtgtttgaaacacaatcttaaattaggaaaaaatttcatgtgcaatgtgtaatgtaaatgtcatataaacaacttttaaaagttgtttatatgctttccttttaaaagttgtttataggctgttagattctataagccaaattaataaagttttaaactgctcgtggcctgtatacccggtatcaatgaattagttataagtgtaactgagattatatttattgttttacaaagagaattttgtttgtacattttgtgttacttctgaaaatctgcataacctaattgttgttttgactaaaactgaccagtataccgtctttattttaaccaagtctggagcttaatttgattagatcttaactgttttgtatatatgattttactgaagttagggattgtatgcttagaaatgatctttaggtttcagtaacattctttcctgcctttgaaggcataattttggctaaatacatactttgtgacgtgtttacatgactaacctaaaatttgtcttattgtcaagtagttttaagagataaagctctaatttgtacaaatttctttatagtattataatgactatggagatatcatcaaagaaacaatgagtaaaacaaggcagatagacaaaattcagtgtgctaagacccttattctcagtctgcaacaggtaagcattaagagtaccaactttagctaacacaattaacacctaatagttagcaaaataaggtagcagttgaaattgggcaaagtgtgcaataggcaatttataaaagtagaaatacaagaaagtataagtgagattatttttttgctttcaaactgtcaagattggcaaaacctatagctatctaaggtatggaggaaatatagatatggtaggcaatttggcaatttatgtaaaaatttataatgtgtatgccatttgaggcagcaattctactttttaaatctactcttttatccaaggtgataagacaagtttgcaaaagttgatatacaaagttgtatattgcaatgttgtttataggaagtaagacataatctaaaagtctattaggatattagataaatttactgtatagtacatttctgcgatgaccgttgtacaacacttaaaattagtgtagatctatattcattaatgtataaagagcttcataatcacaaaatatattaacagtggttaacttgttttggtagatttcatgttgaattctacttttttctctgtatatttccaaacttatttttgtgagcatatattaattttataactaaaacacaatagttttggccaggcacagtggctcattcctgtaatcccagtgctttgggaggctgaggtgggtggatcacctgagatcaggaattcgagaccagcctggccaacatggtgaaaccccgtctctactaaaaatacaaaaattagctgggcatgatgatgtgagcctataatcccagccacttgggaggctgaggcacgagaattgcttgaacctcgtaggtggaggttgcaatgagccaagatcatgccactgcactccagcctgggcgacagagtgagactctgtctcaaaacaaacaaacaaaaaaaccaatagttttcattttggcagtgttgaggcatttaattagataaaattactgacttagtatacttttgtctttggagacaaaatttgcatgcaaaacccaacccaacccattccaacttaatgaactttcttttaggaatgtccttttttttttttccttttcttttgagacggagtctcgccctgtcgcccaggctggagtgcagtggcgtgatcttggctcactgcaggctccacctcccaggttcacgccattctcctgcctcagcctcccaagtagctgggactacaggcacccgccaccacacccggctaatttttttgtatttttagtagagacggggtttcaccgtgttagctaggatggtctcaatctcctgacctcgtgatccacctgcctcggcctcccaaagtgctgggattacaggcgtgagccaccgtacccagccaggaatgttcttaattttatttgagaatttgaattttctctattaaaattaataaaatgtaggctgggtgtagtggctgatgcctgtaatcccagcactttgggaggccaaggttgagaattgcttgagcccaggagttggaggccagcctgggcaacatagcaagagcccatctctacagaaaatgaagaaagaaaaataaataaaatttaaaaggttgaaaagatggcatttaaaaaataacttttgctataaagtaatagctgctagctgtactgtttagaaaatataaaaaggaacaaatgcaaattatccttaatgttttcacttcacaataacctttttgttttttgatggccttgttactcttttttatgcgtacatgaaatctgattttttaacaaaattaaattgtgcattccattttgtaaggctgcattttaatattaataaacactgaacacatttatgccattaaataatttcctcagcatcttttttttttttggagcaggagaggttcatttatttttttttctagatttttgtgaaggtataattgaaaagtaagaattctgtgtacttaacggtatacagcatgatgttttgataggtatgcattgtgaaatgattaaatttagctaattaacataaacattacatcacatacttacttgtggtaagaacatttaagaccaactgttctagcagtttttagataaacagtacagtacattactcttaactatggtcaccatgctgtacaatagatcttcagaacttacttatcctgtcctactgaaacgttgttccctttgaccaaagtctcagcctcccccaacccccagtccctggcaaccaccattctgttctctgcttctatgagtgcagatatttcctcaacatgtggatttcattttctctgggtgtatacccagaagtcttcctccttttaaaaagttgacacacgaccgggcgcggtggctcacatctgtaatccaagcactttgggagactgaggcgggcagatcacgaggtcaggagttcgaaagcagcctggccaatatggtgaaaccccatctctactacaaatacaaaaattagctgggcttggtggcacacacctttaatcgcagctactcgggaggctgaggcaggagaatggcgtgaacccgggaggtggaggttgcagtgagccaagatcatgccactgcactccagcctgggtgatagaacgagactctgtctccaaaaaaaaaaagttgacacataattgtacatatttatggggtgtacatagtgatgttttgacacagtgtatagttaaccaaagcaggatgattagcatatccattttgacgactatataatattccattttatagatagaccacaatttaaccaaagtctccttgtttacgctgaggtttttttacaagttttgttattacaaatagcactaaaacttttttgtacatattattgtgcataaatattatttcttttggttcaagtcctataattagaattgctttgtcaaagaagattaaaattcttaagcttttgctatttcatgttaagagttcttgatgtaaagattcaccacttaaacgtaaataacagagcatggttgcctaataatttgctggggttttttttcccctttatatttttatatgctatgttaatatccaattaataccagcaggatagcattctgccaaaactaacctgaagggtttctaatgttaataaaaacctccagtttaaatatacgaagtactgcacttttggtcatttgcatcatgttttagtgttttgcaataaaatacagtgcctcatttattgaacacctgtattttaaatgaaaatgtaatattttaaaagatgttaatctccaggtattaagaactttaacatgctttctttctttccaaacagctttttaatgaaatgatacaagaaaatggctataattttgatagatcatcctctacatttagtggcataaaagaacttgctcgacgttttgctttaacttttggacttgatcagttgaaaacaagagaagccattgccatgctacacaagtaatctccagatattttattcagctctcatattttttagtcatgaaactttatttttaaatctagccctttcatttggaataactaaattaaatttatgctttattattagcttataaatctctaccctatctcctttcttaattttaaagaaccagttacagtgctatctcaattaacaaatgagttgggccaggcttggtgctcatgcctgtaatcccagcactttgggaggctgaggcaggaggatcacttgaggccagtagtttgagaacagcctggccaacatggtgaaacccgtctctactaaaaatagaaaaattagctgggagtgggggtgtgcacctctagtcccagcaactcaggtatgagaatggctcgaaccttggaggcagagggtgcagtgagctgagattgcgccactgcactccagcctgggggacagagcgaggctctgtctcaacaacaacaacaataaaatgagttaggattaaaactccgtttataagcctttgtttaaatttaaaccatacaaagtctataaattatgtgaatcaaagcagcataaattcaagcattacacatcttttttatcaacttttgtcatgatctcattgtcagatagagaaatctttgaggtttgattcctttgtctcaagttttttctttggttctgcactcttactttgtagtgaccttttcccatgttttgatccacacccttctttccatctgcatattttgttgcccttatcaaaattggaagtcgttttattttatactgggcatgtaatttagtgatcaattgcacttttaaagtatgggtacattttagacctttaacataaccaacatttgtgtattaaaaccctttatctgttacctgtgggttaaagaaccttgcttttagattctcggactctccttcatcctcttgctcatttagttataaaagtgctaactgtctctctgaggaaaatatgctgctcttgtttaagttttgcttctactccctcaacttaattattattattattttgttttttgtagagacagggtctcaccatgttgcccaggctggtcttgaacccctggcctcaagagatcctcccacttaggccaccaaaagcactaggattataggtgtgaaccaccacacccagcttcctccctcaactttaattaactctctcctttcactttcttctaaaactgaagtttatttttatgcatccattagatggtaattttacataatatttaaggactacctgtatattattttcagaaataatatctttttttcatgtaatatccttttttccttcttgattccatctggattgttttttactcagttacatatttgatagagttataatgttgggttgttattttgatgaatagaggtatttatcgtcacataaatatagttaaaatgggccttagatggggtttaattttactcttgaattgtttattacaaatgtttgtgaattattttttaacgttctatatgttagagtaggtctcctttatgtcttgaaaaatacagataatgtattgatcattatgtgagagaatttacattattttctatggaaaaaagtactgattaaagaatgtagatataccagaccatattcagactgaaagctaagtggcgtgtgtgtgtgtttgtgtgtgtgtgtgtgtattgttttaaagaaagtaacagtgacataaaatgtcagtatatctgcacattctcacactttacaacctgcttattttctattcctcaaattaaaagcttggcaaaggaagtagtgagtgaaatttcctaagttattgacttttttattatagtccctcaaatatttatttcaattattttttgttttcctttgcagagatggcatagaatttgcttttaaagagcctaatccgcaaggggagagccatccacctttaaatttggcatttcttgatattctgagtgaattttcttctaaactacttcgacaagacaaaagaacagtgtatgtatttgctggaaatgtcctatttaatttcattttgggattcttaagggcaatttttatacttggtttctctcctttctactcacacagaattgtaggattgcattaatacacaaaaaagtttatacttcagcaactttataatttaaggattataactgtgttttatgcataatactctattttaatattgtgagttttcctccagtataattttggcttttgacacgtaatttgaatactttatgtattatttaagagactggactcactatgttgcccagactggctttgaactcctgggctccagtgattttcctgccttaatctgagtagctgggactgtaggcaggaaccactgcctggctgctttttgtgttattatctgcatttgtgccttaacccaactaaggagggagcatttgaaaaagaataataaaggcaatccatcaggaacatcctttaattctcaaacagggcacttttctggtttagtctccaataatagtgacttataaaagagcccccaaaatggatttaaattctcaaaaatcttctacctttcgccatggctttgaggtgtaaaagggcagaagcgtatggatacctcatattgtaaataatcttgtctgaaaactcactagtattttgcatttaaagactatagattttatatgaaattctaaagcaggcaaaactaatgtatggtgataaaaattacagtaacggttacttctagtgttggagagtttgaatgggaacactagggtactagagttctgtatctttttttttttttgaaatgaagttaggtctgtccttcaggcaccatctcggcccactgcaaactctgcctcctgggttcaagtgattctcctgcctcagcctcctgcgtaggtgggattacaggcgtgcaccaccatgcccggctaattttgtatttttagtagagacagggtttcaccatgttggccaggctagtctcaaactcgtgacctcaggtgatctgtccaccttggcctcgcaaagtgctgggattacagacgtgaaccactgtgccctgccaagttctgtatcttgttaggtatgtgggtcacacaggtctatgttcagttataaaactgatacaactgtgctcttagttttgtgtgttctattgtatataaatttatcccagttaaaattgcataagcagtattaatcagagaaataaaaattaaaacaaataccatttctcacctagcacattaggaaaaattaagaagtctgatagtgtcaagtattgccaaggatgtgaggcagcagagccttttatacattgttggtgacagtacaagaccattttgtggagctctttggcaatgcctagtaaagtttaagattctctctacctcatgatccagtaatttcattcataagtagataccccacagaaactcctgaatacatgcacaaggagaccgataaaagaatgatggctgtttgattgtttgaaatagtggaaaaactcaaaataacctaaacatccatcaactgaaaatggatcaatagattgatatataatggaataccatacaacagtaaaaatagctggatttcattgagtacaaacagcaaagtacaaaactgtactatgatgtttacagacaactatgtattgaatgtacaaaatgtgcatgggggtgataagtagtggtaacctctgggcacgaggaggaagcaaaatggggatagctttagtgcgggctacttatctgtaatgtcctatttaggtatgtggtgggtacataattgtaaatctctctgccagtgagtatattttggctcaagttttgtatcttgttgcagacttaacagtttttggagtggtagccagttcacaggccacacttggaggagtactgtactactatatatgactgaagtgtattgtaatacagaaagacatactgggagtcgggtgccgcggctcacacctgtaatcccagcattttgggaggtcaaggcgggcagagagttcgagagcaatctggccaacatggtgaaaccctgtctctacaaaagatgcaaaaattagccaggcatggcagtgtgcacctgtaatcccagctactcaggaggccgaggcaggagaatcgcttgaacctgggagacggagttgcagtgagccgagatggcaccactgcactacagcctcgatgacagagtgagactgtgtctcaaaaaaaaaaaaaaaaaaaaaaagagaaaggcacactgaacagctaacaaagcagtatgctttgtgactgatttctcctattctctttaatgctgttcacactggtgaatctgaattgatagaaatcagtcattacaatgacagcaaatatttgaattgcactttacagttaattgacaaatagttgtctttatttgaagcataatttagccttatagaactcttggtgtcagagccttggacttgaatcatagttatgctgcctactcatttttattactgtgggattacttcttaatttcaattatcctttctttcgtcacctgtaaaattgggaaaacatttccctcatagaattgtaagaatagttaaggaacctgaggaaaaaaaaaatatctagcacatagtcgtcacatgaacgttagttgaattttgattgcaaaattacatataagccttgagatacttggatccaagggtagatttatgatttccatcaggctgaaacttttttgcaggtaggtatcatatcatatccatctttgtatctatccatagtgcctgggacataataggtactcagcaaatgttaaactgagtgctctgaattatttcatttgatgtgaaaatcttggcagagacaacattgttcattaatgtcctgtaaggctgagtttgagtagtgaagtaatatgcctatgctcgcacaactatgagttaatataacccacagatttctgtatcaaagctaacagtttcgatttcttttcaaggtatgtttacttggaaaagttcatgacctttcagatgtcactccgaagagaggatgtgtggcttccactgatgtcttaccgaaattctttgctagctggtggtgatgatgacaccatgtcagtcattagtggaatcagcagccgggggtcaacagtacggagtaaaaaatcaaaaccatctacaggaaaacggaaagtggttgagggcatgcagctttcactcagtaaggatataatttattctctttatatttatccctaatgtttaccaactgaattgtcattaaggttcaccttattttttatttgagatgtgttcaataatagcttacaaaatgtgttcattatgtgtaaacatgctgttgtaggcattttagatacataaactcagttctcacaactttttgggtacatcttcatttttcagatgacagtacttaacacagagaggttaagtaacatactcatgtcacagttattaagtaggagagccatgcagtttcactgtagagtgcctgctttttaaaatctgtgctacactgtatgcatagggaaatggactcagtattatagagctagttattacccaagagatcagatcatctagttaaagtggaacaacagattcagagaggttgcaacttctgaattcctatgaagaggccattaatcatgaagaacttcatagaaatagagtgctatcgtattagaggtaggaatgcattatgacgcttgaagctcttagactcctagcactccagagttggttcaaaatgggcctggggacttttttctttttcttaggaattattaaattagcatagttgtcaaaatttgtcccagttattattgttgaatagcaaattacctcaaaacttaggacatagccaggatcatggtgtctggtacctcagccaggaaggctcaaaggctggtggctgaaatcatacggaggcatcttcacttacatatctgatgctggctgtcatttgggacctcagctgtactgtctgccagaacaccaacgtgtgacttctccatgtcagcataacactaggctccaagagcaagtgtcccgaaagaccagaagtggaaggtgccaatttcttaaggcctgggcccaaaaactagcatagcgtaatttctgccatattctattggccaagcaatcacagagattctaggggagaggacataattcttaacctcttaatgtgaggaacgtcaaagaattttggggccatatttttaaattgccacataactcatcagctttcatttatgatcaagtgcttagtgtttaaaacttgattgtcctatgaattttagtatcttttgtccagtagtataaaggcataaccttatatttctaacttgtacaattttacactggttagttatatagtcccaacatcacagttgatggggaaatctcttttattaccctgggccagttaaagtagttagggctgatggtttataagttaaaagaaacttttctgttttttaaaaacaaaatgttatcaaattgaaagatgatgttttctcatatcactaaatttttgaaagtttttatcatctgaactagtagttaatagttataggtgtgtgctgggccatcaaatctctctctctctttttttttagacctcatggaaacacatgaatgggtatttatattacagaaatctctcttttttttttagacctcatggaaacacatatgaattggtatttatatcacattttacaaatagattattaaaccagatacgtcaatttttacaggaagaatcaatgctctcattcaggtttttggggagaatcatagaaattggggcattaataagttaacagaaggaagtatgaatactgataggttggccaagtcaatgcaattttgaagacagtattggagcctgaatgcagtagaacttaaaggctgatgtaattatattgcaaaatgtggagtttatgtttaatctattattagagtattagctattcatgcattttctttccactcttattccttaaaaccttacacacatttgcaaatatgtataatcttttttttttttttttttgatggagttttgctctttttgcccaggctggagtgcaatggtgtgatgttggctcaccgcaacctccccctcccttgttcaagcgattctcctgcctcagcctcccaagtagctgggattacaggcatgcgccaccacacctggctaattttgtatttttagtagagacagggtttctccatgttggtcaggctggtctcgaactcccaacctcaggtgatctgcccacctcggcctcccaaagtgctgggattacaggtgtgagccactgcgcctggcctttttttttttttttcttttgagatggagtcttgctctgttgctgaggctggagtgcagtggtgtgatctgagctcactgcaacctccacctcccaggttgaagcaattctcttgcctcagcctcccaagtagctgggattacaagcgcccgccaccgcacctggctaatttttgtatttttagtaaagatgggatttcaccatctttgccaggctcgaactcctgacctcgtgatccgcctgtctcagcctcccaaagtgctgggattataggcgtgagccactacgcctggcctcatatgtataatcttctaatgaaatagttttcttctaaattcacaatcaaaaagtgctatcaatttttttctcccaggtcagtgattttaaaaattactattaattcagtaacaattgtacacaaatttgacttattaattatggcaacatttacagacatttgaaaaaagtagcttttgcaggtgtgaaaccttttttctttttagtccaatgcttaattaatatttgtatagatttgtggcccccttgcagttgcctcttactacctgctcagtggtctgcatcccataggttgggaaccagtctcctattgcttccatccctgttgccatttctcactcacctaggccacacaattagccttttaactggtctgtttgctcaccggtattctgtttttaagttcactccccacactgccaccacattgactaaaacatgtaactcaccaaattgcttccctaccttaaaaccttcagcagcagttccctgttaccttagaagagctcacaagattttccacagtttgattcctgcttctttatccagccttgtcttttgctaccctttcaatctttatgccccaggagtagcaaactgttagttttgaaccatatgaaattgccctttttgtaggtcaaatatcagcagattaatagggttcagtcgactgggtgcgatgtctcacacttgtaatcccagcactataggaggccaaggcaggcagatcatttgaggccaggaattcaagaccagcctagccaacgtgctgaaaccctgtctctactaaaaatataaaaattagccagacatggtaatgcattcctgtaatctaagctacttgggaggctgaggcaggagaattgattgaacccaggaggtggaggttgcagtgagctgagattgcgccactatactccagcctgggtgacagagcgagactctgtctcaaaaaaaaaaaaaaaaaaaaaaaaaaggtttagtccttgtttcctgccttagtgttcttgctttatgttcttctccctgcctagaataaaaagcctttctagcccacctgatacctactctagttagaagttgcttctggatagctggctctgacccctttcactgcccccattccccttatacttccctctctccttgcatttaccacactgtattttaattgcctggttgttttgtgtcgcaactagactctaaggccaggtcagggactgccccttacataggtttgtgtcccccgttcctgtgacttgcatgtggaaatcaacagatgtttattgacctgaacaggttgtattagacatctgaatagtcaaaattagtgactaaacctcgtcgttaattttcttttccagctgaagaaagtagtagtagtgacagtatgtggttaagcagagaacaaacactgcacacccctgttatgatgcagacaccacaactcacctccactattatgagagagcccaaaagattacggcctgaggatagcttcatgagtgtttatccaatgcagactgaacatcatcaaacacctcttgattataagtaagtacatttgatcattttctgtactataactttattaattacatagaaaaagttaagttaaaagaggaataaaattctccttgaagcacgcaggtaacatggatgttagctcaaagacaacaagaggaagcaaggcaacagcaggagagagcagcaatgagctatgttaaactgcgaactaatcttcagcatgccatgtaagtgagagtgccttattgtctgagtctaggaagttcactaattcattttaacattttaatgtgtgccttatctaaaaatttcagcaaactctctagagtaacctaagctgaaataatcaaggaactaaaaattggtctttccaacagaaaagcaaaatattttaattaaaatactacctagttagccaaaggaccaatcttaggttgatctgttggaaaagtttaaatatcaatccttgtttattttggtacacagcattaaaaatacagttgtgttacatcctaattgattttcccaacttagttcaggccctcatctctcacctgaactattgtattagctttctaactggttttcttccctcaaatctcccatttattttctcaccaaacctctcccttcaccccccgctccatcattcacaccaccatcaagaattactattctagaataaaaatcttaccatgtaactcttacttaaaacctttctgtggctccccattgcctgctggataaactcccaacttccttagctcatggcatgcaagatgtttcaaaatatggcccctgccacgttttagtatcatttcctattccctggcagctggtaaaatcatcataaaagaacaagctcaggtgtcactttaactgaagctttggtcatctatgctcccataacactatgtatatccatatttcttatagcacttgccacattgtattgtaaatatttgtttatgagtttgtcccgtttgtctagactgtgagctcctcaagggcagggaccacattcattgcctatcagtgcttggcacgtaaaaggtgctaagtaaatgttcattgaatgaataaatgttcaatgctaaaaaaatgaagtttatcttttaaatactttgtttttactggattatgtatgataactttataaatctttctaaaatcttcattagctttggctctaaaaaacatggcagacaagcagtctttagataatttttttaaatgtcttgattggtatacagggaaaagtgtgatgattatgattaagtttttgagtttgaaagcattgtatttataatgtggtatatgttttactattgggagatagtagttgttaccctcttctttttttaatttatattttgttctgtcttgttggtttttagatgttaagaattttacctgtttttcttacaaaatgatcatttactatgagtggtggcctgcataaattcactttagttatctccatagtggtcttaacctctagagacacaaggtatactctattacacgtatagattctgatcctggttaatatggtcatcatctatattgtcacatagttctatccccttttgtctgtttctgtgaccacattccttttaatataagttcttattttatgctggatcctacaactgatttcttggcttccaagtagtcgccggtccatatattccagaattctgccatgcaatcatttggtctatatctctccccataaaacattacaccagttcctaagatcctatatagcatgtcactacttagtaccattttaattcccaattatagttaactcccccgcctcccggcaactacaagaaattatctcagttaaatgactattaccaaaggattctttggtggttgtaccataagtcatctattgcatgggactctaaagcattttcatcttacaatgatttttctataatggtatctgccctataactaaaaatacttccaaattttcttttttatttttcatagcttgtatcacatatatcttccttgtacttcaaacaaaatgcagaacggctttctgattttctgtcacatagttcatacagcacatatattcccttcacggttgcctctacaaaatatagtaaaattgtctttctacccagaactgttaggaagtaaggaccattataaacatatttgtccaggtaacatggatcagagatcgtatcttgttatctttatatcttttaagaaccagcatagtattgtgtaaattgtaagcattcggtaaataattgctggggttttggcaactttcttgactgtgggggtgtctttggatgagaaaagaaggtaatgttggccaaactagggaaaaacaagtcctactcagtttcactattatgttggctactttatgctgatctgggctaatttgtgaacttaatttattccccataattatgtaataacatatataacttttggtcttagtttttcattttaaatttctaaatatgtcttagttttgagtttcatagggcacacgaatctgaagtttcagcatgagtgttcctcatttcttcctgaggcagaattaattccttattttagtatgtccttataacacttgatgcatagttttcttgtaatatttatcacattttgtcataattaattgtttatctctgtttgccatggtagactgtaagctccttgagggcaggaatcatgtcttagtcttattcatcttttttttttttttttttttaacatccataggacacagtagaagcctgtcacgtagtaggcattgtgtgagtgagtgcgcgcatgcctggtacacattaggtactgaatgaatgagggagtgatgatgggtaaaattagcattatatattgatgaaaatatatgttttctgaaaatgtcatttttttggtctctgttttatgtttgtttattaatttgtaccctgcctactttcaaaaaggatttgaggtatcttgtatgttcccatgtgggaaattctcattgaaccttgtatatgggatatcagaactataaagctaaatgtactgaagtaatgtagaataaacataactccttagcatttttagacaagtaaacattgggttttgatatcattgatgacataatcaatgcctaatcattctccctgacctttaattccatcattttccattatacttgaatatagagagccacatactgctgcctagatattaatagtcacgacattagttcagatcttgactttgttttatatttctctagtcggcgtggcacaagcctaatggaagatgatgaagagccaattgtggaagatgttatgatgtcctcagaagggaggattgaggatcttaatgagggaatggattttgacaccatggatatagatttggtaagaaacttaatgatttctgtaagattttcagtttagatcttttgaaaattatgttggatatttattagagtagagaaatacttaccaagagaagtaagttttgcaaaaatattaaaatagttgccaggggtttagatatatgggaagggatttagaagagagtaaggttggtgaaggtggtagatcctagattaagatgataacaattgtctgtttgtttctgagattaatttaggaatatataggtttaaagggtatattttgattaatactaatttgactatgaaaatcaatttttatttaattatgcattttaaaaaatatgagttagtataaaagtataccattatcaaaacaatatattaatactacttgttgagacaaattccgtatcagataatgaagtaaaattacttaaacttggaaggaaattaaatacaggtaggagtgtattctttattaataattaaatatgtggttagggttgatcatatacaaaatggttttacatatttcatcttgctacatatctcattaaactttgtgaagtaggttgaaaggattgaggatattgaagcttactctctccaaagaggcaaaactagcaaacagtaaagttgatacttataagtccagtcttatgattctttttagtatattgtgtattcttcttaaataattaaatttttagaatggtataatttggtgcctcgaaaggaatatgatttttaaagtaaaatgaaaagtgagttttccggtttttgtctcttaggataattttccatgagttttttttttgagatggagtcttgctctgttgcccagacttcagtgcagtggcacaatctcagctcactgcaagctccacctcctgggttcacgccattctcctccctcagcctcccgagtagctgggactgcaggcgcccgcaaccacgcccggataattttttgtatttttagtagaggccgggtttcaccgtgttagccaggatggtctcgatctcctgacctcgtgatccacccgcctcggcctcccaaagtgctgggattacaggcgtgagccaccgcacccggctgataattttccatgagtttttaaaatattgtgtcaggtacacttggaatcacatagaccatgtgaagaacttggatattttcagttactatctggtttgtagatatagctaaactaatgtcaacttatttccttttttcctttagccaccatcaaagaacagacgagagagaacagaactgaagcctgatttctttgatccagcttcaattatggatgaatcagtaggtttaatttaaatgtaccctaggattgcaaaatcagaagtataggcagtctctcagtttgaggttgaagacctggggcagcatactgagaatagatgaaaacagctggatgtgagaaaaagaggcaggcaggcaggatttcagtgggaggggaagagagtgctgcaatagtgttgacagattagaaaagtacttttgaatcctggctgactgggacttgaatattaaggaatttggactgttcttccaggtttgtactgttcttcaatgggttgcccattgaaagattttaaataaggtaatggcatgatcagaattgtgtttcagaaagatttccttgacatttatggatgggacaggatgaatgaggggcgtcatataaaggcatggtgaaaaataatgagaacttgaacaaaggctttgataatgaagagaagggtatctagctatctaggatgagagtcagttaccactcccaccatccttaattggttattattgggttttgtcagttatttttcttaagtacctcttatatcagtcccctgtgccatattctccttgacagtgccttgattcgggtcctcctcagttttcacatgggctgttgcaaagcctttaagctgatattgcagtcccgctgctcctttatgcctcttgtggggtcatctttctaaaaatgcagatctgatattctcacttatcgttctaagtcttttattgatttttttcccccccattgccattaggaagaaaattctagctcctcagcctagcaaacaaagccttttatgatctggttcccttgccatcttaaccttggccttttccttacatgtattctatgctctagccatatcaaatcttgtagttccactcagatacactatgctctttcctgactccataactttgtataagcttttttctgccagaaattcccctttatttttcctcctagtaaagtctttctttgatactaattctgacattacctgtggaatttttgctgacttccacagatttttttttctctccttctttaactgtttgtacacactttattgtaataattaccagacttgtgtagtgagataggatattacatgccctggtccttcactagactgaactccctgaggcagtgatgatgttattcattcttagttctgcccagcacaatagatatttagttttgtcaaatgaataaatcatttaaatgccctgccatctccctttttagaatctacccattttatgttccttgttcctcacacctactgcctcaggtgacggttataccatcctcaaaggcctgccttctatgtacaatttctaccattcccaccttgccctctcctacctcataatctgctttcagatagcttttagaactattttgacaaactaattcacactaacatgtttactaataaggccaaggggccgggctcagtggctcatgcctgtaatcccaatactttggaaggccaaggtgggaggattgtttgagcccaagagcttgagaccagcttgggcaacacagtgagaccccatctttacaaaaactaaaaaaattagctgggcatgaagatgcatacctgcggtcccagctactcaggagggcgaggtgggaggattgcttgagcccaggaggttgaggctgcagtgagctgtgttcacaatactgcactccagcctgggtgacagagccgagaccctgtctcaaaaaaaaaaaaaaaaaaaaaaaaagtagaatctgcttcaattggtcttaagtgtggcctgagattctgcactgctaacaaatgctgtcagtgcttcaggtctgcaaaccatactttgagtagcaagactttatagtacctaatgacctgttgcactcataagtctatagtttaactgcacactgaagtttatggttttcttgataattaatctaacagtatgtatcatcttagtttgttaaataaaacatggaggtagtgattgtgatgaggggtaaaggaatattttcaagcaggtgcgatgaaatgcatttattcaacaatttattacatcagaagttggtgctaaagcgaataagacactccctgtccttaaggaattcatattctagtgcaccttgactatcactttgaaatgaaaagtatggaaggtagtagctgagagtttgggtgacagacactgtgctaggtatgatttattttgatcctctcagcaaccgtgtgagaaaggtaatgggaatttccactttcataccatagcaagctgagactgaagagatcatttagtgactttgctcagttatacagttagcaagtgtccgagtagtaatttgatgccagttccttttgatttaataatctcatgctgtcttctactgttgtgcttcccaaaactaaaatccccatttggatgagaacaccaacaaaagtaattaagaaatcgaaatggttaactgtgatcaaaattaatatgggcagttaggatcaccattttttaatgtatttgtctaatgtcaggagaacttttaacattcgttttcttagttacatactagatttgcaaaaaggtgttcttcagattactaaaataatgaaacagcaatattaactatgtgtatctatttttgacatttaacatttagagaaaaataggggcctaatagtcattttttatttatagtgattttatagcattctcatgtatattgaatgttacaactgaggggcttttatttattcttaatttgataatagtttagctgcttctgctacaaaaattaggaaaattagcacatgtacttataactgtagttttatagcattaccacatgatggcagcagtcacataactgaatgctcagtaatctttaaaggcttaggtgtctttagaagtctttgaccatgtaattttttttttaaagttaacagtttattttttaaatatacactaaactatactccatactgtcttaaccataacttaagaaatggaataatggaaaattttgaatgtcaaattctgtttgcctttatacaataccccacatctgttcttactgaagcccataataccggagtcatctaaacagtagcaaaattgggatttaaattctttaatgtccagttctgagattctccaattctaagggaagtaactcaaagcaccctaatgtagacacttcagtttgttactaaataaattgtaaaaatatctttttaaacacttaatttttaaacatgattttctaaataaatcataaaaaatatctttttaaacacttaatttttaaacaagattttctaaataaatcgtaaaaatatctttttaaacatgattttcacattatccaggagtggtaatataaaaactctgaacatattttgtgttgcatatacataaaattctagatttatggtgtagctggttttatatttggacacaaaattggtttataccattttgataacagttgttttctgccagaattgccaaaatacactgaagtttgatattaaatatgtttaagtatttattaatgttaacatcagaaacaggcagagtttgtgttggcacagaaaagaaagtgtcactactctcattctcttgtgttgagattctcttattagaattatttatagtataaaattggtaaagaagggctccatgtaatggagctaatttaatgttctagtaagagaatctacttataacctagtctgtacaaaacaaaaagaatctcaagtgtttgggtgctttctagtcaggcactctgtttggaaagaacttgagttcgtcttcatcccatactcaatactaaattgctaattaagattttgtactttcattcatcatcagaccttttctaccgagattcatagagtgttatggtaagaattggcctttaaacattatctcggtctttttggtggaaacgttctaaccacccaaactctgacttgaaccaaaaaaggagaaccctgaagcatgcgggaaggggagaggacaagggattagtagtgtggtagttactgtgaatggacaggtaagaaattgggtgcacgagtcctctttgttttcattacttgggattccaaacactacttgataattcattataaagaggctgcaatcagatacttgtttctggatctgcaaatacacagtttcttcagctcaaaacaatacatgagttctatgacttttgttcatagaacttataagagatttaacttacaagtaagagctctttgtaatatttcagctcattacatctggctttgatatcagttcttaatagcttattatagtattctaaaatattacttaatgggcataagtgctagaattttaattgaacaacctaacttttagtatatatactaagagtcacatgccattcttgtttagtgaacaagggagagttgctccattcatcatctgcttttacttttagacaagtaattattagattttacctaacattcctttctcagttggagtatatagaaagcatcaatgtaagtcattttgcccagattttaccttacccttttgatttcttaaaatttgtagttctgttccattcactttggccagattttctaaagaaagcttcttgctttctacatacttgaattgttcttagattttttttggtctgcatactcaaatgcctttttgaaaaaccatatccacttcccagcacaaatagccaagtttgcaagactttcttaacccctttccaaggaacctgtgccagaaatatatgtgaagaagcacattcatttattcatttaacaaatacctatgttgagtgcctatgtttagggtattatctagacattagtggtacatataagcataattaatccaaggttcctactttaattatatgtgaggtaagtagcatcttgattagtcctgatgttatttcattatatatcatggtcaatttaattttagaattatacatctgaagagaggggaagttttcaaagtggttttattagcatgttatttaacataataaagtattaatgtaatatttatggatatatttaaagaaatgaatgacttttaacgagattttctcccctctctctctctcattaggttcttggagtgtcaatgttttaataccagtacacaattaaatctgtggtgaagtcattttctaagtggaagaggaaattttaaagtgtggtagatacagtgaaattctgtacagatttttctctaaggagaatatgacatgcttatgcttaccaagatcaagtgcattgaggggcagttttgtttgcctgaataaacgtaaaggacaagtaaacaatttgatgataagctacagtttttcttagaaagtaaatattttatttatgcgctgttagttggcttttgaatcgattatttcatgcttttttttaaaaaaaaaaaaaaacaaaataacaatctgaagaggcatttggtacagatatgaattctcttacatttatttactggttgtactaaataatgatgacctctgctggatttctgtttacatccagaaaacaatgttaaggatgtatttattcccctaccctgaagaaagtgtaggatagaattgtttttagcattctaaatttaaatgcttaaaacgtcaatcaacaaaactttgttttaaatattgtaattgtggagaaaagtaaacttataagcagaacttttacaattttttcatctaaaagtattttaagatatttttaaaatccaagagcttctctatacttttcagaaatatccagatgcagtgaactgccagaaggtaaccagtctcaaacatgcttatcccattatcaaccctgaaagtttgcttgtcctttaagataaaaatgtaatgttgtgatattccttccagtaatgccactgtattttgtctccaaataaaagaagcttattgtagtatgtttgcagaaaaattctaaacaaaaattatacagcttattagagtgtgggaatagggatctaaattttaaataaaattatatatatatataaattggtgctgattttataattgcgcagtttgtttagttttttcttacttttaaattccaacttaaaattatgaggtttcagaaatatattgaaagtttaacaatgtttaaaaatagaaaagcatgagtgttcatgctttaaaatgatttttaaatttgtattttatattgttttatctatctgtctttgcaagcagtcttcaggttaaagatacttctaacaggttacagtacatttcctctgtatgtaaattagatgggataatagaattcataacccataatattctttgaaagctaagctttaaacttcattttatgtcctttcacaaataaattagtttaaaacagaaagtggctacttgccattttgacatcaactcattttgcgaggcttaggcagctagacatcgtttaaaacaaaatattaacttatattacatgtgtatctatctattgtcagtcgtctctcagttcttgaggtatattattttaatcattccatgccttaatatgcttgcaatacaagaatatcttcagatgggtgaataccaaaaggctttcagtttttagtcagaaatcaagcattgggctgtggtagccaaaaaccataggttagctaaaaagatcatgatacaattattttattaagtcatggttaataacaaatgaatccagacttgtctaacagattttccatcaacaaatattgttatgtgcaaaagtattgcctatgttgttttacacaccactgcattaactagaactgctgagaggactgtatatatgattttaaacctaagttgattttttttctcactcttgaaaggagtacttctttgtgaaagcagttcttacagctttgttttcaaccagctaaaaatgttttatatattactctaacctgttgtcctccacattctattgtcctaattgtactgttttctgatttgtatttatgtcttgagacagtaactttttgaataaaaataaacctacagtatgttgtatgttttctcttgtactcaaagggggagggtggctataaatggtttgcaaatttatatctattatcacatcttttaatgtgtttggggaataatttatagagaataccatcagtttatatttttaataaatcatatgtatttacaatgaaaccaaatccctaattggattattactttaaaataggaacctgtaaccattattgctttaattttcatctggtatgagttaaacacatttacaaatgtttacattgtttatacagggtacatttgagtgcctactgtgtgctagcatgtgttaagagatctctccttcatagatccattggggaaaacaaaataatgaaacttgtaataaatgccaggaaggaaacaagcaggatatgctgaggtagagaatgagagagagacagtaagagagaaacctgccttaaataaggggctcatggcatggaggtaaaaccatttgaaaaagaatttactaattgaattcttattgaaaactcatcaaagaaagtgttaagatttgcattgtactctttaagagattcatgtcagtgtaacactagcacattgttcatttgggctagtttgtatatcagaattgtcttctgtcattagtgattcagaactgaacatataaaatgatagctaaaacagctgcgtgctgttttaagtagtttacatgtaataactcattaagcctcatgacaagagttgataatgctgtcattcccccaccctctgccaccaatttttttttttttttttaacaaatcagaagaaggtgagaatgaggtacaaagaagtttaaataccttagaccaggggtaccagaacgtggcctgttagggactgggccgcacagcaggaggtgagtggcagcctagtgagcaagcattaaccacctgagctttcctactgtcagagcagccgtggcattagattctcataggagcgcgaaccctaaagtgaactgcacgtgcaaaggatctaggttgagcattccttatgagaatgcttgatgatctgaggtgcaacagtttcatcctgagccccccttcccaccctgcccccaaagtctatggaaaaaattatattccatgaaactggccgctggtgccaggaaggttggatactgataccttagacaaggttatatggctagtaaataatggagttggtattccagcccaggcagtctggctgcattaagtcctagaaagcattgaaactatttgatagataagggaaatattcataattgcatacacataaaatggtacattgttcattgtgccatagtgcatctatctacttagagttcagctggttatagagttggtaggtgtaaataaataattgtccttaatatgctacctaaccggctttcataaagaagatgtaagttgaatctgagtcctgagcttatcagtggtttagttaataaagctgagagactggggaagatgagtaggaaaattgaaatgtcttcaatattctgccacaaagggaactttaaggggtcacgtggttgaatacagatcagacagactattctggtggctgtaatgatccagcaaaagaaaatgattcgataaagcaccatgcctttggttatgaggaaactcggtgttgaagtccactaaataaatgtcacttcaggtcaacaaattattgattgatgtgtgcctggcctagtgctagctggtgagaaggcaaagaccaacaagacaggttttgtgcttacagttctgctgggggttaggatgcaggtgccaaaagaataaaatgaagtaagttcagtgtttttactgtgtgttaggggagcacagacgaggggcgcaaacagtggatgtgctcagggagccttcctataaggctgatgctagaattctcccctgcaacatttttatttatttattttttattatacttttaagttttagggtacatgtgcacaatgtgcaggtttgttacatatgtatacatgtgccatgttggcatgctgcacccattaactcgtcatttaacattaggtgtatctcctaatgctatcccaccccacaacaggccccggtgtgtgatgttccctttcctgtgtccacgtgttctcattgttccaattcccacctatgagtgagaacatgcagtgtttggttttttgtccttgcgatagtttgctgagaatgatggtttccagttttattcatgtccctacaaaggacatgaactcatcattttttatggctgcatagtattccatggtgtatatgtgccacattttcttagtccagtctatcattgttggacatttgggttgtttccaagtctttgcgattgtgaatagtgccgcaataaacatacgtgtgcatgtgtctttatagcagcatgatttataatcttttggtatatacccagtaatgggacggctgggtcaaatggtatttctagttctagatccctgaggaatcgccacactgacttccacaatggttgaactagtttacagtcccaccaacggtgtaaaagtgttcctatttctccacatcctctccagcacctgttgtttcctgactttttaatgattgccattctaactggtgtgagatggtatctcattgtggttttgatttgcatttctctggtggccagtgatgagcattttttcatgtgttttttggctgcaaaaatgtcttcttttgagaagtgtctgttcacatccttcgcccactttttgatggggttgtttgtttttttcttgtaaatttgagttctttgtagattctggatattagccctttgtcagatgagtagattgcaaaaattttctcccattttgtaggttgcctgtttactctgatggtagtttcttttgctgtgcagaagctcttgagtttaattagatcccatttgtcaattttggcttttgttgccattgcttttggtgttttagacatgaagtccttgcccatgcctatgtcctgaatagtattgcctaggttttctaatagggtttttatggttttaggtctaagatttaagtctttaatccctctcgaattaatttttgtataaggtataaggaagggatccagtttcagctttctacatatggctagccagttttcccaacaccatttattaaatagggaatcttttccccattgcttatttttgtcaggtttgtcaaagatcagatagttgtagatgtgtggtattatttctgagggctctgttctgttccattggtctatatttctgttttggtaccagtaccatgctgttttggttactgtatccttgtatagtttgaagtcaggtagcgtgatgcctccagctttgttcttttggcttaggattgacttgacaatgctggctcttttttggtcccatatgaactttaaagtagttttttccaattgtgtgaagaaagtcattggtagcttgatggggatggcattgaatctataaattaccttgggcagtgtggccattttcacgatattgattcttcctacccatgagcatggaatgttcttccatttgtttgtatcctcttttatttcattgagcagtggtttgtagttctccttgaagaggtccttcacatcccttgtaagttggattcctaggtattttattctctttgaagcaattgtgaatgggaattcactcatgatttgcctctctgtttgtctgttattggtgtataagaatgcttgtcatttttgtacattgattttgtatcctgagactttgctgaagttgcttatcagcttaaggagattttgggctgagactatggggttatctagatatacaatcatgtcatctgcaaacagggacaatttgacttcctcttttcctaattgaataccctttatttccttctcctgcctaattgccctggccagaacttccaacgctatgtggaataggagtggtgagagagggcatccctgtcttgtgccagttttcaaagggaatgcttccagtttttgcccattcagtatgatattggctgtgggtttgtcatatatggctcttattattttgagatacgtcccatcaatacctactttattgagagtttttagcatgaagagttgttgaattttgccaaaggcctttactgcatctattgagataatcatatggtttttgtctttggttctgtttatatgctggattacatttattgatttgcgtatgttgaaccagacttgcatcccaggggtgaagcccacttgatcatggtggataagctttttgatgtgctgctggattccgtttgccagtattttattgaggatctttgcattgatgttcatcagggatatgggtctaaaattctcttttttggttgtgtctctgccaggctttggtatcaggatgatgctggcctcataaaatgagttagggaggattccctctttttctattgattggaatagtttcagaaggaatggtaccagctcctccttgtacctctggtagaattcagctgtgaatccatctggtcctggactttttttggttggtaagctattaattattgcctcaatttcagagcctgttattggtctattcagagattcaacttcttcctggtttagtcttgggagggtgtatgtgtcaaggaatttatccatttcttctagattttctagtttatttgcacagaggtgtttgtagtattctctgatgatagtttctatttctgtgggatcggtggtgatatcccctttatcattttttattgtgtctatttgattcttctctcttttcttctttattagtcttgctagcggtctatcaattttgttgatcttttcaaaaaaccagctcctggattcattgattttttgaagggtttttttgtgtctctatttccttcagttctgctctgatcttagttatttcttgccttctgctagcttttgaatgtgtttgctgttgcttctctagttcttttaattgtgatgttagggtgtcaattttagatctttcctgctttctcttgtgggcatttagtgctataaatttccctctacacactgctttgaaagtgtcccagagattctggtatgttgtgtctttgttctcgttggtttcaaagaacatctttatttctgccttcattttgttatgtacccagtagtcattcaggagcaggtgttcagtttccatgtagttgagcagttttgagtgagtttcttaatcctgagatctagtttgattgcactgtggtctcagagacagtttgttgtgatttctgttttacatttgctgaggagtgctttactttcaactatgtggtcaattttggaatagatgtggtgtggtgccgaaaagaatgtatattctgttgatttggggtggagagttctgtagatgtctattaggtccgcttggtgcagagctgagttcaattcctggatatccttgttaactttctgtctcgttgatctgtccaatgttgacagtggggtgttaaagtctctcattataattgtgtgggagtctaagtctctttgtaagtctctaaggacttgctttgtgaatctgggtgttcctgtattgggtgcgtatatatttaggatagttagctcttcttgttgaattgatccctttaccattatgtaatggccttctttgtctcttttgatctttgttggtttaaagtctgttttatcagagactaggattgcaacccctgcctttttttgttttccatttgcttggtagatcttcctccatccctttattttgagcctatgtgtgtgtctgcatgtgagatgggtttcctgaatacagcacactgatgggtcttgactctttatccaatttgccagtctgtgtcttttaattggagcatttagcccatttacatttaaggttaatattgttatgtgtgaatttgatcctgtcattatgatgttagctggttattttgctcattagttgatgcagtttcttcctagcctcaatggtctttacaatttagcatgattttgcagtggctggtaccggttcctttccatgtttagtgcttccttcaggagctcttttagggcaggcctggtggtgacaaaatctctcagcatttgcttgtctgtaaagtattttatttctccttcacttatgaagcttagtttggctggatatgaaattctgggttgaaaattcttttctttaagaacgttgaatatcagcccctactctcttctggcttgtagagtttctgccaagagatcagctgttagtctgatgggcttccctttgtgggtaacccgacctttctctctggctgcccttaacattttttccttcatttcaactttggtgaatctgacaattatgtgtcttggagttgctcttctcgaggagtatctttgtggcattctctgtatttcctgaatttgaatattggcctgccttgctagattggggaagttctcctggataatatcctgcagagtgttttccaacttggttgcattctccccatcactttcaggtacaccaatcagacgtagatttggtcttttcacatagtcccatatttcctggaggctttgttcatttctttttattcttttttctctaaacttctcttctcgcttcatttcattcatttgatcttccatcactgataccctttcttccagttgatcgaatcggctactgaggcttgtgcattcgtcacatagttctcgtgctgtggttttcagctccagcaggtcctttaaggacttctctgcattgattattctagttagccattcgtctaatcttttctcaaggtttttaacttctttttgatgggttcgaacttcctcctttaccttggagtagtttgatcgtctgaagccttcttctctcaactcatcaaagtcattctccgtccagctttgttgcgttgctggcgaggagctgcattcctttggaggaggagaggtgctctgatttttagaatttctagtttttctgctctgttttttccccatctttgtggtttttatctacctttggtttttgatgatggtgacgtacagatggggttttgttgtggatgacatttctgtttgttagttttccttctaacagtcaggaccctcagctgcaggtctgttggagtttgctggaggtccactccagaccctgtttgcctgggtatcagcagcagaggctgcagaatggcggatattggtgaatttgcctgatcgttcctctggaagttttgtctcagaggaatacccggccgtgtgaggtgtcagtctacccctactagggggtgcctcccagttagggtacttggggggtcagggacccacttgaggaggcagtctgtccgttctccgatcccaagctgcgtgctgggagaaccactactctctttgaagctgtcagacagggacatttaagtctgcagaggtttctgctgccttttgtttggctatgccctgcccccagaggtggagtctacagaggcaggcaggcctccttgagctgtggtgggctccacccagttcaagcttcccagccactctgtttacctactcaaggggcaatggcgggcacccctcccccagcctcgctgccgccttgcagtttgatctcagactgctgtgctagcaatgagcgaggctctgtgggcataggaccctctgagccatgcgcgggatataatctcctggtgtgccgtttgctaagaccattggaaaagcacagtattagggtgggagtgacctgattttccaggtgccatctgtcacccctttctttgactaggaaaggtcattccctgaccccttgcgcttcccaggtgaggcgatgcctcgccctgcttcagctcactcttggtgcactgcacccactgtcctgcactcactgttcgacactccccagtgagatgaacccggtacctcagttggaaatacagaaatcacccgtcttctgtgtcgctcacgctgggagctgtagagtggagctgttcctatttggccatcttggttccaccccctacccctgcaacattttatgcaaattttcacacaacaaggttgaaagaattttactttgaatacactgttgtacttgcctttaccacatatccatctgtctctcatttatgtatttcaaagtaaattgcaaacaccggcacactacctcctaactacttcagtgtgcatatcattaaaagtttactgttttctattttggtgtataatttatatatagcgaatacacaaactatatatatttgctgttttgacaaatgcttacactgcttaacccaaatctgtatttgaacattaccatcaacctagaaagtttatttattctccttaaccaatctgttcatctatcctctagaaacaatagctattatgtttccatcatagactaaatttggctcttctagaacttcatataagtggaatcataacagtatttttgtgcaaggtttctttcagcatgtttttgagatgtatccatgtttcatatatcaacaattcattctttttaatgtgtttcattgtaaagatatactacaatttgttatgggttgtttctgcttttttggctattatgaataaagctgctacctgagttgcattttaaaagccaagaggtggaataggagaaaggaggactgggtgacgagggctgaaaatttcaggcaaaggagacaacataaatgaccatcttagatgtgagaactatttagtaattgcttaagggtggatggggcaagactggaaaggatagttgactatccaatacctcatcagctttaaaaatgaaaaaagacattcacaagtgatacctttggtaactgaagtgttttcgttttatgtgtgatgtgctcagaattggcgaagatccaaaatagtagcagggtgcctttaaatgacttgtgagaaattgatttaataatatgggtgttttcatcacatcaggccttattctaccattgaggaaaatgaaaggccagctactataagtttgtttttcattttttatttttacttgttttaattgactatatatatatgtgtgtgtgtgtacatattgacaagaactattcatgtgtatgtgttttaaaatatgtatacattgtggaatggctaaatcaagctaactaacatgcattacctcacattttttgtggagaggggtcttttgctcttactgtattgtgtattctcccttcaaatttattaatatttgccatatatatacttaggtgctccaatgttggatacatctatatttacaattgttatatcctcatgatgaatcgtcccctttatcattatataatgaccttctttgtgtctttttacagattttactcaaattctgttttatctaaagtatagctacccctgctctcttcaggttttcacttgtgtaaaatagatttttccatcccttcactatctgtgtgtgtccttaaaggtgaagtgagtttcttttaggcagtatatagttaggttttactttttaaaaatccattcaaccagttttttgattggagaatttattccatttatactcatagtaattattgataggtaaggacttattactgctattttgttcattgttttctggttgtttcatagatgctttgctcctttcttcctctcttgctaccttccttagtcattaggtgattttcttcagtgatatttttattccttactttatatcttttgtgtatcttctatagctttttgctttgtggttactatgaggtttacataaaacattttacaattacaacaggctatgttaagctgataacaagttaattttgattgcattaaaaaactatacttttactccccccattttatgtttttgaaggcagaatttacatctttttatattgtacattctttaacacattattgtagctattattactattattgttttttttttttttttgaggcagtgtttcactcttgttgcccaggctggagtgcaatggtgccatctcagctcaccgcaacctctgcctcccagattcaagcgattctcctgcctcagcctccccagtagctgggattacaggcacgcaccaccatgcctggcaaattttgtatttttagtagaggtggggtttctctat

SEQ ID NO: 434 - DNA, 264074 bp, Homo sapiens
aaacacacagtttcatatgccagtggtagaagaataaactgatataaactggagggggtaattttattaaaaagttagaaaaggtttaattagtagaattctgcatttgtatctgcattgtattttaagcataatttgttgaaatcaaagaaaaacattgatttgcacagaaattcagagttagaaatgtccattacagtgttgtttactttttttttttttttttttttttgagacagagtctcgctctgccacccaggctggagtgcagtggagcaatctcagctcactacaacatctgcctcctggattaaagcgattctcctgcctcagcctcccgagtagctgggattacaggtgtgcaccaccacgctcagctaatttttgtatttttagtagagacagggtttccccatgttggccaggctggtcttgaactcctgacctcaagtgatctgctggcttcggcctcccaaagtgctgggattacaggcatgagccactgggcccggcctgttgtttacaattttaaaaatacatttaattttcataaattgtgtgtaagtagattacatgtttgagaagacagattctatgccacattaaaagttagagccagaaagtttaacttcatgataaaatgttaccaaattaaaccagaatagacaagaatacataacagggttactggctagtgggattatgatagtacttaatggtagaaaatcttgttttctaaattttctgccatgtattaggattagatttgtaatataaaaaataaaatggccttcaatttgcaatgcattatatgcattttttatccaaggagaagtatttaatgaccagccatagcaaatcatattatataaggtctgcaagatacctatgtattgtgaagttatagtcctattgcctcaaaaagcttaccacaaaaagtcctgtatttgcgatgttcctttttcaccaaaataagtattttgcactttacccctattatcatcaagcagactcatttcccccaccctcctgcttcctcaaatcagtttctagctggctgcctagagttcaaaacccctaaccagtccctaagctttgaatttgcactttttctattccatgtaacatgtgacaaaccattactcagttgaacactttccagaaaaaagtcagttaaaagaagaaagtcttcctggctggcctagggaaaaaaaaagtaaggaagccttttaacttgcttacttttctacctcaattctctttatttagacactgtttagaattaaaggatgagtttaggattgggaaaaaaagctattatctcaaagcctggttgttcttttctttcttttttgagatggagtctcaccctgttgcccaggctggagtacagtgacgtgatcttggctcactgcaatctccatctcctgggctcaagcaattctccttcctcagcctcctgagtagctgggattacaggcctgcgccaccacgcctgactaatttttgtatttttagtagagacggggtttcaccatgttggccaggctggtctcgaactcctgacctcaggtgatccacccgcttcggcctcccaaagtgctgggactacaggcgtgagccaccgcgcctgccctggttgttcttatcctctttctagcccttttctctaccctcaagaatattataaaatgatgtgcgaaactgcctatcgggatagagtgcataggaagtaaaaaactattcctacagactcaaaatgaaaaatatttttatttgccaacatagttcttcaaatctaacactatcaagttggtaccacacttggggcaataagggaaggagacccctatctgcaattatacctttcatttggtttttacatctacctcgtttggctaccacaataaacctctgaggtagctggactatcactagcttcctgataaattcttcctatgaaacagcatcgcttctcctgttcaaacatcagaggcagcagcagctgccatactcatccacgtaggaaacagcattggcctctttatgagtaaaactttgttcagggctttagatttagtagttgccaggggagaataactgtgaacattcatgttgataaaccagatttaaaaaaggaaattgctttctcagagaccattcagaaagaaagaggatactgcctgatttcttatgaagtatttaggtgattaaaggtgatacaggggactgatcactccttatctctaaaaatacttcctttacttggcttgtgggacaacacactcttcagtttcctcacaccccactgtccacttttcaatcctcctcgatggcgccttctcttttgctcagctttccatgtggaaagtaccaattctcaattcttggatctcttctcagtctaactccctagccaagagatccctttaagtctactggtgatgcttaacatttaactatcctcagtccaaacctctcctctgaatgcttgacttacatatctaactgcctacctgatgtgtccacttgggcgtttaacagacacttcaaacttaacatatccaaaacatttgactctctaaagccagaaactagtaactttcactattgccactactgtcgctctagtctaagccattaatgtctcttaaaccagatcattccaatcatttcctagcttatctcatggttcccagtgttttaaagaattcccagagccattctttaaaaatataacccaattttttggctttgctcaaaatcctccaatgaatgctcatagcacttaaaatcaatgaataaaatctctatgcaacctcatttcctcctataagcaccttttcctcactcaccttcagccacagtgttctccaaattcacttatcccattcctgcctcagaaccaccgcacctgagtagaatactctccactcagatacctacaagatgcttccttacctaatgcaagttctctgctaaatgtcacctcagaaagagggattccctaaccactctaagatagttctcaaggtgtagcatagtggataaagaggctatttttttgtgtcatagaggggacacaaaatatgtatttatatttgcttgaggtgaagaaaaattcatggccaggcgtggtggttcatgcctgtaatactagaactttgggaggctgaggaaagaggatcacttaagctcaggaattcaagaccagccttggcaacatagtgagacctcatctctacaaaaaattagctgggcatggtggcgcacacttgtagtcccagctactcaacaggctgaggtgggagtattgcttaagcccagcgggtcaaggctgcaatgagctgggatcctgcccctgtaccccatcctgggcgacagaacaagactctgtctcaaaataaataaataaataaataaataaataaataaataaagttcattgaagaatacataagaaataataaaaatagctacttactggattggcaaaagtggtaactcagcagataagatgtagggtgaaaaggtttttcatattatttcttttcaaaatattatttgaaaactacctgaatgaacacttgaaaacaaatgtaaaacagcagtcctctaccactgtctctttaccttgattaatttttcttcatagcatctatccttacttgactttacatcgtaaaagaattatccatatcctccagtatattgtaaacttcatctaattcctttactgctggaggatataatggttttctctttaatttaaaaaacaaaacaaggccaggcgccatggctcacacctgtaatcccagcactttcagaggcctaggcagtggaccatgaggtcaggagatcaagatcatcctggccaacatggtgaaaccctgtctttactaaaatacaaaaaattagccgggcgtgcctgtagtcccggctactcgggaggccgaggcaggggaatagcttgaatccaggaggcagacgttgtagtaagccgagactgagccactgcactccagcctggcgagagagcaagactccgtctcaaaaaaacaaaaacaaaaacaaacaaaaaggccccaaaaacaaacaaacaaaaaaaacccatccgaatggttttcattatttttgtgtcacctttcctcccagcatcttttatttatgtaacattcattctatttataaatgtgcatggctttgtccttggctatattaagtatatggccaggatggagacataagagtttggcttgttgaatttataaatgtcaaaaagccaggaaggaaagctaatcccttggatgacagaatcatgattcaagaagatctcaagttttaactatagctacgttcacggagatgaaatttaataggaggcaatggtaaaatactggtttaaaaacatcacctgtgtgtttatacacaatgggagaaatctagctaagtgtaaaaatgttggtttatgttgactacatcagtggtttccagaccaatttttcagaaaacaaattaagaatcaacataaggctgccaactttttattggttaatcaggaacactaaaataaaacaaaaccccatgaccaacatcaaaagaaacttaacctatcattacttaataggtgttactaacactatcatttaataaaggccatttatgaacattagaaaaggagagcaaaatctcaaaaaatagtaccttgaattacataaatataacttgaaaagccatgtaacatttctctctctctctctgctttttgctttgaattagcagagatgactgttgttaaagagttgatacaattttagactttaaacacaagtgtatggcttgaaataaggaaagggacaatttcactgcactttgcattcagaccataactgcagaattaaatatggaaacaagatcagaacacaaagaatagcactgacaaaactgattgaatccagctgagagatgtgagggatggcaaaggaaaccatatgaagttggaggtgtcctaacatttagacaagagaaaatctagctaatatattgagaaaaaccttacttcatcttactcctaaagactgaattgcaaccagtgggaagaagttatatagtaaaagcagctactagctcaatttaagtgagatcttcctattacactttttggaagctaaacaggctttcctatgcccagggaagggtttgtggagaagttggacccaataacatctcagagatattagtagtgggtgatacattgtatgagctgacttctaaagttcccttgaattctaaaattttatgaaccagagtaaggaaataagtggtaccctttaacttactaaaaaagatgagtagaaagaattttggctttagccaaaaagacaaaggttcaattataggccctatcacttaggaatgtgtaacgcagaggcaaagttattcactaactctatgcttcaaattttttcaatgtgtaaaaataataccttaatttagaagtttgttgcagaaattaaatacacacacaccacacacacataaacttcctggcacctaggaaatgttcaaaatttggtaggtattattcaacgattcaataaatattgtgtttcaaagggtaatattttctatatcatttattacttatggatatacttaaaaaatgacttgttctctgctatgtgtcatttgtttttcagacctcaacaatgcatgcttgggattcttttccacttctatactttctgcaattcctgtttgtatgtaagtagattttatgaggttttctttaactttgcttttgctgttttgtttttccacctttatttgatataaaagtgggctttaacagcaacacacattggctatgtcactggctttggctaaaacatttctgctaaactggacaatatatccagtttaatcaaccacactaccagacagatgttttttatctctcacaatggctaactcactgctgaacactcctttatgaaatttttgagtaagtaaataaaaacctagggtatctgattagaaattttggttattaatgaaataaagatatttcttcccatcaaaagtatcccatttcttaatgaaacagatcaacactgaatgctccagtcaatactatctactcaccaagcattcttcaaatggcacgtaactgctcttttgttatacttccagaataatttgcaactgtacagatactttagttagcaattaaatatcaggttgtctgtcagatacttagttgaagagtacactgcttaacatcccagtgtttgggacagataagaaagaaaagtctttacctattaattagtatagaaaaaatatttttcaggaatacaattttgtggaataaaaaacattttgacaaaaaagcttaagcatatacaatatttagtactagatgagcattatctaattgcaatcagatacaataataaaactagttctttttttcagtagataaaaaggaacaagaaactgatacttggaacaaatcaaataaatcacgaagcacagaattttaaaaagtaccataacagcattaatatgcagaatgtatgctaaggtttacagtataaatttcactattctaatgttaaaatagggaacaggcagattatttccatacaaaataatctcagaacacaatgaaatttaccagtaaaatacatttaaagcatgattgaatataatcccacatactgaaatttagttacagatttttaaagttgaaatttaagataaataataaatcctttaaagaagtctattaaaatgcaacgtaaaattaaacgattaaaattataagggaagaaaaaagcactttatggcaaaatcaacccaataaaaaacataaagttaatatatcttaaaatgtaaattctagtttaagttaaaagtaatcactaataactcattaatgattacaactcattaactgtggcaaaataaacatcataggttcttgttatgcggaaattttatttttaacacagcctatagagttgatcatcatactattataaaatactattgattttcaagaaataatattaaaacctaccgttaagtagctaccattaggtagtagggaaaacactgcaacacttcgtttttatgaaaagcacatgttaggacatctttcctcatgtagtaagttactttatgaaagtaaaggtccattttaggaggattactacttttacatcacaaaggcaagaactagattaatcacggtgagaatcaagttcagtgatagtcacagcctactcagggagcacatagagaagctttccatacattttcacaaggtaaaagggctagggggacacaggaaagatcactctgcagaatggaccttgagtttcgtttggctctgccttcgattaactgtctggcttgggcagacaagtcagttaactttctgagttttagtgtcttcctctgtcaagtgcacttgggctcttccgtgttatctacaaagttaggaagagctaaaggcagccctagttttactttttaaaaaataataacagaaaaatacataagttgctattcatcagtgtactgtttccagagctgaattcctaagtctctgaagcatacccagttagggttataccagtgaagatccagatactatagtcataatgtcactctctcctctcccattattcctccacctgctcctccccatcctgctttattctctcttctggtgtgttttaagaagcaacgccagcaaacggctgcatacattgtaagcttaaggattaaatcattttaaaatatgcattttcaatcaaatgtatcatctgcttcgccaaattcctcccaaatggctgaattttcattaagagaataaaaatgagttaacaacttcggtaacagaaatgtactgggccagttgttttgtttgttttacttgcttaaaaaataaacggaaagatgtatccattccctcaggaacataaatgcattacctgcccaatgaaaaaacaattctgcttgttcatttccctgacacaacagcttcgttgtcaggccctctctagcccaggctccaacgtcacctagtaattttatattgatcaccttggcagtgcttggactccagcaggcatagtccctgtcttccttacattcctcaaaataaataaataaataaataaataaataaataaaactctacgaaacaccaccgaacagagattctgtgacttagtatacaaatcccacgtcttcccgccctgtgttaggcagctgcaaatgttattttttcatcgcttgcataaaatggaagcgaaacgtaccaaaaccctacatctgaatcctaggacaatgaagccgacaggaagccactctctcctcccccgggtttactacagagccagagcctccacggggtgcagtcgccaggcagggtgcatgacaccgcgtcttccacgccctcccaacgcgtccaaaaggttgctcgcctgacctcgccaaccgcctcacaccccaaaaccaatcacacaaaagggattggcccggggagctgctccaatgggggaaaaatcccttccccagcggcagcgcagccattccctccaatgctccgcccgcacccctcgcaaactgctacggcggaggggggagggctgcacaaagccagtcgaaagctgaaaatgattcaatgcacttaggggatgcggaggcggcagcaaggggctcgggaaagccggggggccgcaggactggagctccggggggcggcgggtgggggatgggaagggtggtcccgtcaagccccgggtcccaggcgggcagagggtgggggtggcggcgccgcgcggagcacccgggaagcgcccccttcgcggtccagccccgcacccccgccccgcggcgggcggcgcccgagtcctcgccgcaaacccgaggagcaggatgtggaaagcagccgcggcggtggctgcggctgcggcgcctacaccgagcagccgatcgcatcacttaccccttaccgtggagagagggaccggacgggggaggcggggcgcgtcgcgtcccgtgagtctctcgcacgccgtcctccccccacctcgtcgtcgtcgtcgtcgccgctgttgtcgtcgctgccgctgcggtcgagctccggggccctcagctccgctgggcaataacgttattccacacacgccccacacatagcggtaacggcaaagaccgactgcctagtgcgcaggcgcctcgggaaagggcgaggagccggaccctatcccctcctgcccagttccaacgatcccttactgcgcaggcgccacacacagacaatgaaaaggggttgtgcgagggtctcacccacacgcttttccagcttgcccactgcgcaggcgtgccccgaaagaccagcttgaacaatgaagaggacctcggcgttaggtgggaccgcaaccaacaaggactacagttcccagcgggcagagcgccaactccaagtgaaggtccggttgctgggcatgctaggagttgtagtgtcggccgcctttacaatctaggctgtttggaagatttagagcttctatttcttgaagatttattcgaccgttttaaaaaatctcgcaactgaagcagggttcagagtttactatctgcgtccttgagtagcctggggatcaactgctgcatattagcaaatttcgaagcgtcaaggccttcagtgagccctttctgtcatttgggtggtccaggcagctgaagagtgggatggaggcgggactaaaccaggctgggctggaggaaaagggcggggcctgcaagcctgtctcttggcagcaggctctggcagccaaaccgtccaagctagcgcctggagcgcagtggtttctgggaattgtagtgtaactggaaggccctgaggattgtcgagcttgcaggttctgaacgtgaggactacaactcccgacgtgcaaagcgagggccagtgggtgggaagagcccccaagagctctgtgcgggattctaggctcccctgtgacagccgcggcaggaagcaggcgggcgctccccggccacaggcctgttgttctcggaagggagaaagctggacatttccccacgtaactcccagctctgggcctagagtgcgtgcatggcgaagtccccggagaactctaccctggaggagattctggggcagtatcaacggagtctccggggtgagttgctccaaacctctgtccctagccccgaggtgcccagggcctagtgggcgggagcagaccaggtgcgtttcctaacacctgggttctgccccgtccacgctacagaggagcaagatggatgttgctgtggtcttgaggaggatgaaatagtttgatttagtttttacagttaagcaacgatgtttcctcagattcccgtagttacctcaatcaactccttgatcttaacttggcatctttctcaaccggcgacagcagaaactcttggatagctctatgccatttttgttcagttcccatacgttgctatttaatccaataaaagtctgattcacagtttttacacatttaaattatggcacagtggattgaatgtgatttatgggatcagtggggggaaacactaataattattttaatcacaagagcccccttttaattgatttaggctatttacatacagtaaatcatctgcagcttacaccaatcgtgtgaatattttacacatggggaaagcgaagctcagagaggttgaattacaggccagagcccacacagctggttagttgcagagccaggtattatcaggcttgccttcaaagcctatgtttgtatttactaatcaagccataattactattatcaaaaccttattaatttagattttcttaccacattaccatatgagcaagtatctgtacaaataatgtctgtatttattttcctttaagctctgttggacttaatgtctgtacttttagatggcgctgtcaacttggacagcatatataacatctagaaatttcgattctgttataatggaagttatggaattgtccatagggttattgtggggagcaaatgaaataatccccataaagcagtgattttaagacttcttaaaatgtttacctatagtaagaaataaattttatatgggacatatgtgtacatataaactataagtttcactgaagaatttttattctactaaatgtaataaactctgctttctattctgttgcattttcataagcctctaggtcatgactgtttgcgacattgagaatactaagttatgaagcatgtgttgttctgcataatatgcctactatgtgtcagtgcctcctactatgtgttaagcatactaggtgctaggcatgcagtaaggaacaagacaaagttcctatccccatggagcttctggattagttggggagaaagacaaaaaaaaaaaataattatagattactatgatagaaagtaagggtaaagatcagtgcttactagacaagcactcattaaatgttaattgttatttatacttgttacttaaagcaaagtgaaggtttttcaatattagaaagtttatcttctcatgactctagattttataagggttactatgtattgttacatctgtcaattgtgttaacaaactgtcgacattctcagtattcaaactgcaggagtaaaaaaatcggttttaatgaacaccttcctcaacctactgatgtttcaagagctgttagatacaaaataagcacttctaacttttcatttggaagcaagaaaaatactgtgcacaatgatatgagtaattgtaatttttaagattggcaaaaattttttgttttcattgaaagtttttcctgatgcttctcttcctttgaccttattttaagtctttatataattgtcggaggctgtttaacattaggcattttgacgcagtaaaggggttcattttaaattaatgttatagtaatatgtttaatactagtggtactgctttcaataattacagaatgaagggttttcatttaaggataatacattttaaaattagtttgaaataaaatttaaatttagtgtgataacaatataaggtagtggaaacatttcaccaagagcaaatacgaaggatagaaaaagttaaacaacttaaaaaaaaacgtattcataattttaacagtgaatcaggaaatgtaacctgaaatgtttatgggtttttcaggacatatcatttatttagtagcacttttatttttgtatgttagcttatataacagcttctggaaggaaacaaaacagaattaactctgaacttaagtacagtcagaagttcttcacaaatataaattgctatttttgagtagtataatttatttatttagagatggagtctcactctgtcatccaggctgaaatgcagtggtgccatctcggctcactgcagcctctgcctcctggattcaagcaactctccagcctcagcctcccaagtagctgggattacaggcacgcgccaccatgcccggctaatttttgtatttttagtagagactgggtttcgccatgttggtcaggctgctctagaactcctgaccttaagtgatccgcccacttcagcctcccaaagtctggggttataggcgtgagccaccgcgcccggctgataattccctttaaagtaaagtattctgttccttaataaacaatgctggagttatgtggaaattccttattttgagtgtgcctaataatttaagaattgtattactatgtagtaagataaaatgcagtttaaagttctatgtcttattttgttttggttttgttggtttgtttggttttgtctacccaccattacttccccaaatgccttgcgtagtttatgattaatggaagcctaataaacagtcttggtctttcctcaccggtttttcctctagcttgtaaataactgcacatgtagtcactactaatatcccttcattgatattcagccaggaagtggccgcataaaaatgcaaaatgctttccctattttccgtgatcgtacttccattttaaaaagatcttttcctggggccgggcgtggtggctcacgcctgtaatcccagcactttgggaggctggggcgggcggatcacgaggtcaggagatgggagaccagcctggctaacacggtgaaaccccgtctgtactaaaaaaaaaaatacaaaaaactagccgggcgtggtggcgggcgcctgtagtcccagctactcaggaggctgaggcaggagaatggcatgaacccaggaggtggagcttgcagtgagccgagatcgcgccactgcactccagcctgggcgacagagcgagactctgtctcaaaaaacaacaaaaacaaaaacaaaaacaaatttccttatttctttaatgttggtactattatggtatatcaaaatttgaagttctaatgtgaaaactgagtcagcatttactttcttgtttttaaaatgaggttgggcgcggtggctcacgcctgtaatcccagcactttgggaggccgaggcgggcagatcacctgacgtctggagttcgagaacagcctgagcaatatggagaaaccctgtctctactaaaaatacaaaatgagccaggcgtggtggcaggcgcgtgtaaccccagctactcgggaggctgaggcaggagaattgcttgagcctgggaggcgcaggttgcggtgggcggaggttgcagtgtgctgagatcgcgccactgcactccagcctgggtaacaagagtgaaatcctatctccaaaacaaacaaacaaaaaaagatattttcctcatttctttaattttggtactattatggtatatcaataatttgaagttgtaatgtgaaaactgagtcagcgtttactttcttgcttttaaaatgagatccttgcctcattttgaccttgatgatcttggagcagctccacattcacctttcatccattcccttacacttttcagtggatttgctgtttgacttctctaaagatatctcttgctttgggtcgcctatgcccttttacaagaaattggagacatttaatgattcttcttcaaaacgagagttctggcagaaaaaccggaaggctttgttgcccccacagatctgttgtattattcctacatagtaaatggtctgaaagtttccagtgtggttaaaagtgtatgtgtcctgggtatcctgggaaccacagaatttaatctagaactggaagtgatttgggaggtctcttggcagtaaggttaggtgttcatttactctatgggtagttataattcaacaaccacagaatggccgagaactacatttgtaagtgggcaagatagcacatgcgccttctctaaattcaatacatcgttgtataaagccaagaggtatgaaatgaactatttcatagccaagaaagggtgaaaaaagccacaattataggcaatccaggctctattttaagtactgcacacttgagtgtaaggggatatcagaaaggagaaaaattgctagaaatgcagtattttagccttaataacagaatcatgtctcatctcttgctgcagcgttgggaatagataacaattttatcaacaacacctgtatacatgactcacctattcacctcattcctagccacctttggttgggtgagtataaggaaaaatgaaacaaacttcttgtatgacaggaactcatgattttctatatacattttgcattctggttttacctttttctgtcaacattttggtgtttcagcctttagatgaatttatgggaagagtgtggtggggtcagaggagagaatgtggagctgggagccaggtcactgcacttacttttgctttgctgacaaccatctgggtaaccttaggcaagtgaaacacactgttcttggattcccgtttcctcaactgtaaaacgaaaagtttggactggatgtgagaattattgcctttaggtgccaagcaaatgatcaaaaggtatgatggagtcagtggaagacattaagggaaatgatgaggcttatggccaaattgggcagtttctgctttttctaaaaacatttcaatttcttccttgctccctccctctttgcttccttttttttcttctctctttttccctcttttcctccctcttttcttccaagaaggaagccaagcaaaacacacccagagcctgattcccctttagacaccactctctgaccctttgatcattaatgttccttccatcagcacttgtttggaccagatgaatgattaagggctatgtttttgtcttatggaaatgagagtaaggagttgaaccaggtacacagaaagtgagaggatgaatatgagaagaaaatatataatctcagggatgggccttgtctttacgaattgatgtagttcaagaaaaccaaagataaggttgactttctatgttttgcttgtatatgattagcacatctatccaaatcctgcaaagtggctcacaattgtagaagggctgtgttagtcttactagccaacaatttggtcagtgtattagccagcagtgatatcatctggctgtcttaagaaaacatatgtgtaactcaaataagtattcctgttttcttataaaacttgtatttcttttttgcttttctcaaatattttctggatttttaaatattgtttgccatatgcactatataggaatatacacacataaacatgaggggttttttgctgataaaattcaaattatacatattcatcttttgttttatatattcatgtggcttttctttttcttttttttttttttttaatctcagctcactgcaacttccacctcccaggtttaagcgattctcctgcctcagcctcccgagtagctgggttacaggcacgtgccaacacacctggctaattttgtatttttagtagagacggggtttctccatattggtcaggctggtctcaaactcccaacctcaggtgatctgcctgccttggcctcccaaagtgctgggattacaggcatgagccacggtgcccgactttttttttttcttttgagacagggtcttattcttttgcccaggctggagtgcagtgatgtgatcttggctcactgcaacttctgcctcctgagttcaagcgattctcctgcctcagcctcccgagtagctgtgattacaggtgccaccaccacgcccggctaatttttttatttttagtagaggcagggtttcaccatgttgcccaggctggtctcgaactcctggcctcaagtgatccacctgccttggcctcccaaagtgctgggattacaggcatgagccattgtgcctggcctcatgtggctcttcttagtgcctttaacttttatgatcttttattttactagaacttaaaagtacaatctcaatttttctttcctactactgatgagataaaattggcaaaagacaggatttagcaaccagaaaagaaatgagtgttctacaagtaaatagtcatccctggaataatctaaatcaaaggtatgtttcagtgttaggagattgtaggggtactttttcatgttctttgtcagaaataggtatagagtaagtttttttcaaactattgagatactgagagtaataatattctctcctgggatgtttaaagacttatggtctgatcacattgccagtttgtgctaagattttcaccattttacttgatgataactcttctcagagtccaaaagtagacaaggtagctagaaatgcccttgtgcactggctgaagcaatcctgatgatggcggaacttcatcaaagcccactggatacttaaagggatggccttagggcaaatattgcttttaggccctgaaacaaaataaagctaaatatgaatctgagctcttgcttctgatagatataacacctattcctgacacctggatcagatgtgtcccatcatggcactgtcggtctcaggctgtgtcctccccaccagcactcctgtggcagaatagctcactgtcacgctcattttccatcaagaggcggcaacacttacaatgtaatgtggtcagagtgatagcaagtctcccctcaacactgaaaactcttgttttattgatctcgttttattgacttgaaaactgtcttgttttattgatttttttttattgtcacaattgggggtggagatgagtgctgctggcctctggtaggcagaagccagggatgctattaaactggcacaacacagccccttccaaaagagaattatcaggtccaaactgtcaatagtgctgaggttgagaaatcacgatctagaagtacaggctttgcttgtagcccttgatctgcaagaatcctactttacagtaattacaagtaaggatatacagattgtatttgctggtgattttacctatgttctttgccagcctggctaggtttacttcttttatcagtggaaagtgacaggtgcatcagtcctctccactgatgccaaagaaataccaggtgtatcccttagaatgcatatagccaatctcctggatttgccaacacccacatatctttaatggtcttccagacattgctttcttaagatgtttacattctttatcagattatcttttactcctggcgccaaccactttagcatgttttcagttattagagtcttaggatagtattttctttgagattcaaacaaaaaagtattctacatagtacttgtaatctctttcacaattgtaattgcctttcacaaagccgacattgtctgattttttgattctgctgtttatatcttggtagtgttacctgttggtcccctagtaaacagtgacagcaatcttctgaaccaggctgaggcccagtcaagtgtagatagacatgtatttcttatctcactgtggttttatttttctgcatgtctgccctaatcaaagcttgtgctgggagctgcagtgcatctcatatctcggcctcgggaggaatggttcattgcatattctctcagagacagctgggcgcttcgcagggagtggtccccctccctgtcaccagggcaattctctttcacatctcccaggacagatggagaatgaagaaattaataattcatagtgtgtatttaagtggtgattcttcctagactgagacatacttgcattttgttcaaaaacatcttgatgaagacaggcccagtggtgacctaagagttagaacataggaagtagggaaactcttactaagaaaatggacaatacaggccaggcagggtggctcacgcctgtaatcccagcactttgggaggctgaggcggaaggatcacctgaggtcgagggtttgagaccagcctgaccaacatggagaaaccctgtctctaccaaaaatacaaaattacccaggtgtggtggtgcatgcctgtaatcccagctactcaggaggctgaggcaggagaattgcttgaacctgggaggcggaggttgcagtgagccgagattgcaccattgcactccagcctgggcaaccagagcgaaaactccatctcaaaaaaaaaagaagaaagaaaatggacaagacagactgaaattagctagcagccattagctcaggtaccttttaagtgctcattgtactgattgatgtttggatagtgcattagcagaaatattatctacttgcacttacgttcatgtgatctgtaggactcaggggtcctgtttgtgtctgtagtcatagttaagtttatagtcagttcctggttggtgctggggaaaagaaatcaggatgcattcattgtgaaatacccttactgtcctctcaggagagaagaggaaatgagtgtgttctctctcttggttagaaacagataaagctgtgtcccattagcagttggataggaaacggtaactggaaccttctgtctaatctggtttccttaaatgtaaggagcagataactgcatctggggagtagtgctcttaataaggattatgggggcttcagttgcaatggctccagttgaagagccatgggatttcatctgtcctgaatcatctgagtgttattcttcttcacattaactgtgtttatctgttatagtatataattatgctggtttgttatgtatttgaaaagcacttagcatgttttgaaatgtagcgttgaaatgactttaaaatgtcaactctgtagttttagttttagggcacagttcttgcaaattcctgcttttcctctctgaccctagtaactctgaaatcagtagttgcaaacaaacaaaccctaaagccttgtgtgtcacttttctttgggatagttgttgaattcaatagctcattatttcacgtaatattatgttcatagtgcaatttaacatgtagtctttgaatgttataaattctaaaagattaaacaagaacattagaaaaggaatgaaaagtgctcttaaaatcctgccctaggccgggcatggtggctcactcctgtaatcccagcactttgggaggccaaggtgggtggatcacctgaggttaggagtttgagaccagcctggccaacacggtgaaaccccatctctactaaaaatacaaaaattaggtgggtgtggtggcgcatgcctgtaatcccagctactcgggaggctgaggcaggaaaaatgcttgaacctgggaggcggaggttgcagtgagccaagatcgcaccattgcactccagcctggggacaacagggagacttcgtctccaaaaaaaaaaaaaactcctgcctttcttgtaatctgatgaaagaactctgcctacagaggcttttaactatgcaaattctttccatattttttttctttttcctaatatagtttattagcttttactcagactaggtataaataaataattatcccttgccttagaggtgaagtcatttgaaagctccatggaatacatttcttctttaaaaacgcaacaaaaattttttattgtaaattgacaatttataattgtataaatttatgggttacaaagtgatgtcataaattgtggatacaatgtggaataattaaataaagctagttaacatatccaatacttccaatacatttctgtgatgagaacatcaattttgaaatgtgtaatactccattattaagtatatgcaccacactgtacaatagaactcaaaaaaagtataaaacatattcttcctgtctgagattttgtaccctttgaccatcactgaatttttttttctttttctttttttttttttatgagacagtctcactctgtcacccagcctggaatgcagtggtgtgatctcggctcactgcaacctccgccccccggcttcaagcaactctgttgcctcagcctccccagcagccaggaccacaggcacacaacaccacaacctgccaaccttttttgtatttttagtacagatggggttttgtcacgttgttcaggctggtcttgaactcttgacctcaggtgatccacccaccttagcctcccaaagtcccaggaccacagacatgagccactgtgcctggactaaaatttttatgagacaaaatatcaatttcaaaacagcatcaaaaagtgagtaggccaggcacggtggctcatgcctgcaatcccagcactttgggaggccgaggtgtatttttctgtactaaaaatacaaaagtatttgtctctattataaatacaaaaaaaaaaaaagaaattagctgggcactgtggcacatgcctgcaatcccagccactcaggaggctgaggaaggagaaccatctgaaccctggaggcagagccacagtgagctgagactgcactacttgcactccagcctgggcaacaagagtgcaacttcgtctcaaaaaaaaaaaaaaaaaaatgctgggcgcggtggctcacgcttgtaaccccagcactttgggaggccgaggcaggcggatcacaaagtcaggagatcgagaccatcctcgctaacacggtgaaaccctgtctgtactaaaagtacaaaaattagctgcgcgtggtggcgtgtaactgtagtcccagtttctcgggaggctgaggcaggagaatggcgtgaacctgagaggcggaggttgtagtgagtgaagatcgcaccactacactgcagcctgggcgacagagcgagactccgtcttaaaaaaaaaaaaaagaaatatacatgataggaattccaggaatcttatggattcttcttttaaggtcccggtcactgggcgtggtggcttacgcctgtaatcccaagacttttggaggctgagacgggcggatttcacctgaggtcgggagtttgagaccagcctgaccaacgtggagaaaccccgtctctactaaaaaaaaatacagaattagccgggcgtggtgacaggtacctgtaatcccagctattggggaggctgaggcaggagaatcgcttgaacccgagaggcggagggtgcggtgagccgagattgcgccatcgcactccagcctgggcgacaagagccaaactccctctcaagaaaaaaaaaaaaaaagtcccggtcaactgtgggcacaatgtaacacttacacacacttaggctgagttactctctgtactaagcagtcatgtgcataggttcctgtgtgtgtacatggtaattgttcaaatcttggatccttggcgatccttagagccactcaatacttctgccccaatttctcaatttcagccattacacaatcagttatacaagggatacacttgacatgcagacagcccatcattgactgcactaagtccagtttggcttttatggaaaagttgataaagttggtatcaacgaggatgtggtaaggtgggcccagctgtgtattatattggcaaaataatcaggaaaggtgttgcggaacttctctttcctttaacgcgctgggatccttcttttctttctctttaggttttaatctatccttttctttaagcctctgatctctgagactaagcgtttgcttcatggttgtatagttcctcattttcttttgcttcctcatggtcacaccacactcctgtttcttccgtaatcaccaacggtgcaatgcttttacctggaatacatttttatgttagtcaaactgtctcgttcctttctaatagattcaataaagataagtgttttattcgtggatttaagggcataaatctaaagctccatgaactgaattgcttatcatgtaacactttgattttccttttccatgaccaaatcgcttttctattctattttctaatactaagttattgtaaaactatcacagtttcatatattcccaaaaccaggaatgcgtcttatctgaacttccttaaactcatgatgagtcagaggaggccagttttcattagtaatcagcgccaaattcatttcaaagaaagatctgtgtggacataggattggtatggagaaaaatatggtgataaattaactgtgtctcttgtatagttgagtaatagaatttcattgtcgaaccctgacctgaaatacatgttttcttttatcaaagtagaaaatgagttgctgcaagtaaagaaactgtattagatattgtataacagagactttttttttctattaagtactaacattgcttttgtttctgttccaaactttgaaatcagtgcacttggacaaaatggaaactgcttttcaaggtcctacagaatatatgtttataaatgtatttttatacatggttggtaatgaatcaggtctctttcgtgccattgcagttagagggcctctggtgctggagtcctctggaggactgggctgtcagagtggggcagcggggtgcagcgcggggagggcttttctctttcttcgtgcctctggtgctggagtcctctggaggactgggctgtcagagtggggcagcggggtgcagtgcggggagggcttttctctttcttcatggggtctcagggcctctctcttcctctccacgtatgctcttcacaggtctctccagcagggtagtcagatatcttacatagcggcttagggctcccaaaagcaaacattccaagaggaagcagaagctgccagtccttttaaagatgaggcttgggtgtgacatggtataacttttattgcattctattggttaatgcagattacaggcccagtcagtttcagattagaagagaacaagggaatgaggctgggttccttggaggctatttttttttttttttttttctgaaacagtctcgctctcttgccaggctggagtgcagtggtgcgatctcggctcgctgcaaccccttggaggctatttttagagatgaactatcacagtaatataccttaaaatacttcattttagacagtttttgtgtgttctaggggtggtcagttgcactaaccaagaatctatgaggtgtggttggccagcagtatatagaaagagctgtaccgccggggctgccactataagcacttcagctatgcaaattttgatcaaaactaggccagacatgtggatgtctcttggtgggggagggatttcctgtccccagggacaatgaggcttccctaggttggaactgggtgtgacgcagtcccttttgctggctcttcccacctccccactgctcctttcgtccccctctgtctccaagttggtaaaggagtcaggcatggtgggaaggagagcacttcccttagcaagttattgtttaatgggagctggtgggaagagttctgtcatttaatccttgccggtggtgctatatgtagtgaaatcaactgctacagtggtaggggccttagagatcatcaagtcctacctctaaaccatgaagttaatcttctctcaccatctttggcacatccctcagcaagctagaaacagaactctgcgttttttccataaagtacgagaaataatgatttcacctttaaaaactgccttcctgagtaagtgtccgtttggtcaaccagactccatgggtcctaactttcgtcaggttgttcttgcagaacatgccagcagaagcattcaccaactgacatgtgccctgaaagaaggcgatgtcactattggagaagatgcaccaaatctttcttttagcaccagtgtgggaaatgaggacgccaggacagcctggcccgaattacaacagagccatgctggtgagtgtgaatgtcaatcctagtctgaatgatgcatagtgaattttttaaactccgtagaataataactccattcattcttcattctgctgctatgatgttattcctcaaacacaaatcagataatttaattccctcgcttaatcttgttttcctttgacttcccaatgcttataggctaaagtccaaaattcttagttataaaataacagtgttttcctaagatagctctaacctgcctcttcggctcatctttgtgtacttctcatgctaatcatccatctcacaactcatattctagttataataacctcctctctatgcttttatgctttgacatgtgcagtgacttctaactggaatttttcttatccttttctgcttggtgaactccttcctgtttatccttgcagtgttatctcctctgtgaaaacaagcacaattagcttcttcctcttcttgtagcactgtgcatagctttaggtctacatacaaacttattttatatctattagtgtctctctcttccttgctagattcttagctcttaaggggtagaaattctttttttttttttatgttggtcttgtatccccagttgatagcagaattcttgatgcataatatatcagcaatttttattagttggaaggatggatgggtggtaagaaaccatggatctcaaataaggttaataaaccctctgcttttgctctatagttaatcagctcaaagatttgttgcgccaacaagcagataaggaaagtgaagtatctccgtcaagaagaagaaaaatgtcccccttggtaagtatcaacttttccaagttgacaaagcattcctgtgttttactgtattgtgttattttgtagtacatgttgcagaaaaaatttaagcatggcatactaatagtgaaaaacattaaaagtaattctcttccctctgattattttggctgaaaaaatagatttccatggcagagggaatcttgattttttaaatttattattcacttggaaaatgggagcaagggaatagtttggagaatttattttgcaactgttagcaaaatatgtaatataaatatataatatataataaattaatataataaattatatgtcagaatatatgtaaaagataaagtcattattttagtaatttcttttttagagggtcatatctattattgatcatttttagaagttacttaattataattgtagccctactttgtaatattttttaaattttgagtgtcaaaataatacattttatttttaattaattaattaatttttttgagacagagtctcattctgttgctcaggctagagtgcagtggcatgatctcgcctcactacaacctctgcctccctggttcaagcgattctcctgcctcagcctccctagtatttgggtttacagatgtgcactaccacaccaggctaattttttgtatttttagtagagatggggtttcaccatattggctaggctggtctcgaactctgaacctcaggaaatccatcagcctcggcctcccaaagcaccgggattataggtgtgagccaccgcgcctggcctcaaaataatacgttttaatatgtaatgttctatatgttaaaatatatggttataaaatagtatgatatataagaagtggtgctgtatttcttctgaagttgtttgttattgctttgacagagtgtattatttctgattaaagcattttatatgctaaaggctgagatagatgtgagtgaaagcactctggaccagatttaagtggacaaaataatagtcaagggcttagttctatctagggtctatcacatactctctaagatattgtgcctgtctcacagagtttttggaataatgagataagattacatacttaaaattctttagaaacctatgaagtgttacataaacataacatgcatagcagcaagtaaccacctcacattttcaatgtgttttctagttcaatacaatgcctgtatgctgaaaagtgtggagacatgtcactttcttttcttcaccactgaaatatcagagtatcactcccatacgaacactccattccaggctgacacatacttttaagcttaattcctactttagagaaatgtacttcatatgcatattctaaatttatagatacagattttataattttagtaaaacatctcatcatttaatgaatttattactattgacatctggtttctagcttgctcttaagcacagactggtggaatgcttttaaatctactagatgaagttgctttatctgttgaatgctcagacatgcttatttgccttttaaagtctgagcagtgatattatggagcttactgaatccagacaggcaggaagaccttcactaagagaatcagtttagtacatacagagtgcactttaaaatacacaagtctatttatatggagctatgtaaaagaatggaacttagactctatatgtatacagcctacatgtaataattataaaccataatagtaataattagctttttaagattatacctttagaatgcactttcatagccagtataacatattagaaatacatgcatatattgagagtaaaactgaggcactgttgagatggaaaaaaagttattacttattgtcttaaaatgtagatatctaaactaaagcccttcaaagtagacacaaatgatttcatgtgaacatttttcatacaatattggcttgagctttttatttttcacattgacttcctcctgtatactcatagtagtaatttatatttgcctatcttctgaacctattgctattaatggaggatgattataattgtttgatttctactcaggacagataattcatttaattagagttactttggtttttaaatttcttaaatataccaaaaaaccaaagctctattttattttattctgccatgatagctggtacttgattatcatttaaaatgtctgctgtgctgagaaagagagtggctgagaaacagacactgtgcctcatttcaagctttcctctggctttgtttaactggttgacccttgttttaccttttcctgatttcctcatcctttaaaaaaaaaattatgtgatgggtatatgattttacaaactattttaggataaggtaagctatacattaacagtcagttccaggaatgctacagagctaaaatagcattagcgtttttttgaaatctcttcgttggacccctcaatgcagtgtgtctctactttagggttctactcttggaggttctatgctccagaacaccatacacttgaattgccttcaatactagagccaaaaatcaaaaactacattttgctaatgtatcttttttgagatggaatttcatcgcattgacactggcttggcatcaaacgcttcctaaagaatctctccttcacggagctgctgcagttttagctagcaaatcctcttccatggcagtttcttggagagagttgtcccttgtatctcagcattactgaatggaatgttgtttttccaatttgttaaaatagtttattccaagccagttatactactgctaccccagcatttttccattcactatatgtgctttttataaccactttcaccatccatctttaaaaaaaatgatattcacatccatgaatcttgtgtatttgtggaatttataggatagagaagcaagtatttgtattagtccattctcgtgttgctaaaaataaatacctgaggctgggtaatttatttaaaaaagaggtttaatcagctcatggttctgcaggctgtataggaagtgtgatactggcatctcactctggtgagggcctcaggaaactttcagtcatggtggaaggtgaaaggggagcaggcatttcatgtggtgagagccagagcaagaagtgggagaggtgtcacattcttttaaacaaccaaatctcaccaaaactcagagcaagaactcattatcatgaggatagcaccaagattcattcatcatgaccgaaacacctcccaccaggccccacctccaatgctgggggccacatttcaacttgaggtttgtgggggacaagcatccaaactatatcaagactataagctacattgtgatcgattctatgtttatatcacatcagtgcaaaattgagtatggagaaggtaacaactgattctttgctaaatccaaacatgcttaatttggctttttaaaatttatgtatttatgtatttatttatttattttttgtcatagaggtcattagaacatgaggaaaccaatatgcctactatgcacgaccttgttcatactattaatgaccagtctcaatatattcatcatttagaggcagaagttaagttctgcaaggtaagtttctcattaagaatttaaaactaaataaatgaaagcttatattaactatagattgtattaaaatttgctgctataaatcttcatgtttgtagcaatacattgacaattgctattcttacgtgattgagagactgatgtgtcacaagagcttgtcagacttgggaatgatgctcttgaccataccatttctgattgcttgatttcccagtagttcattactatgtctaatgatttcataatatgctttcatatttcagaagttttccttctcaccccgcttgctgtagcccagcaaatggcaaatgctttggaatacaaataccaatcattctcccatacttgtcaacctactggagcagtggtacagcaatcagggattctaaactggtagaccaattcttctccgctgtcagtattaaggctcttactttgactttgaatgagaatggttcatagggtactgacagtaatgatcaagaaaccaaacacatcatatatagcttatgacactagaaggttatatgctcaactgcgtgcagtttgctaatgtcattaatgctaatagagccttttcatcttcccgaagtatgtcgtgttttacttttttttttctgtttctttctctctttctttctttccctccctctttctttctttctagtatcagtgtattcgattgtatgatatttttataggaatcactgatatctcttgtatcatgtttttatatatagtatatgatattatgtattatattgttgacattttaagatgcaaggccagtatgtaacttaaggaggctttagatgtttcactgtcctgattttaccggggagtttctgatcttaacatgtaatttcctgtttgttcttggaggacacagttattaatatacacgtggtcctggattaccagtaaagctgaaataatatcctaggaactatttcattaacaatactctattaatccctaagatgttgtggataaaacttgaaagatataaagcagaataaatttactatctagttgagaagacagaactattccctattaacaccataaggagcacattagagaacatagtataggcctttactttttggtataagctataattataataagagaagaaggttaggaaaagctactgtctttgggaatgtttctatgggagagagagatcttgaaccaatgttttttttttttttttttttttttttttgatggagtctcgcattgtcgccagactggagtgcggtgtcacagtctccgctcactgcaacctccgactccctggttcaagctattctcctgcctcagcctccccagtagctgggattacaggcctgcgccaccacgcccagctaatttttgtattttttgtagagacggggtttcaccatgttggccagcatggtctcgatctcttgacctcgtgatccgtccgccttggtctcccaaagtgctggaattaccggtatgagccacgatgcccggcctaaaccagtcttaaaggaataggatcatttagatcagcagaagggagatgagtttcataaagagaatggcaacagtgaaacacagtattcaggatgaatatggtttgtgggggccataagccatctactttatcttcctgcagtggagaatgtctcatagaaataatgaaagtaatcctgaactggtaaaatggaagattacggaagccttgactgtcagacagagtgtaaatttgatacattttagtaagagaagaatagaattaaaataatgtttaagtggtttagaaagattttgtttatttagttaatggactttattttttagatcagttttaggtttatagaaaggttgaatggcaaacacatagagtcctgtatcctcctttcagtgacatccctcacctaatagtttcccttgttattaacatcttgcatcagtgtggcacatttgttacaactgatgaaccactattgttaaattattattatctaagtctctcagtttgcattagctttgtgttatacattctacgaatttgacaagtgtataatgacatatatccaccattacagtatcatatagaatagtttcactgtctgaaacatcctcttgcgcttcacttattcatccctcttcccctccgccccttccctcccatcccctggcaaccattgatctttttactctctccatagttttgacttgcagaatgtcatatacttggaattattctgtatatagccttttctgactggcctattatacttagtaatatgaattcaagtttcctccttgtcttttcataacttgatagctcatttctttttattattaagtagtattcaattagatgaatataccatagcttttttatctgtgcacctatgggagggcatctttgttgcttccaagttttggcaattgcgaataaagctactgtaagcatttgtgtgtcagtttttgtgtggacatctgtttttacctctttaaagtaaataccaagaagctcaatttctgcatcatatggtaagactaattttaactttgcaagaaattgcctaacttttctaaagtggttgtaccgttatgcattatgcagtaaatgagagttcctaatactccatatcctcattagcatttggtgttgtcagtgttttagattttagctgttctaatagatgtgtagtggaacctcattgctgttttaatttcaattccctgatcacaaatgatgctgagcatcttttcctatgcctatattccacctatgtaacatctttgagtgaggtgtctgttcaggtcgttcacccatttttaaaatcaggttattcgttttcttagtgttgagtttcaacaattctttctgtattttggatgccagtcctttatcagatatgtctttttcaagtattttctcccagtctttgacttggcatttacttctcttaacagtatctttcaatgagcagaaatttttaattttaatgaagtttaacttaccaatttttttctttcatagattgtacttttaactttgtgtttaaaaatttattaccaaatccaggttcactatattttctcctttcttcttctagtattttataattgtttattttacatttagatcatgtttgaaggatagttgtccatatttttgggtctatttctgggctttcctgttccattgattaacttgtcaattctttggccactatcactctatcttgattactgtagctttacattaagtcttgaagttgggtaatatcagtactctaattttgttctttttcaatattgtgatgagtattctgggacttttgcatctccctgtaaactttagaatcagtttgtcgatatccacaaaataggatttggattggaattgtgttggatctattgatcaagttgggaataactggcattttgatactattgagtatccctatccatgaacatggaatatctctatttacttagatcttctttgatttctttaatcagtgttgtggttttcctcaaatagatcttctacaaattttgtgagatttatacctatttcattttatttttgaggtggagtctcgctctgtcacccaggctggagtgcaatgttgcagtcttagctcactacatcctccgcctcccgggttcaaacaattcttctgcctcagcctcccgaatagctgggactacaggtgtgtgccaccacacctggctaatttttgtatttttaatagagatggggtttcactatgttggccaggctgctctcgaactcctgaactcgtgatccacccgcctcggtctcccaaagtgctgggattacaggcatgagccactgtgcccagccacctattttattttttagtgtaatggtattatgtatttaatttcaaattccaattatttattgctaatatagaagaaaacaattgactttgtatattgaccttgtattctgcaaccttggtataagtcacttattagttccagcattttttgttgattctttgggattttcctcattgacaagcatattgtctgcaaacgaaagacagtgttattttctcctttccaatatatttagattttgtgttttttaaatttttcatttattttaattaattttcttgaggaagggtcttgctggagtgcacaggctggagtgcagtggcataatcatggctcactgtagccttgacatcctgggcgcaagtgatcctcctaccacagcctccctagtagctgggaccacaggtgcacaccaccatgcttggctattttattattattattattatttgtagaattgaggtctcatcatgttgcccaggctggtcttgaactcctgggctcaaacagtcctcctgcctgggcttcccaaggtgttgagattacaggctttagcaaatgtgcccagccagattttatttttttaattgtcttattgcattagctaagactttttggaatgatgttgaatggttgtgagaggggccatctttgccttgttcctgatcttagtgggaaactactttcctaccataaagtatattagctataggttatttgtagatgttctttatcaagttgagaatgtttcctctattcctagttactgagagtacagatgcctctcgacttaaaatgggattgcgtcctgataaactcgttgtaagttgaaaatgcattgaatatactatagattattggttgtttacctctgtgattgcatggctaactgggagctacagctcactgccactgctgctgcccagcatcatgagagaatattatactacatattgctagcttgagaaaataacaaaatttgaaacttgaattatggtttctactgaatgcatattgcttttgcagcataataacgtcaaaaaaatcataagtcaaaccatcacaagtcagggaccatctgtgtttatcatagatggctgccgcattttgtcaaaagcttttcctgcctctactgttaaaattatgatttttcttctcaacattgttgatatgatggattacattaactgatcctcaaatgtcgaaccaatgttgtgtaattagaataaatcttactttatcctggtgtataattcttttttacattgttggatttgatttgctagtattttattgaggattttttcatctatgttcattagacatattgatctgtaattttccactcttgtaatgttttcacttggttcgggtattaggttaatgctggcctcataaaatgagttaggaaatacttcctcttgaattttatgaaatatattatagataattggtataatttctttcttaaatatttgatagaattcactagtgaacttacctgggcctggtgctttctgttttgaaaggttgctaattattgatttaattttcttgataaatataggtttattcagattatctattcctccctctgtgagttttcatggattgtgtcttacaaagaattggtgcatttcatctaggtgactaaattcatgatcatggagttgttcatagtatttctttgttatcctgttttttaaacatttctttattatccttttaatgttcatgggatcagtagtgatagccccattttcacttctgatcttagtatatgatagaatctaattgatattttctctttttttcttaacctgtatatagtcttatcaattttattcatcttttcaaagacccaacttttggttttgttgtttttctctgttgattttctatttttaatttcattgatttttactctaatttttattatatgttcttttctgcttactctggaattaatttgctattggttttgcaacttctaaagtagaagcttagattatttatttgaaatctttcttcttttctaatttttttacactccttttgctgcatccttttaataagtatatagctttttatcagttgtattttaatttttacttagttgaaaatatttctaaatggctcttgatacttctttgattcatgtgtgtcatttagaagagtgttgtgtcatcatcaagtatttggggagtttcccagctatcgttctgttattgatttctggtttaattccattgttgtctgacagcatactttcctattcttttaaatttgttaaggtttgtacattgtagtctgtcttggtgaatgttctgtgtgagcctgaagaaaacgtgtgtactgctgttcttggatgaagtagtctataaatgtcagttagatccagttgattgatgctgttgttcatttcaattgtgccctttgtgatttttataatttttgacaggggatgttgaaatttccaactgtaatagtggattcatgtgttttcctttgcctcatacattttgatacacttttattaggcacatatacattaagacttgtaacgtcttcttggtgaatggacctctttatcatcatgtaatgtacctctttatctctgatcattttcattggtctgaagtctgctttgtctaaaattcatattgctactccaactttctattgattagtgttaacatgatacatctttcttcatttattttaaatctatctgtgtcttcgtatttataattggcttttttttttgttttgagatttctttttttttttttttggttagagatggggtctcactatattgctcaggctggtcttgaactcctgggctcaagggatcctcccatctcagcctcccaagtaactgggattacagatatgagccaccttgcccagttattataggcttcttgtagacaacatatagtttattgttcttttttttaaccattctgacagtctctatcttttagttggtatattcagaccattatatttaaagagattattgttatgattggatcaatgtataacacatttgttactattatcttcattgtctttattttttgtttctttaaaaaaaattcactctttttctgccttctctggcttttttttttttttttttagagatagagtcttgccctgttacctaggcagtgacgtaatcaaagctcactacagcctagaactcctgggctcaagcagtcctcctaccgcctccctgctgagtagctaggactacagacatgcaccactatgcctggctaatttttatgtttttttacagagatggggtctcactatgttgcccaggctggtggcgaactcctggccccaagtgatcctcccacctcagccttccaaagtgctgggcttacgaggtgtgagccactgcacctgtcccttttgtggctttgattgagcattttatatgattgcattttattttttatttttggagacagagtctctctcagtcgcccaggctgtagtgcagtgactccatcttggcccactgcaacctctgcctcctgggttcaatcaattctcatgcctcagccttcctagtagctaggactacaggtgagccaccacaaccagctaatttttgtatgattgcatttttttccaattcacatatcaattgatcaattgtacttctttttttttttctttgctggtagccgttgattgatgctgttgttatttgcagtaaatatttataactaacttaagtttactttcaagtaaacctatgccacttcttgaatagtataaattgcttataacagaattcccaagccctctctcatcctttataacatttctgccattaacttcagttattcataaactaaaattactacaaacactattgcaattatgatgttgaacacaaagtgtcatctgtcaaattaataagaaaatattttatcttatatccacttattccttctttaatactctttttttctttatgtagatggcagtttctgactttatcaccttttctcctttctgaagaacttttttaaacatttcttgcaaggcatatatgctagcaataaattccatcaattcttgtttgtctaagaaaatatttttctttctcttttgaaggttaatcttgctgaatccagaattctaggttggtgggttttttcttttaacactttaaaaattagattcattttattctcttcctgtttgcacggcttctgcaaagtactcccaggtaattcttatccttgcttctttgtaggtaaggtttttgtttttttgtttgtttgatttttgttttttaattattattatttatttgagactgagtctcgctctatagcacaggctggagtgcagtggcgaggtcttggctcactgcaacctctgcctcctgggttcaagcaattctcatgcctcagcctcccgagtagctgggattacaggtgcctgccaccacacctggctaatttttgtatttttagtagagacagggtttcaccatgttagccaggctggttttgaactcctgaccctcacatgatccgcctgcctcggccttccaaagtgctgggattacaggcatgagccaccgcacccggcctgatttttgggttttctttgtttgtttgtttactttggcttattttaagatttttctctttgtctttgattttctgcagtatcaatatgatattcctcagtgtatttttggggggtatttatcctgcttggtgttcggtgagcttcctagatctgtggtttggtgcctgtcattaattcaggaaatttttcagtcattattgactgaaatgtttcttcttttcctttctttccttttttgtgtccctgtttatttatatatatatatatacatgtatatatatatatttattacacaatttgtaattgtactgcagttcttgtataatttttctgtcttcagtttttttccttattgcacttcttttttggaaattcttattgacaattcttaaagtttactaatgcattcctcagctatatccagtctactgatgagcctttcaaaggcactcttcatgtctgttaatagttttttattttgagcattttcttttcatagagttttcatctctctgcttatattaccccgctgttcttgcatatagtctattttttctattagagaccttaacatagtaatcataattattttatttatttatttattttgagacggagtctcactctgttgcccaggctcaagtgcagtggcgtgatcttggctcactgcaacctctgcctcctgggttcaagtgattctcctgcctcagcctcccgagtggctgggataacaggcatgcaccaccacccccggctagttttttttgcatttttagtagagatggggtttcactatgttggtcaggctggtctcgaactcctgacctcaggtgatcctcccaccttggcctcccaaagtgctgggattacaggtgtgagccaccgtgcctggccttaatcataattattttaaattcctggtctgataattttaacatctttgccttatctcagactgtttctgatgcttgttaaatcttttcaaactgtgtttcagtcttttagcatgtcttgtaattgtttgatgaatgctggacatgacatatttggtaaaaggaactgaggtaagtaggcctttagcatgagcttttatgtttatctggctggaagctaggctgtgtttgctgtcaccgtacatgtcagaggctaaaatttccttcagtgtcctggtcttgtctcttctgttgtctatggattaccctagtgagttcttcctaaatatagtctgagatatgcagttctttctgttgaatttctctgtcagtatacgggagccatagtgatgtggtcgttagatgtgggagtagagggaagcgttcaatagtcctatgactagatctaagtcttttagtaaagcctttgccttgggctgtgacgttcacaagtgcttctcagtctcccctgccctttaagttagacgagatagctagaggaagccggaggccccctctcccacacggaatgcaagagggggctggagctggatttctctttttttaggccggttaggtggcagcagccctccagtcagttaggctctggtaaagtcgtttcccttgaggcaggcctgttacaaggaatgcaacatgccaagcatatttcaaactggctgcttttcttcttcctttaggttgcataaggggatttttttctagtttttactgtgaaaacctggtagtgtcctggagataaaattggggaagtggggcagtccttctatgactgggtcttcctggaatttttttttttttgagacggagtctcgctctgtcacccaggctggagtgcagtggcgtgatcttggctcactgaaaccttggcctcccaggttcaagccattctcctacctcagcctcctgagtagctgggactacaggcgtgtgccatcacacctggctaatttttgtatttttagtagagatggggtttcaccgtattggccaggctggtcttgaacccctgacctcatgatctgcccacctcagcctcaaaatgctgggattacaggcgtgagccaccgcgcccggtctggaatttttaactctcaaacttgctgacactgagcttccagcaagtcatcaattatgatttagattttctacctcctacagaggtttctgatttcctcctgtaaattctgtgtctcagcgtccacccatctcttcagttttggggcagcagttttccctatgacttcatttctctgatggatctaagaagagttgttgattttcagtttgttcaacatttttcctgttgggaagatgggagtgaggtgttccaagctcattacattccagactgaaaattcaaagtccacaatattttttaaattacagctttttattatagctttgggtttttaaaaaataataattgagaggaattttcacatgttgtacaatagcttttgattgcactagtagtgaatattaggttaagtattatatgattgatatgttgatattattgaaacgtttttccagagactgaggtgccactcaatagctattctaatgattgttgacctgtaatttcttatgttacatcctgtaattttaattgttattgatttgtaattctttatattacaccctgtgaggccaaggaaatactctttcacaattctccatgaaatgttttactacaattctctcttatttggctaccatttcatagataatcatcactcccgtctatgcctttctatctcagagcctccctctatttaatcttccatcagtttttaacaagttgatggtatttgatcatgagtaataatatatcttatttttcagaatctactccattctttaaaatctcttggataacccttttaattaaggcttttctttgagcctcgattccttggagaaaaggaaattgtcagaaacgacacacttctgtgatatgccaccagcaggcccattactatataccccagccttctctttgttatctagctaatgttaggctgccttgtttgtctaaacatataattatatttcaggaaaaggagaacataagtcttccgtactttatatcatgctgtgccctctaataatcaacaaataaaaacactgcttaataatgcttaatgtgtttggttttgtttattataggaggaactctctggaatgaaaaataaaatacaagtagttgtgcttgaaaacgaagggctccagcaacagctaaaatctcaaagacaagaggagacactgagggaacaaacacttctggatgcatccgtgagcattattttaaatcataaattttattttagtgtgaatattcccttctgccctctctcctcgccttcttcgctgcttagattttctccctgaagtgtggccaaagtactatgttggtatttgtttgagacctcaaatatcaaacttcactgtggtggaatgaatcctcagatgaaacgatcttgtgatattttgctacagtttcctctctgagcataccgtttctgccttaccatatggaaagagccggtctgaaagcaggaagtgtgttatacaggaaggactttgctaagtctagaaaccgttcagaactttaacttagatttctgttggatttctctaaattttccttgaggtctgaaatctaataagtctaattagctgcatgatgtagcagaaaaaatgttggccttaggatccaagaatcaaaatgttagtcttcccatttccctaagaaggctggtgtttagcaagtaattttagaaggttttacatagcttaatcacgtatgtcctttatttctttattggtaatttgagaagattaacctataccaggagttttcagtgcaaattcctggactccatcccctgtgagtctgattcacttggtctggttggcttctaggaatctaaactttcatcaagttgcctaagtgattctaatgtcagtggcccagagtttgaagaacgttgggtcagattatctctataattctgtgacagagaattattgtggtgacatttaaatagtgcttaaatcttatgacttatcagagtacttttgtcttaaactttttgtaactgttttgctataagatatagtcacagcttgttctgctttttgggacaaattcaactttccatgtggaagttttcatacttgcctattccagcttcactttgcagtttactttggtggttttgactttgtcgtcattagtaaatcagctgttaagaaaacatgaaagtcttgatgtttcattgggatatcctctaattttcgtttttgaagttttttttttttttaacttgaattgatagttggtttataatcctggagttgtatatgttagggtttgctattgagaagtataggagtgtattaactctgataaatgaagtgggctaattagtatttcagtttaattttctgcaattgcatttaagtttgtgatcagttcttttctcctcactgtataactttttcctgaagatttgtataattattagtggtaaaaactccatcttagttgcttatgattttaatgtcaatttgaggaagatatcaccatatagaaaatacttagaagtagcttattttaaaaatattcatttgcttttcttccaaacacgtggtcacttagcaagcagtgattcaattattcatagtcctcagtatttatgtaatgccaaagaagtggaagaaggggaagtgaagtgagaaaggaaattaggcagacaagtgaatcagagggcaagagaaatgagtaatgcaaaaggggaaggaaatgatggtcagagcacacatgccttgcagcatgagcaaagaaaatgtgctaaacaaaactacagtcagaatcatagaaaggataaggttttagagaggttttgttgttttttaaacattcatgtgagctaaatataatgcaggtattgaaatgattactgcagatatgccagatgaccttgatatctattttaatgttaatcttctgttatttgttgttgttgaattgttacccccacgttttacctgtgtaagtgaattgaaatatttcaaggccagatacagtgtcttacgcatgtaatttcagcagtttggaaggatgatcacacgaacggatggatcacttgagcccaagagttccagacaagcctgggcaacatagtgagaccccatctctctaaaaataaaaaaaaaattagccgagcatgctgatgtacacctgtggtcccaactactttggagactgaggtcagaggatcccaggaggtcaaggctgcagtaagccctgatcacgccactgcactccagcctgggcaacagagtgagaccttgcctcaataaaaacaagacaaacaaaaaaccagacatttcaataatacatgcatggtgctgtgttacaagttgtaacatgaataaaaatgtttaggatatcttaaatataaaaaatcaagaaatatcttcttttggggggaaggggtttttgtaatgagtcaattaaaatgttggtgctaaatcttcccttgctatattgaagtttgctgatttcaatatagattttcagtgtttcataatgccttttaagaaagataattgaggtggccaggcgcagtggctcacgcctgtaatcccaacactttgggagaccaaggtgggtggatcacgaggtcaggaaatagagaccatcctggctaacatggtgaaacccaactctactaaaaatacaaaaaattagccgggcgtggtggtgggcacctgtagtcccagctacttgggaggctgaggcaggagaatggtgtgaacccaggaggcagagcttgcagtgagctgagactgcgccactgcactctggcctgggcgacagagcaagactccatctcaaaaaaaaaaaaaaaagataattgaaacatttatatggtgtattaggttctctcaaaggacagaactaatatgatataatatatatatatgaagggggtttattaagtagtattaacttattaactgacacaatcacaaggtcccacaacaggccatctgcaagctgaggagcaaggaagccagtctgagtcccaaagctgaagaacccgctgtctgaggtacaagaacaggaagcatctagcacaggagaaagatgtaggctgggaggctaagccagtctaaccttttcatgtttttctgcctgctttatattcgctggcagctgattagatggtgcccacccagattaagggtgggtctgccttccccagcccactgactcaaatgttaatctcttttagcaacatcctcacagacacacccaggatcaatcctttgcatccttcaatccagttaagttgacactcagtattaaccatctcatatagtaataactaacatttattgatgactacatggttataatgtgcgaggcactgtgtcaaactatttacgttatattacttcagatttgcagtacccacacaaggcaggtgttattatctctgttttcagaggagtaaattaaggtacacagctgttaagtaacctaagtaattggcctaatgtcacagagctagataatggcaaagcaaggattcaaacccaggactatctaattctctaaatacaccccgtagaaccttaaattataccgcctttctgcataagttaggaagagcttgtcgacattgaaccaaaccatctttgtttgcagaggatagaagttttccctggcagaaaagagaagaatctcctttttattgtctcctgcttgtagccctggactttgatggtagcctgtaagactttcaacttttggtctagtttatgacctagaagttaaagaagcaagccattcaaagtatatttcattcctgtcctgatttttcatcactttgccttctcataaaatatttcctcatggaaagcttttctctagagttcacaaaatcaaaataatacgaaaacatgttatttattcaacattttgtcatgtgtccttctttaaagatccaggagttttttcttaaggagaaaatttctcggccaatatttttcacgtttgttttcatcccctgtcttaccaccgctcccgccccccgatcccctgccacccaattaagaaatcaaaggttttgaatgatcttcaaggatttaacatacttaggtttttaaaaacatcttggttaagtagcattcaagttttttaaaactatctgtgaaagaacaaaatgtccgttagactagcaattctttccaaagaatgataatattttatatcataagttagtgatctgtggtctacatgctccctccaatttctccatagaaaattagtaccaccctccttcattgatctcaaaaacaactttaaatgcaatcatatcttaggggatttgactctaccgagagaatcaagtgcagactcattccatggtgtggtatactctcaagtcccttacttgattctttagcttcatcttctgacattcatcaccttatgttttgacgtctagtaatgctgaattttctgagacccccctgcaggcaccatgctattccatacctctgtgatgtttatcatgaggttctctcttcttcgaatgccctttccatctagcttacccttacttatccttcaagataccacaccagtgtcaatttttttctggaaaaccttccttggatttctgggtgcccttagtatccctcctgtgttttggcagaggcccctgtgcacacctttggcctagcactcacattattaaattgaaattacctgcctaggtgtgtgtctcccttattagactgtaaactccttggagctaagattgatcttgctcatttttgtcctccaagctcttagcacagtgtctgaacaccataggtgttacacaaatgtttgcactaaactgaacttccagaagaatataaaatagactgtcagagtactactttaggtgaatgtagtttaccacgttcgagcatgatgcgacactgcagtatgggtcagtgtctggggacctgtcctgtcttgtgactactaccatatcctttggcccttagcaagtgctcaataattatttgttgaattaaattaatatacgtattttaatccttcttgtacacataaattccccagatcattgggctgcttactacattgaatgttgagagggtgacagaggttgcaactaacaatgggtacactaaattcaactcaggcatgtttggtttgtttgataaattttgagccagtgtttaatagtgtttcacatgaaggaccagatatctggtaatatgaattttcactgccacatggcagtgattgactggaattgagtagtggctgcttcctttggatggtacacatttctgtggtttgtcacagagcctactcttcttcctttttgaatccctggcatgcaggctgcatgtcaactctgtttatcaccatacatgcactgtttctttttactgaagataaatatttttctggaaaggcagaagatcgtaataataaaggactttaaaggaaaaaactgttcctttttctcataatgcttctgacaccaaatgtttgggtttgttttctcctacacctggccattctctgtttctctgtagataccaactaggtgtccagtgattcaattcaattctgacactcactacacagtatcagacccacaggttaagggctcagtaccacatgactgcctgctactttagataccaactgcaaatagtaggtctcttggttatccacaattctgtctgatttgtctgtaaattggggattcctacaatcccttcctaatgtgtgataatttgctataatggctcacaaaattcagggaaacactttgcttgctattactggtttattattatataaaggatataaatgaacagccaactgaaaaggcacgtagggcagggtccaggctggtcccaagtagaagagcttctgtctgtggagtttgggtacaccaccctcttggcatgtggatgcattcgccaacccagaaattctctgaacttcatcatataggatttttatggaggttttattacataggcatgattggttaaatcaatggctgttggcgattaagtcaatctccagtcctttccccccttgaggtgggggagtggggctgtaagttctagtcttctaatcatggactgcagccaccagtcatcttattagcatacgaaaggatactcttatcaccatggagatcctaagggtcttagaagcacttgtgtcagaaacccgggactaagaccaaatattttaacgaaagatgctcctatcacccatgtcactcaggaaattacagggttttaggaattctgtgtcaggaaccagggacagagaccacatatatatttggattcagattgacaggtttcagattctagtgctgccacttattagccacttcctacctctgtgaccctcagctactctatgtgactcagtttcctcctgtataaaatggaggcaacaatgaaacctatctatcccatagaactgtaatgattaaatgagttaatatatatgacatacataaaacagggtctggaacatagaaagcagcattttgataaaaattattattagccatgcatttatgaaacatggaacatgaaagacaaactaagagagaggtgtgtgcttcaagagtatatgtcttcagaggagtaaagaataattccatttgttgaatgcgctgaaatctagccctctttgcccatatttagattactgcctgtacctgaaggaattttactttgcaacacttgtagaatatgaccctaatagcctgaaaatgtgaagtgattcttgacctgtagtgtagaagcatatgctttttcttttcatcataggtaagaataggtattttatttgtaaaatatgcatgtttatttaaagttgaattcagttgcagttactggcacattttattttagggaaacatgcacaattcttggattacaacaggtgaagattctggggtgggcgaaacctccaaaagaccattttcccatgacaatgcagattttggcaaagctgcatctgctggtgagcagctagaactggtgagtatttgggtgcttttctcttatacatcttttttttctttttctcttttgtacttttttaaaattctggtaaaatatatataacaaaatttaccattataaccatttttaagcgtacagtttatctgcattaagtacattcatgtcactcaatcataaacattatccattttcagaactttttgatcatctcaaacaaaaagtctggacgtattaaacaatatctccattcccctccctgccaacccctgatgacctctcttcaactttcggtctgtataaatttgcctatttcagatacttgacataagtggaattaaacaatacttgtccttttgtgtctggcttatttcccttagcataatattttcaaggttcattttgttgtagcatgtgtcaaaatttcaagactgaataatgttccattgtatgtatgttaccaaactttatccattcatctattgactgatattggggttgtttctatcttttgactgttatgaataattatgctgtgaacattggcatatgagaatctgtttgaatccctgtttcaattattttaagtatatacccagaaatagacttattggatcatatggtaattcttcattcttttttctttctgctcctcagacttgatcattttaattgtcgtttcttaaagttcatcaattcgtttttctacctgctcaaatctgctcttgaatacctttaataaattttttatttcagttattatactttttagctccagaatttctgtttggttcctttttataatgtgttttcctgattttctttagttctttgtccatgtttgtctcttggctctttgagtgtgtttaacacagtcattttaaagtctttccccagtaagtctgatgtctgtggtttctcgagcgtagtttctgtcagcttatcctgttcttttgagtgagcatgttttcctgtttccttgtattccttgttattgtgttgttgaaaattgagcatttccctattgtaatgtgataactctggaaatctttaactccttcttttctagaatttgctgtcttattttacttttgaaggctgtaatactccttttgttttgagacatttccatactatttttgtgaagactattccatatcgtgtgattattgaagtctttgttctattagctcatgttcagctaatgtttgacagagatttccttgaattccaggagctgaaaacaaacaccctccactccccccaaaaggtggggggggggagagagagagagagagaaagagcgagagagagagagagagagaacaacccacctctcccagtcttttcagattgggtctgtgctgggacattcttttcccatttaaccaggcttgctctgagcctagggatcagccataggtgaaagcttacagtcttctcaggatgtttctgagtgtgtatctttcctaggcatactgtgactttctaaattcccccccccccccacagctgcctttgaacgtcctaatttcccaaagcgtcaaaaacaattctattttaagactaaataatacttttcaatccttttatgtatgtaacagacgtttattcttctcttgctaacctgaagtcttctttgcattaaatttgacatgtcagagttgatcaacaatgatgaaagagtgagattaacactgtaaatggaatgttccaggggaagatagaatgaatcatagttcaggttctcattattatccacagatgatatagttttctaaagattctttctgcccagtcaccctctcctgtcttagtccctaatccaagcttcattctacttgggaaagagtatccttcttcaaaaaagaaaattggaaagactaagtaaattgtatcttttttttccctctctgaataatttacagtagctacttaatacctataggataaagaccaatgtctcaagtcatccacaatttgcgtcaaactaatgttcgaactagtttcacactcttctcctgtcttttgttttttgtttcttgtttctttttgagacagagtcttgctctgtcgcccaggcaggagtgcagtggtgccatctcagctcaccacaacctcagcctcccgggtgcaagcgattctcctgcctcagcaccccaagtagctgggactacaggtgtgcgccaccatgcccggctgatttttgtatttttagtagagacggggtttcactatgttggccaggctggtctcaaactcctgacctcgtaatccacccgcctcggcctcccaaagtgctgggattacaggcatgagccactgtactcggcctcactcttctcccgtcactcttacaaatcttatctgtaggcatgcagaccactcaccagttgctgcttcataaatttataatccactttcatttctctttgaagaactggctttggtttatgcagtcctccctccccaaaatgttcccttcttaccctctacctattgaaatgtttccagtcttcagggtatagttgaaatgcgccctctcattctgctttcccgaatagcatgttttctctcttcccttttctgcattagaattcctttctcttttatgcctccccctagcactgtgtttatgactattggagactcatcttttttccttgtttatgaaaaaggtcaatttctgcatttgtgtgctctacctcacaagtgtttttcactttttccaagggtttcattctgggacttttctttctcttgtatcttttccctatcaatggtttattctttttattttatttatttttttgagacgggatctagctctgtcacccagggtggagtgcagtggcgcaatctcagctcactgcaacctgtacctcctgggttcaagcaattcgcctgcctcagccacccaagtagctgagactacagtcatgtgctaccacacctggttaatttttgtatttttggtagagatggggtttcgccatgctgctcaagctagtctcaaactcctggcctcaagtgatccaccatcttcagcctcccaaactgctgggattacatgtgtgaaccactgcacccggccaatagtttattcttagcagaatatattctttaatagctcccataaagcaaacaaacccaaaatatattctcctgaccctacattcacttccaactatcaccctacatctacattctccttttcataccaaactttttccaagcagttgtctatatttatgtctccacttctttacctcctattcttgcttcagtatgcttcagttgagcttcgtccccctgtagtccaccccaactgctctttttttttttttttttttttttttgagacggagtctcgttctgtcgcccaggcgggagtgctgtggcgcgatctccgctcactgcaagctccgccttccgggttcacgccattctcctgcctcagcctcccgagtagctgggactacaggcgcccgccactgcgcccggctaatttttttttgtatttttagtagagacggggtttcaccgtggtctcgatctcctgacctcgtgatccgcccgcctcggcctcccaaagtgctgggattacaggcgtgagccaccgcgcccggccccaactgctctttttaaggtcattaatgacttccagccatcagtcctcattgctctaaacctagtagcagctttgtataacatgtacattggttgattataccctcctcctttatattttctaagacacaatttaacataacattcagtaaagtacacaaaacaaaaatttacagctcaaagatttatctgtaaatgaacacctatgtgattatcaccactttatgcttcctcctagttactgccccttcatgccattaaagctaatcatgatcctgaattttctgaaaatactcaagtatgcatcattaaacacttttgagttctgttttttcaatgttatataagtggaattgtatagtatgtattctttgtatctggtttctgttgtccaccattatatttgttagattcatccatgttgttacattggccgaagtttgttcattttctttggtgggtctgctatatgaacatatgactttatccatctgctgtcaaggaacgtttgtgttgtttccagtttgcagctattgtgagcagtgctgctatgaacattctttcatctgttggtgtgtatgacacaaatttacgttgcatatgtatgttggagtggaattcttgctctcaggatatgtctgtgttcaacttgagtaggtaatgacaaccttccaaggggttttatcagtttacactcctacccatacaaggggttttatcagtttacactcctaccagtagtacatgagtgatacctttgctccatatccttactaatcatatagtattgtcaatttttctggtgaacttatagtgctatcttgtgattttcatttgcatttccctaactactagtgtgattgagtattgtttcatacatttattgtccatttgatgcctcttctgtgagccgcctattcagatatccttcttattatttttattaaggtatgtatctgacatatttatttggggagttctttatatattctgaatgcaagccctttgtcagtatacatattataaatatatattcccactctgtggcttcgcttgtaactctcttgatagtttgcttgcttgctttgatggctagaacttcagtttgttttccttaattatgtagttgttttttatgtccttttaaaaaagtttttttccaactacaatcatgaagctaattcttctacatagtcttctagaaattatagtttcacttttttttttttttttttaagacggagtctcactctgtcacccaggctggagtgcagtggtgcgatctcagctcactgcaacctccacctccctggttcaggcaattcctcagtctcaacctcccaagtagctgggattacgggcgcatgccaccatgcccagctaatttttttgtatttttagtagagacggagtttcaccatgtcggccagactagtctcgaactcctgacctcaggcaatccgcccgctttggcctcccaaagtgccgggattacaggcatgagccaccgcaccctgccttttttttttttttttttttttttgagacagagtttcgctttttttgcccaggctagagtgcaatggcacaatctcagctcactgcagcctccgcctcccgggttcaagcgattctcccaccacggccagctaactttgtatttttagtagagacggggtttcaccacgttggccaggctggtcttgaactcctgacctcaagtgatccacctgcctcggcctcccaaaatgctgggattacagatgcaagctaccatgcctggcctatggttttactttttgcatttagatctacaacctacctggaatttatttttgtatatggggtcatagtttgttcttttcctatgtgtttatacatccaagcaccatttcttggaaaggtagtcctttgcctttatgatagtacctttctcctaaataagttgtccatatatatttgggtctattactggactgtgttttagttaattgtgctaatactatactgtcttgattgttatagcctgaaatctggcagaccaagtcttccaacattgttctttatcctttggcctttagcatttccaaatacagttcagaattgtgaagttccaaaagtcatttgggattttgattgagatggctttaaattataaattataggtcatttgagaatcaacattttatgatattatctaatccttgtaaactgcatatcagtccacttatttgagtcatctttaatttttgtcaataacctttcatagtcttctgagtgaaggtttcatacatctttcattagaattattcctgactttttattttttatgctatcataaatgacacatatcttccaaatttttattttctaactcctaattgctagtgtagagaaaaacacatgagttttgtattttgattcaatgtcactttcttttgattagtgttagcatggtatatcttttccctccttttacttttaacttttaacctatttgtatcttttttgaagtgggtttttatagaaagcatatagttgggttttgcttttttatccaatctgacaatatttgcttttttttctccctccccacacaaaggcagggtttcgcttttgttgcccaggctggagtgcaatggcatgatcttggctcactgcaacctctgcctcccaggttccagctattctcctgtctcagcctcccaattagctgggattacaggcacatgccaccacactcgactaatttttgtatttttagtagagacggggtttcatcatattggtcaggctggtctcgaattcctaacctcaggtgatccgcctgcctcggcctcccacagtgctgggattacaggcatgagccaccgtgcctggccatatttgctttttaatttgggtatctagaccactgacatttattgtgattatttatacaactcagtttaaatacaccatcttgctatttggcttcttctttacctatctcttatttgttcccctttacctctttttctgtcttctttgaattaatttttttttttttttgagacggagtctcactctgttgcccaggctggagtgcaatggaatggtcttgactcactacaacctccgcctcccaggttcaagcaattctcctatcttagcctcctgagtagctggtaatataggcgcatgccaccacacccagctaatttttgtttttgtagtagagacggggtttcactatgtttgccaggctggtcttgaactcctgacctcgtgatccgcccgccttggcctgccaaagtgctgggattacaggcgtgagccactgtgcctggccatgaattaattatttttatgattcccttttgcttttttttgttggtctgaaaaaaatctttagtaccagtattcacttgattgctcacttcagaaacccaggattatttttagtgtatttttctcccctatatctattctgtcataaaattctcagtttttctcttaaatatttctatactaaatcctttctttttagttcctactgcttgattgcttttgttcatgtgcttatctcttacctatgtatttgtaattactggtttccctttcttcacacttcaattatgatttaagactcaattctgataaaaagctttcagtggccctccagtgtttcttctagagggaaagtgcaggagacatgtgtaccaaataaaagtcttgatatttttattcttcttgtggcccacctttacctattttgcccatctccaatcacctctccacctcacattttacattcctgtgatactgatctacttactttccaaacatggtttggacaacctctgtgccttctgctctactggaaattatccttcaaatcttaacatttcctctgtgaggccttctttacttatctttggctgaattaggagttcctgcctctctaaatttttcagtttccatatacttcactagagcaatttatgaacagttggcccttgaataagataggtttgtattgtgtgggttcacttatatgtgtatttttctgaagaaatgtaccagaattttttttgagatttgtggcaatttaaaaaaacttgcagatgaaccatgtagcttagaaatatgaaaaaattaagaaagaggtatgtcataaatgaataaaatatatgtaggtaatagtctattttatcatctactaccataaaatatacacaaatctgttataaaaagttaaaatttttcaaaacttatgtacactatcacagactgtacacggagtcattctcaggaggaatgcaaaaaaacataaagatgcagtattaaattataacagcataaagtaaaatgtagtacatactgtactactataagaatttcataaccacctcctattgctattgtggtgagttcaagtgttttgagtgtctgcttaaaacatcatgtgacaccagttaatctctgcataaacagtttgtctttccagtaaattgcatatcacagtaaaaagtgatctcttggtggttctcgtgtacttttcatcatgtttggtgcaatactgtaaaccttgaataacaccatgaggcccatgcaaagtgccactagtgatgctggaagtgctcccatgaagcaaattcatgacattacaggaaaaagttacattgcttgatatgttccatagattgaagtctgcatccccatttcaagtctgttgccccatttcaagataaattaatccaatataaggaccattgtacaaaaagaaaaggaaatttgtagagccatcactgcagccgtgccaacacgcacaaaaactttgtacttttgcacaatgcctttttatctgtcatggaaaatgcagattttatatgggtacaggatttctataagaaaagcatacctgtagactctaatataatttgaggaaaaaaaaagtcattttatgacaacttaaaacaaaaggaaagtaaaggatataaagctggagattttaatgccagcaaaggatggtttgataattttaggaagagatttggtcttaacaatgtcaagataacaagagaagcagcttctgttgaccaagaggcagcagacaagttccaagatgcaattatgaaaattatttaggagaggctgggtgtggtggctcacacttgtaattccagcactttgggaggctgaggtgggcggatcacctgaggtcaggagttcaagaccagcttggccaacatggagaaaccctgtccctactaaaaatacaaaaattagctgggcatgatgtcacgtgcctgtaatcccagctactcgggaggctgaggcatgagaatcacttgaacccaggaggtggaggttgcagtgagccaagattgcaccagtgcattcgagcttgggtgacagagtgagaatctgtctcaaaacaaaacaaaacaaaaaaaaggacgaaaattatttaggagaaatgatatctgcctgaataggtttttaatgcagatgtaagtgctctactctgggggaaaaaatgtcacaaaggacatttattagtaaggaagagaagtgagcaccaggatttgatgccggaagggataggctaactctactgtttcgtgcaaatgtactcaggtttatgatcaggactgcccttatctataaagctcctaactcacgagacttgaagggaaaagataaacaccaactgctagtcttttggttgtgccacaagaaggcctggacaatgagaaacctttttctacactgatttcattgatactttgtccctgaagttaggaagtaccttgccagtaagagactgccttttaaagttttttgatattgtacaatggctctggccacgcagaaccccatgagttcaacactaaaggcatcaaagtggtctccttgcctgcaaacacaatgtctctaattcagcctcaagatctaggcagtcataaggacctttaaggcttattacatatgggtactctatggaaagcattttcaacacaatggaagagaaccccagtagcaagaacatcatgaaagtgtgagaggattacagcattgaaaatgccattattgttgtagaaaaagccatgaaagtcatcaaacccataacaatgaattcctgctggagaaaactttgtccaaatgtggtgcatgactttataagatttacaacagtcaatcaaggaaatcatgaaagagattgtggatgtggtggaaaaggttgggagtgaagggtttcaagatagagatcttggagaaattcgagagctaatagacaccacacaaaggacttaacagaagatgagttgatggagatgagtgctcctgaaccagtgccagaaaatgaggaagaagacatagaagaatcagtgccaggaaacaaattgacatgagataatctggcagaagggttctgattattcaagactgcttttgacttcttttatgacgtggacccttctataatataggcactgaaactaaagcaaatggaagaaggatagatatcatatagaaacatttttggagaaattaaagagcataacaaagtgagacagaaattaccacgtgtttccataaagttaactaagtttgcctgcctctcctgccttccctcctaactcctgcatctcttctgcctctgccatccctgagaagacaagaccaacccctccttttcctcctccaactcagcctactcaatgtgaagatggtagggtgaaggcctttatgaggacccgcttccatttaatgagtagaaaatactattttcttttccttatgattttcctaataacattatcttttctctagattgctttcttgtaataatatagtatgtaatacatatagcatacaaaatatgtgttaattgtttatattattgttaagtcttctagtcaatagtaggctattagtaattaagttttgggggagtcaaaagttatacatggggccaggcgcagtggctcacacctgtaaccccagcactttgggaagctgaggcgggcagatcacttgagtccaggggttcgagaccagcctagccaacatgatgaaaccccatctctactaaaaatacaaaaattagccgggcgtggtggcacatgcctgtaatcccagctacttgggtggctgaggcacaagaatagcttgaatccagcatgtggaggttgcagtgagctgagattgcgccactgcactccagccttggtgatagagtgagactctgtctcaaaaaaaaaaaagttatacatggatttccaactgtacaggggtcaatgaccctaacctccatgttatttaagggtcaactgtaattgaaattcttcatttttctattcctttctgggatatttcgtaagttccttgcagttcaagccaccttcatcttagatacacaataaatatttgttgaatgaaagaataactggataccaacagaggcttgtaggagttagtctatcatcatgtgatataaaactttacttttgatcattcatctagcacatatttattatatgtcaaatattcaacagccacaatgaaggattctaataagatttgatctttgccctcatggaccttatgggttataactgtttttccccagagtcacacttttagggataagacctgatatatgcaattttgaaagacaaagaaaatcaattttatgactcagcggttctttgcaggcattcacacaataaaaatagaaaaattcaagtggactagggaaaatattttctaagaagacatgtttcccccacgttgggtaaaaagaaaaaaattgagtttaatattaaaaattaaagtttacttataaaatacaggacatagagaaaaatgtacttctatttttcttttctataggagaagctaaaacttacttatgaggaaaagtgtgaaattgaggaatcccaattgaagtttttgaggtaaagtgaaatcgtccatttatagtcataccaaaagcataatgatcttaaaatatatttgaatgtttgctgaacttctagttttagtcattatcagacttacttgatgacattttaatacactttaaaaaatttcctcagattattaaaggatgaaaggcctaaaattgagttcttttccaaatcacgttcccatttcttcatcagttgtaaaatatttgtgttttcttgtagaaataagaatcacggccgggcgcggtggctcacgcctgtaatcccagcactttgggaggctgaagcgggcgaatcacgaggtcaagagattgagaccatcctggccaacatggtgaaaccccgtttctactaaaaatacaaaaattagctgggcctggtagcacgtgcctgtagtcccagctacttgggaggctgaggcaggagaatcacttgaacctgggaggcggaggttgcagtaagctgagaccacgccactgcactccaacctggcaacagagtgagactccatttcaaaaaagaaaaaaaaaaaaaagaaataagaatcactaactgctcttatagaaattatgatattcaagtaaaataatgaaaataaagcactttagttttcaaattattagtattttttctctgtagatagtcttcatctaattttaaaattgcaatgataatataatagtttgagtatttgtatacatgatgaatttgagtatatatgatgaatattcatgtactttttatagaatctatttattagagatcccagtaagacctatatattatagattaaccattagtgatttatgtataatgagtagaaaaagacagcaggaattaatatttttgttgttaaagattatttttaaatagtagtaatgaagtaattttaaatcaaataaactttgaaatattgtttataattttattttaataagtccaatttgaaattttaaaatcttccaggccatagcctatctagagacataactagagtaatactaagagccagaactcagctgattgtggtggcttacgcatgtaatcccaacactttgggaagccaaggcgggtggatcatttgaggtcaagagttcgagactagcctggccaatatggtaaaaccctgtctctactaaaaatataaaaattagctgggtgtggtggcacacatctgtagtcccagctactcaggaggctgaggcagaatcacttgaacccaggagatagaggttgcagtgagccaagatcatgccactgcactccagcctgggtgacagagggagactccatctaaaaaaaaaaaaaaaaaaaaaaaccgagctggaactcatagctttcactgtacatggttgtttattttttaaatgttcttatgtttttcatagattaccctgattagttttaggatttctcttagagatttttacttttttacaaagaaatgttaacatttaaaaaatactctaatttttgctttcttgttttttgtcctattttattttattttgattttatttacgacttgattctttagtttttaaagtgatgtatttctagatcattgtacttaagggaatgtgacttattttgtctcattcagaatccagatatttcatctttaattacattaaaataccaacttgtaatgaattagactttgttctctgaatccttctgtttcttcattttcttttactataatttaagattatttaaagaggcattttcataaataaataaaatcagtcttcttttcaactttctttttaactttctcttttgccatttctagtaaccaaatctacttgagtgttttgagtttggagctgaccaaaattagtaatggggaccctttgactttggaatgtgcttcccaagttctttttataaagcctttgaaagtcagacattccctacatgatattgaaaaagaaaacttatcatcttggtgttattattttggggatagggtagacgcagctcatttttcttcccctcaactttggaatgccattccaaagtttttttttaacccttagattgcctgtgggtcttttatgcctctcctgcgttgcttgaaagcccccaaaatctcaacagttgtctgacagccaggctgttggcttctcctctgtgacagtgagccagttaagatggccacagcacctgagcgtggagactttgacaatgacaacagagagtagacagagatggagataaagttcctgccttcagtagtctcatttttcagctagaaagtttttttttgttttttttttttttgaagtacaaaagaaccatctaggcaaggaagctcagttgccaaggtgactttagcgcagctttactgggataaggtaggaaaatacaacccatgtactagtcaattaatccttaaaaagtcaccttggagaaaaacctcatccagaggtgagctgataaagtaaaaacaaacaaaaactacacccacacccacaccacccccacccccaccattccccagccctttctttagcagcctgtatgtttccagctaatagctactacccctgaaatcttatgactggcaagttctatgtaacttccttctgtaacttactttcttttgaaacagatctttgtagaagtttgtcgttagataattatctatctaacagtaatgttttcctcctgaagaaaaatgggcagtaataaactagtcaaggataaaaatccatgtttttttatgtgaacttttaagacactctaaaaattttaagagattaatgcttgaaatagggtattttcctcacctcaagtatgttgtcttatattaccccaccccttttttaaggaaaatgatttgggatttatatttggagttttatttttgttttgtggttaatataacattaatggaggttggatcctgggacaagagagccagtgtcaggcggattctaatctatattaaaatcttacaagaacctaagctaattatgtaatttattccagtctcatcatattcaacgtgtcaattagaatcaccacaccaaagtttcagggtcgtggtaaaaattaataaggtattggacgtaaactaaagcataaggtgagtacccataaacgatagtagtagttaacattatgatgattcattttaaagtcatgtaattttacctggccattttctagaattttttcaccctctttttaggaacgacttagctgaatatcagagaacttgtgaagatcttaaagagcaactaaagcataaagaatttcttctggctgctaatacttgtaaccgtgttggtggtctttgtttgaaatgtgctcagcatgaagctgttctttcccaaacccatactaatgttcatatgcagaccatcgaaagactggttaagtaagtatgcttctacgcgcacggagactttggcaatatggaaaattctgcctttaaaggggcattgtgttcttctagccctatgctaagtcacatgtgattattgttaatcttcaaatacagtggattttaaaaggttccttcattatagcttccttgaagacaaatgggtgggttctgccatgtcaccatgtcactttgaacagaaaccatgccactttgaacagataatagtatctcttggtttcagtccatcttcaagtgagagaattgaactagacagttctttacgattctgtccagttctatgaatctatgattacaaatctaatactattcttagcaaaactgagtgtaatagaaattcctttggttttgccatatcttggatttttctgctgtacttcaggtagaatgagttattaccacatcttcatcatgtgtctgttgtaaggagtattataaggacccactgtatcccactattgatatttgagggttaactgagaacaagttacagatgaccttttgtgttgtccaagttttcgtctaagctgagtgaaacaattctcttcgtacatctgttttgttgttttcactattccagaggaggccttttcctgtgaaaattttattctgtggaaattgagaattattatgtaatatagaacccagtggcagtttatagtgtatgttcttccatgccccctacttttctttgtgctcagtgtcacctctctctatctgctgtgctcacttaaataaccccagatcacttccttttagaagaagtctctcatcagctctgccccattttgtcctcaactgacttaggttcctttcttctgtggtcattaaggtcagaccgattttgctccatgtcctgaccttcaacaaattccttttcttctctgagcctggcatcttctgttgtttggaggaaaatacctgcttcttcagatttaagacctttttgggattttactaaggcaggttagcctgtgaccagaagtactgcttttgaaactgactgcttgggttcatattctggttctactgccaacttaccatggaaccttgcaaaagttacttaacctttttgtgcctcaattttctcatttttaaaatggtgacataagtacctaactcatagagttaccttgaggggtcactagagaaaacctatatagtacttaaaacacttcctgacatatagtaaatgctcagtaaatattaaaaccattctgtaccttctatactcccaagaatgatcaatatgtcttctagctgtgatttccacacatggctaactcactcaggttgggggtgagttgctgttgttttcgagttggggtctcactcctttgccaaggctggaatgtaatggcacaatcatagctcagtgcaactttgaacttctgtgctcaagcgatcctcctgcctcagcttcctgagtaactgcggacatgtgccgccacacccagctaattaaaaaaattttttttggtagagatggggtctcactatgttgcccaggctgttcttgaactcctgtgatcctcccacctcagcttcccaaagtattgggattatagacataagccaccacacctgacctaacctactaattgttatatgaacatagaatttccagtgtggactgactggtagttttttatgtttgtttgttttgtttttgttttttgagacggagtctctctctgttgccaggctggagtgcagtggcgcaatcttggctctctgcaacctctgcttctcgggttcaagtgattttcctgcctcagcctcccgagtagctgggactataggcgcccaccaccatgcttggctaatttttgtatttttagtaaagacggggtttcaccatgttggctaggatggtctcgatctcttgacctcatgatccacccgccttggcctcccaaagtgctggaattacaagtgtgagccaccacgcccggcccgactggtagtttttatgacctatactgcttggttctgtttttgttaagtattttaagtattcaatatgttgttaatttattcatatagtctcaatataactattaaacatgtattaactattttcagatacaactaaaaaatgtagtaaacatttattatatgtcaacgactgtgctaggagatttaagaacatcatttttaaaaatcttcaagcgttcatgaggtacatattattacccccgttttatagctagggaaattggggttcagagaagttaaaaatttgcctgtttatatttgaaaaacaagaacagagctgtaccttacaaaaataaattcatggtagtttaaaggctcagatacaattcagactataaaagcattagaaataaatataaaaaatatcttataattgtgggttatagtcctaaggatgacgtgaaaagtggaagtcataagggaaaaaaagatacatttgtttctattaaaaaataaattcccttacaataaaacattacatattcagttaaaaggctgagaaaaaatatttgcactatacatgacaaaagaccaatagaataaatttcctttgaaacaaacaaaaaggacaagctgcctagttgcaaagtaggtaaagaatagaaatcagtgagcaataaaagaggaagatgtcagcatatgaaaatgtatttattctattagtatttgaggaaatacaataaaaaaattaaagaacaacccgtcagactgacaaaatagaacaagattgataatttcaagagttggtgaggtcatgagtacacaagtattttcactctgctggtgggttcataaattggtggaaatactttggaagtaaattagtcctgtccattcatattcaaattgtgcacttcacttttcaaaatctaccctcaagaaaaaactcaagtacatgcataatggggtatgtatagggaatgctttttgcagcattgtttataattatgtgaacaacctaaatatcgttcaaaggagagtaactaaacatggtttagataaactatgtcattttgtgcatagtatgaaaaacggaagtagttctatgtgtattaatgttggaccatctccaaaatatattgttgcaagaaaacaaaacaaaatggctaaagataaatctagtatgaaaccttttgtattttttaagtccatatacaaccatactacatttttccccttcgaggttcatagatatgcacagaaaaatatttgaaagtgtaaacactaaatatttaacagagataaccactagagaggtggacgaaggcaatgaaattgaaagggtgtcaaataggcctttaacaatattggtaactaattttgcaaggagaatataatttaaaaattaattttagaaagaggaaagcatattaaaagttgcaaataaaaagaggcagagcttaaaactaggtagtctagcaaaactaataagccaggcatagtggctcatgcctgtaatcccagcactttgggagcctgatgcaggaggatcacttgaggccaggtgtttgagaccagtctgggcaacatagggaaaccctgtctctacaaaaaatttaaaaattaaaaaaaaaaactcagccaagaaataacaagttattatgttgccttttatattatccttctagattatgaaaaaatatttttaaaggaagctataatgttttggttacttccaagcctggcagtcattcagaaattaagattcttgatcagttatgtattcctttgtctctatcctaaatttgagctcttagcctcttaaagtaaatgtcaacctacttagttcaattttctgccttgtcagcatatcattgtctcatgttctgcattaatgacagaaaggatattaaacctattaacactgagcggattctgcttttattgtcaatgaattcttcttctgtatcattctcttggcctaacttaactaatgcagagtgctgaatattgagtgctatgctaactttgaagagtgtccagcaccttttgggtttggatttctagttttatgtatagttagaagcctgccccctccataagctgttatcatattacctgaatgactttaacatggaatgtttaaaaatgataccttaaatatgataaatcaaaagtttccttgtaaatgtggtattgtgacagcagctttcagctcctttgttgcatcctttagcatttactattttgaatatatattcatgaaacaagaatggcttgatggccaggcatggtggctcacacctgtaatcccagcactttgggaggctgaggcaggtggatcagttgagatcaggagtttgagaccagcctggccatcatggtgaaaccccatctctactaaaaatacaaaaatagctggatgtgttggtgcacgcctgtaatcccagttacctgggaggctgaggcaggagaattgcttgaacctgggaggcggaggttgcagtgagccaagattgcgccactgcacttcagcctgggcaacagaggaagaacctgtctccaaaaaaaaaaaaaaaaaaataatggcttgtacagttgacaaggaggggatcaggcatgacttggagaccaggccacccatatgtttctggtggtttcttaggactcaaggactttttggagaatatacttaacaactattgatgacattggatatattttttatgttgatttgaagtcttcatattgtttccgacctttcgcctttcacttggcctctttatgccataagggaggtaagagtaacagtaacctctttttcttgcttaatgatcaaagtaccttcacatggtaaccaagatggaactgcttaaattcctttctgtagctcacagtaccttggagaagtttatacttttcaaaaaagagaaaagattccaagggtacttttctggggctttagtccagcttgtgattttggagtggatcattggcctgctctgcatagctggctttaaaagactacagcaggaacttcccagaaatgaggaacaaagaaatgttgtagtcagccttctagactttctttttaaaaacggtgtagtaacacttattagtgatacctaataatgcttaaaattaataataactggagtaatttagaaattataagacatttcttagccactccacatttcaaggtggagctcatgcatatacattagaccaactcttttgcttaaacacttggctgagattgttaagggactttctcagtccttttggccctgattgctgcgctaagtttcttaaatattacatgctcattagtgcgtgtaagtacatgcttttcaccccagaacactcatgatctttacgtcatctttctgcctcagctgctctttcatctggatcatggaatgttgcagggttaacacagtgttgctggctttgcgtcaagaagctccttgattacattcatcaacacattcacatggtgtttccaagcactcatagaacatttgccatggaggatggtaatttggagaactgccctttcactctcacattgatatgccacatgtgtctgtacagcttcccattgtgagagcctcattcaggtgtggctctgggctggacctgtggattgcgggatctagagcaggactgtagctaactgggcagttaccctgggtggctggaatcggctgtttctgaaaggcagattatataagtagcactgttagtcccaggggataagtgggctaaaaaatgaaagctcagacaagatgaagccagatggccacaggaatggagtaggaagcaaggccttgtgttgaggagaggggactgccagcccagagctctttctaaaaaaattatttgtggggttgcttgctgctatttgttatgtggactggctgagtcaaaacaaaaccaaaccaaaaccaagatttagtaacacctgagtgaatgagtagataatcctaaattgccaaaatgactacctacctgcaagcttcccaggtgggctcaaagctaccttgaagcatgcgttgcatttgccttacagaaaggaggagtgtgtcagcccagtggttacgtggagtttgagtgtaatcgttttgtggtctcactgttgaatgatgggcctaacaagacatctgtatattggagttttatctttgataattttctgtggttccatagtctaaatttggtgagttaatattctgaaacacttttgaaccagaacgactgaactctagtttctaattcaaaataggtaatgttttcagtttagatcatgaaatattagaactgagagggagctttacctcacctcttttgacaccatcctatagcagactctttattcatttatttgttttcttgttgtttattctgttgagcatctactgtgtgacaaacactactcttgacaagaggatattctgaaaatagataaagtctattaaacgtaagtttcccataagcagcaagtttgttagatttttatcctgttgtggatctgtctgtttgcatacttataaacactgagcttttttgatcattcttttttgagatggagtcttgctctgtcacctaggctagagtgcagtggcacgatctcagctcactgcaacttccacctcccaggttcaagcaattcttgtgcctcagcctcccaagtagctgggactacaggtgcgcactaccacacccagctaatttttgtatttttaatagagacagagtttcagcatgttggtcaggctggtctggaactcctgacctcaagtgatccgcccacctcggcctcccaaagtgttggaattacaggcgtgagccactgcgcctggccttttttgttcattctttttccttggaactttggctttggtgactgcatggtatcaggaacagataagaatctcattgaatagttacttttgctcttcattaagtcttagtgatttaagaaaggtgactgtaagatgcctatattgacttgctgtccttaaagagtgaatttttcttttcttttagaatcatagatcctaactggattgcatatccttgataaagctagaccccttttacgttatagaacttttatggaaatgcaaatagacacatattcaattttgctggtgtttatttttttacttaactaggataatttaatcttgccttgattcttccacttttttacatagtaattgtgtttgattatattcgattaaaacaatttacttcttttttcatttccttggaagaaaaattatttttatcaatttaaaacaaatcaggaaattctaaagtgaagatcactctgcttccatgaattttatatttgcagcaacttattcttttttaaacaaaaagggcttttatgaaactgctaataattgtaactttgttcagtattacatgtttcttcaaatgtggctgctttccaaataccacaaatagtttattttacctttaagagatgttttaaattgaatcattggttaattctgaaagtaattcaagcagagtttataatcctctacactatgactctttaaaacttgctaattaaaaaaaaatcatagttggcccttttctcatagtttagaccttggcaatgaaaaggaaactgcaagcatttatttcaaatgaatttgaaaccgtggtttagtcttcaactctttaacaaaacagggaacaccatatgtaacagtccagcatacattttttgctttttatgtcttgaaagtttcctgcctcactttctctttgtctactggatatttttattcagttgataaattgcaaatatcctagaatattttatatgggacttatttaatcaatgagattgtatccttgctattttacatgccagagcattttggcatttggttcacttctactcccaataaacagcttaggatagagtacttctgagaattgctgaagaagggtgggtcttggcaatgatcaaacccagtgggataagattgtgttaaattgtgaatgttatatgcatagccaggagattggaggagttcaacagtactaatcattgagcaacaacaagtgttcataagtaactgaaagaatgtaattgaaagagaagtgcaaaaaagaggattgtggagaaagataaaaaggaaaggacatatatttgttcaagtaaatgagaggagaatctgctgcatggacaaagcctcagtccttccttaaaatgttgactgctaccttgatttacaattcgtaccttccctactttgctgcatttttccttttcagcacctccccccacttttaaaaaactaatttgctcttctctgggctttcccctgcagccctctccacaatagatgattgtcccgcacagatgccgtcctgccacgaaggctcttagcctttctggctgctccgcccgccgctcgccaagtgaggacagagggtctttctctggggtgtgctttatttcatatgtgctcagccggcctaccctggctcttctaatacatattaatgcttttctctccctgacttatgaggacaggatcgtttgatcatttcttgttttgaatgttctttttgtgctgacagagaaagagatgacttgatgtctgcactagtttccgtaaggagcagcttggcagatacgcagcaaagagaagcaagtgcttatgaacaggtgaaacaagttttgcaaatatctgaggaagccaattttgaaaaaaccaaggcaagtctaataagatgcaaataaaagtgtctttcttttttttttcttttttcttctgagtatttatttggttattcttctataactaaactttgtttttcaaacacacaaagtgaattatcaatctgttaatgttgacttttctgaattaaacaaatttgctatttggagaattcttactgctctgcaaatactgttgttgtatcactgttcagagaatgtagtacagtataatactttgagagacctatatgcttaatctttttatttgctgataatttgcaatgctgcaaaaatcttaacacccaggcattagtttgtatgtgttcgtatatgactaaagacaaatgtttttcctcaataattgggaagttttgagaaaatccaaatataccaaagacaataatatatacatatttagtagcatttttttttttttttttttgagacagagtcttgccctgtcgcccaggctggagtgcaatggcacgatttcggctcacagcaacctcttcctcctgggttcaagtgattctcctgcctcagcctcccaagtagctgggattacagacacgggccatcatgcccagctaatttttgtatttttagcagagatggtgtttcaccatgttagccaggctggtctggaactcatgacctcaggtgatctgcccatctcgtcctcccaaagtgctgagattacaggcgtgagccactgcgcccggtcttagtagcatctttgagtctggacttactgtaaggtaactcaaacatacttaatgagaataacagtttatacttagtgatcggacggtgttataggcactttgaagaataggaggttactgttgattcattactgtatttgggggccacaccgtaatccgttaaagttgcatgtattttccctagacacactagcatacaattcaagttcttaatggccacgtgtagcaaatattggacagtgcagatatagagcattttcattatcatgaaaagttttgttggatagcactggtctaaaccatatatgaatctcagtgttttattaaaatattagggctacattactgagtatatgcccagaggaatataaatcattctgctgcaaagacacatgcatgtgaattgtcattgcagcacccttcacaatagcaaacgtaaacgatggaattgatggaatcaaccgaaattgacggaatcaatctaaatgttcatcactgacagattgtataaagaaaatgtggaacatggacaccatggaatagtatgcagccataaaaagaatgagatccgatcttttgcaggaacatgcatggagccggagacagttatccttagcaaactaacgcaggaacagaaagccaaatactgcatattcttacgtataagtgggagctaaatgataagaacttatgagcacaaagtaggaaaccacagacagtggcatctccttgaggatatagggtgggagcagggagaggagcagaagagatcactattgggtactgggcttaatacctgggtgataaaataatctgtataacaaaaccccgtgacatgagtttgcctatgtaacaaaccttcacatgtacccccgaacctaaaataaaagttaaaaaaaaattagggctattcaattctgcattaagcctcttgtcagccattgctatgtccatttgtctttatccagttcatccataactcttcccgtttgaccctcatgccttttgaaacttaggttcagttatgaccaaactccccaacatactgtttcctcagactctcctgtttcttcatttgttgtgagctctagctgtccctcaatgccatgtttcaaaaccttcagtgaaggcccttgtgtcagtcaagtcgtctcaggtgggtgtgatggaggaaaccgcagttacttcactcctgactgccatttccagggctttgttttggcacttactctcaggtcctattcctctttgaaattaagctaccgctctgtgttaatctgttttgcattgctataaagaaagagcagagattggtaatttataaagagaagtaagtggtttattttggctcatgttgtgcaggctgcatacgaagcatggtgccaacatatgcttctggtaaggcctcaggaagatttcactctgacagcaggcagaggggagcaagcctcacaagggagcaggactgagcgaggaggagaggggccaggccctttctaacaatcagacctcaggataactaatagggcaccaagccattcatgagggatccacccccatgacccaaacacctcccaccaggccccacctccaacactggaagtcacatttcaacatgagagatttggagaggacaggtatccaaaccatatcacactcctctttgaaatcagtgttgtctctctcctccctaatcaataaaatctctcaattgagaaggctctctttgaccctttctattttatttttatttttattatcatttttttgagacagagtttcattcttgttgcccaggctggagtgcaatggcgcaatctcagctcactgtaacctcagcttcctggaatcaagtgattctcccacctcagcctcccaagtagctgggattacaggcatgcgccaccatgcctggctaattttgtttttttagtagagacagggtttcacaatgttggccaggctggtctcaaactcctgagctcaggtgatgcacccatcttggcctcccaaagtgctgggattacaggcgtgagccaccgcgcctggcccctttttaaaagttttaacatctgatccttttcctcttcattctatctctttcatcatccttaaatgtttgaatttccatgttgctgatacacaaaacactaatactcttcagcttccttaactctactatatcccctacttctacgctaacatcctgcatgaactgaaatgcccctaagatctctctgaaaccacactctctgactagggcctttgctcttctttcctccctatcaaagttaaatctactccatgtcttcattttcacctctagttcttcagcattctttctttttatctctcattttatctgttgtgtccaggctggtcttcttttcttcccatttaaacataaattttaccatctcaaattgaactcacacattcactctcccaaatctgctgccccttctgtattctcttactggatggcacttttactcactaacatgctctgatcagaaaactggatttcaccctgtccttcacccctaacttttaaccagtcactaagtacagatctgagtttctaacgttttcttgaattctttccctcattaacacttttcttatggaagctaagtaatctctggatttatctattacacttcttcctagcttgcctccctccttcgttccactccctacactgcagccagaagcgatctttcttaaagacacatttgatcatgtgactctgatttaaaattcttcggtgaattttcactgccttcaagacagtctccacattctttcccatgcccgtggtctgtcctaatgtggctcccttttgccctccaaggctgctgcttttttcctcctctcgcgccctgtctcccagtacactcagctatcgtcaaaggcaggagggcttagggggtgaacatgggcttactagagttagccagacttagattcaacttctggccccaccattcactggctgtgtgaccttggacgagttactttaacttctctgtgccccagtttttcctcatctgtaaaatggagaaatatgtgactcctaggattgtgaatgaggactgcattttaaaatgtatattggttatcttatacaaacccaggcaggcacaaaatatttctcaataaatagcggtggtggtgataaccctgctgattatcccatcctctctccagcctctgagtctttgtatgtgccatgtgcattcttctctgctccactgcctgtatattactttagccttacttatcttagcctacatggtactccctctaggaaacctcttatctcttctgtctagattcgatgtaccctttatatgcctttatagcagggtttttcaaccttggtgctattgacattttgggctatgtaactctttgctttggatgctgttctgcacattgtaggatgtttagaagcctctacctactcaatgctagtagcttaccctcctcccccaagttgtgacaactgaagatgtctccatacattgccaaatgtcctctggtgggcacatttacctccatttgagaaccactacttatatagcatttatcaaaatgtattattattgcttgtttgtctgtatccttcattaaacttttaaaaaaatatttcagcttttagttttgaaagaggggtacatgtgtaggattgttacatatggtggacccaggtattgagcatagtgccccataggtacttttccagcccatgcccccctctctcctcccccaagttgtctgcagtgtctgttgctgccacgcttatgtccatgtgtacacaatgtttagctcccatttataaatgagagcatatggtgtttggtttcctgttactgcattactttgcttaggattatgtcttccagctacatctatgttgctgcaaagcacatgatttcattcttttttatggatgtatacattccctggtgtatatgtaccacattttctttatccaatctgccatttatgggcacctaagttgattccatgtctttttttttgagatagaatcttgttctgttgcccaagctggagtgcagtggtgtgatcttggttcactgtaacctccgcctccagattcaagtgattcttctgtctcagcctcccgagtagctgggattacaggtgtgcaccatcacgcctggctaatttttgtgtttttagtaaagacagcgttttgccatgttggccaggctggtattgaactcctgacctcaagtgatccacccgcctccgcctcccaaagtgccgggattactggcgtgagccaccatgcccggcctctatgtctttgctattgtgaataatgcagtgatgaacatttgagttgatgtatctttttggtataatgatatatatcccttggggtatatacccaggaatgggattgctgtgttgaatggtagctctatattaagttctttgagaaatctctgttaaactttaaaattgtcaccaagccaagggcttgcttccctatgcacatagaagccaatgctacggcactggcttttaagaaaagaaaaggctttattgcaagttgactggcaaggaggcaagaggccacactcaaatctgtctcctcgttctgcggcaagatcaggaagattggtttcagaggtgtttctaagtagccccaggtgataccagtgcagccagtctgccagggtggtggtaatcacaatgaggaggttaaacctctcatgtaccccagaaatatatgcatctactatgtactcaacaaaaattaaaaataaagtaaaaacaattaggaggttaaagctttttcccattgcacatgcctggactacatgacttgcaattttggctcagtgctatctgtaacaacttaaacaatggttaatcagtctgcactagtcccttggttacaaaatctctggtgttacggaatttctccaccctgatcactgttaaatccgtagcatcttgcgtagatctcaacacataataaataggtactcagtaaatatccactgaggaaggaaattgcaactcagttctcactagcactctacagtgcctttattcttatctttccagcttacctactttgccagcaaaagtacccagtgaaaattaggcccaatcacacttttttttttttttaatagctagttcaagcctcccaagcattgctaaaggaagtcatttaacaaagccacttaatagccgggcgcagtggctcacgcctgtaatctcagcactttgggaggctgaggcaggcagatcacgaggtcaagagattgagaccatcctggccaatgtggtgagaccccgtctctactaaaaatacaaaaattaactgggcatggtggtgtgcgcctgtagtcccagctactcgggaggctgaggcaggagaattgcttgaacccgggaggcagaggttgcagtgagctgagatcacgccactgcactccagcctggcagcagagtgagactccatcttaaaaaaaaaaaaaagccacttaatgagttccactgaagagtaatactagtcaccttcagtggttgtaggtactgttgaacaattcttttctctgcagttgaagaccttatatactctagtcaggaactccactttcctcacttttccaactccactgctggcacgtcactttcttcggatgacctacttctcactttactaagattaggaccaactgacaagagcctcctcagcatcttctcatccctcgaatgtctcctctccttatttctcctttcttttctggccctcttatttcccaagatgaacatctttctccccgtttttgatgtctcccacttctatgtcatcacatttttcttgcatcctttatccttttctctccactgtttttccccctcatcctgcccacagcctttgtttaagtaaacaaaaagcagctttcctgtgatcatctttcacttcgtttattaccgtccattcctcatttcactggcagacatctcacaacagttgtccaccctggtagctttcctttcacttctgagtgcatcgcagccaggctttgaacaaactgtagcctgattttatgttactgaagtgctcgcttcatgatcactggtcacttcctgattaccaaacccagtgacctcatctcaatcctcattggacttaaactctatagatttggaaccctgttaactggcctatcataacataccatctctttcccttgatttagctgatatgttactctcatgggtccacattgtaccattcttgtctactcttaagtctcttttaacttgtttcttggtttccacaagtcttaagtgtggacgttcctcagagttagttcccagccctcctcccatgttgccttgacttcctgggattcatttctcctcacgtggccaaatattaccagtgaatacacccacattatgcctttagctttaactgctctcctgagccccagccctacgtgttttgctgctactagatctttttttatggatgatacactgctggcgtctgaaactctacacaaccaaaccgttcattggctccgccttcccatctaccactccttttctttctaccattttctctatgatcgtcttcaaacaaaggcatcaccatcttcaccgcagtcctggcttgcattctttaaaacatctcggttcttccctatgcttgctcttgacattccatcagttcccaaggtctttctctctctcttcagagtcaaatttctatttaactatgcctaccttttcattcttataccactgccctggttcaaggcttcacatcttcacatgctttttttttttttttttttttcagagacagggcctcactctgtcacccaggctcagtggtgcggtcatatctcactacagccttgcactcctgagctcagctgattctccctccttagccccgcaaagtgctgggattacaggtgtgagccaccgtgtccagtggtatacttcacgtattcttataccaagtatgcagacaattacaatagctttctaattggtttccctcaaatttcatctaattccagcatacttttcacagtgctctcataacatttatagttcctgagttataaatctccctgtttaggtagctcccctcttgcagtagaataaaagacaaatctggccccattctaactttgctagtcttctctttcactctactctttcatgtcaccttcactgtttccagaacatgacctgcagttggccattttcattgatttgcacatgctgtatttttctgccttgtaataatctatgaagtatctgttcaatctatgaggctcaactcaagtggcagtcttcctgaagttttccccagccccttcttgtttgaattaacttctttttcctctgtattcctgttgatgtggtgtataattttggtagttgtttacacagttttctccaccagaagaccttgaaatcaggtctgtgacatctatcattgtatttcacacatgaccatttacgtcttaattaacaataaatgtttgttcagtggaagtcaattattattaatgtgaaatttgtaattaattttttaaaaaatttaataactgagagcaagcaacactattgttcattaggaatctatagcattttcagtaaattagtaataatgaatgcaaggacaaaatgtattgcaagtctagtactttttatctagaaggtatgttgaaacacactagaatttttgctttctaagtgcattaaaaagccaggtggtatacatattttaatttaaaacccaactacttatattactgagtgatgaaatggttacttggtttagttccttgacgtttgttgccatctagtgtggcatttgggtatcacatgctaaatagaaggaattatatatttacattctttgtggcagtgaaaatgcctgaggattttataagaaaataaatatataacttgagaagtatataatgccatgcaaacattcttgtgtggaactaccttggataaactccctactctcaccactttctaggtctctgatttgggcaagttactgaatgtctcaaagtaccagtttcttcaattgagtgataagaaccaattaaaatgtattgagagggttaaataatccatgtataccacttagcaaagtatctggcacctagtaggtgctcaataaatatttttgtttgaaaatggaagttatttcaattggtgataattttaaaagaggaaaagaattcacctgggactaaatggagagaaaaagtagaggcttgtgcagtcacaccttgataaaaagctacacgaagcagatgaaaaggttaaccaggccttaggcctgcctgcttgtgttggaagggaaattgttgagaggtatgtgtaaaggcctgaaggcacaggctgtggcatgaagttaccataagcatatctgtaatgatataaccctctaaggaaaaaaaaaattttcttttttactcataacaacttgaacaaagtatgtatttccaatttgctaagacctatcctgccatatatctttgtgggtaagtggtgtgaactttttaaaaaagttaattattatgtatacataataattgtacatatttatgggttacatgtgatattctgaagattagtttttaaaacagcagcctggtaggttgaacaaatatttacaaagactttttctcccttttcaaatatccaaattattctgtttcttggattacagggagtcagaaaggcaggaattagaaacctggattaaaaataaaatcagaaaagcattgactatttggttatagtcacaaggatagaaaataacgcttcttgatttgcacattatctgtcccaaaagaagtgtaaatatcttgaaaaatggtacatagggatagactgataaatttctggttagcaagggtttataaattaaaatcaatagtttgcattattcataagttagatgtttgaaatgtgttaatctttttaattttgtgggctttattcataaaaataaaaatgtttgtaagctttaaagtttatgttcaaaggtgtgagctgtatatttttcataagatcttaattccttagttatgaattattctgtcacaaagatttcttgaaaactaaccctagcagttgggaaggacttttatatgatctacaataggtttcctgttttaaaattttagttgactagatataaattttgttttcgaaaatattttgactgcctaagatagtagtgcctaccctttggcttaataaaaccaggactgggaatatcaagtccaataaactgtgtttgaaaaaaagtgttaatatgtcaacacagaatgaccacagctaaagaaatttcccagaaaagaaaaggtaccttcaggaatgagtctgctgggtggggggaatgtataattccccaacttctcaagacctacagccatttccaccaaggaaagggccgtgttcagggaaagggagagaagccaggacttgggaactactgagagaaataacagccgcaggccccaaattaactttgtcacctataaagatctatcatttaatggtaattgcctgtttatagcattcagttactataaaattataatttataattttatagaaattaaaattataatttataattttatagaaattaaaattataattataattttatagaaattaaaattataattataattttatagaaattaaaattataatttataattttatagaaatttataattttatagaagttaaaattataatttataattttgtagaaattaaaattataattataattttgtagaaattaaaattataatttataattttgtagaaattaaaattataatttataattttgtagaaattaaaattataatcatttgatgatagttgattgtttactgacctagcctttgagaagtcagttattatgtctttactgaatggttataggggtactcaatcgacagggattctgaaactaggagaagaaactctagaattaagagagagctttaatggagatagtgtataaataattgtttactagacccaaatcttttagtatgtgcggtccagtgtgagagagttatctttagaaagaataaatcatttttctgattccaagtgttactacgcttttctgttttcttcactgtgaccggacatatacgttaaaatcaaagcaaataaaagtaaaagctatttttgtttgtttgtttgttttgtttgtttgtttttgagatggagtctcgctctgtcgcccaggctgtagtgcagtggtgcgatctcagctcactgcaagctccgcctcccgggttcacgccattctcctgcctcagcctcctgagtagctgggactacaggtgcccgccgccacacccggctaattttttgtgtttttagtagagacagagtttcaccgtgttagccaggatggtctcgatctcctgacctcgtgatccgcctgcctcagcctcccaaagtgctgggattaaagacatgagccactgtgcccggccttagaagctatttgataatatggaattgttggttacacgctaagagacatcagtaaccagttttttgtttgtttgtttgttttgtgtgttttttggggacggagtcacactctgttgcccaggctggagtgcagtggcaccatcttggctcactgcaacctccgcctcctgggtttaagcgattctcctgcctcagcctccctagtagctgggattacaggcacgcaccacctggctcagctaattttcatattttagtaggacggggtttcaccatgttggcctggctggtctcaacctcctgacctcaagcaatccacccgcctcagccttccaaagtgctgggattacaggcgtgagccaccacgcccagccaataaccagtttttaacctaatatttttattcagtgttttgttgcccattactcatcatcagccattggtggtggccattcctaatagagagaagaccatccacaaaaccaaggcctcagcagtggttttgtttacatgattttacagcttctcactttgtgcttttcactgtatcatcctatcttggcattacacctcttatcctgccaggattatttactgttgcttgttctttagttgactgagttctttgaattgattctgtaggtgcctttcatggtagcctggttttagatcttcagtctcttctgctgttcctatacttaatgatgatgactcctgagtttttgttcagttgaaaactttctgattggatatattggtttatattaagtaagcgttttgtctattcataccagtagcattcatgatatcagggagagttatgaacatttactcaattcatgtgaaatatttttcacaagagcaattacattttgaatcacaaaagtaactcattcatatttcaagctccaagggcttaaattatagaaaaagtatgccttttcatttattttaatatctaatttaaaatttccttttccaggcattctcggctggaattttgacttgggactaattccctagaagaatcactttttactcattgtatttgtttattagttaatctgagacaactgaattttacctttatattttatgcctgggagcatagaaacttttcagaagagaccaaaagaaactggagtttaatgctttccagatgaagagaggaaaattcacatatcctagatatttattgtctgtatttattatagctttcaccagagggaagcataactatgcataaaacttacagtgcttactaaggccatttccatctccattaaaatcaaatgtgactatgaaatttctaatcatacagcatgtaagtcacatgagacctggggttctttctaccatttcaggggaaaagagaggttgtgtgaggtggatattgtacataagggccactggaataagactataagatactatagtaccttacttttattaggatttttaaaaattgggattttactatgcaatctgtgtatgtaactaaattacatttgtaccccatatatttatacaaaaaaagacctccccaaattgggatttttgaagtcatatttcattattgggtgttataaataaagatattgtaaaagtggccaaaatgaagttagagattttttatttctggaaatgcagagtgggaaatttacagtaaaggacaatcatgaactttaccagaagtggaagatccttataaaactaagtagtgaatactgtcttgagtctttccatttaacttacgattattacataatttttacttcagttgtatgtttaaggggagtgaactaaattttctcttagttatatttaaggaaacttgattattatatagtattaaacaaaagatgcctgtgtgtaatgatatattcaacatttcattttagtattttgatctatcatttgaagtattccaataatttttatccatgagcaaataagaaatcagttaaattggatacttacgtatttcgtgtagtataaacatgatatataattgaaaatattagaacacttggtgtttctggttcccttttttaaaattctgactcatctgtggccgtcatcaaggttcattacctgaattttgtcattgattaattaatatggctttaatcatgaaaattgaaatatgtcaataaatgtaacatttggatactcttttaggtcaataagtggtattgataaacaataaaaaattattctaatgggctttatagtgagtttttgctattttaaatatacttaaagcttaattatgtcattttacctatattttttccaaattctaacctcctctttcaatctgttctatcctggcaggctttaatccagtgtgaccagttgaggaaggagctggagaggcaggcggagcgacttgaaaaagaacttgcatctcagcaagagaaaagggccattgagaaagacatgatgaaaaaggaaataacgaaagaaagggagtacatgggatcaaaggtacttaaggactctgctgttatccacattgcagaagaaaggttttttatgatgccattgatgattccataggctggagttcttgaatgaactttaaattttaaaatcgttattatataagtagttaaatttcgtataatttagaattcataaaaatgttttatcttttcatatatttctcaatagtttatgctgatcttttcaaataaaataatcagttagattccatacaatgaaattacaaaatttactttaaatcctgccattctgttggattccctctctcgtgtttcccagagtcgtgctatgaagatacccagattttatttcaaccttggctaaatcaaggagagatgacttcccctgcattatctcctacccctaaattaaatatgcagaagatgaaacacttgtaaggaactgagtaaccaagaaaaagtgattatgcactctgtatgaaatcagttctgacaaattacatgatgaataatgacggtaaccagatgaagggagagatttaaggcaaaaggaacagataacatgaaacaagcagtgtttgaaaaggagttcacaaactagaatacagagttgagtgggacctagctttaaaattgctaactagactcgaattgagcaagttgtggtccatcaagtaaccaaaacaactgtgttacatgtttgtttttaaaagtggactcacagcttgtactctaaatgctatgttgttatcagattcaatgtgtgataattaacttattcagtaagtatatactgagtatgtgctgtgtgcaaagcaatgtggaggcctaaagatatgtaaagagaaaaatcacaacttctgccctatgagttttaagtcttaataagagtaaactcaggcatttcctgtaaatgtccttgtcttcttatccatttttaaaaattgtgtctgtcaaaaccctactacctaccttctctgccctggattggtgatctctgctggtaaaaatcacacagccttgcagatgacatggctgtagactccaggtcttcggtgtccacggtcctttcagtgctttctagcagtcctcttttgccttcctctctcttattcattccacactcaacagatattaaccagaggggctgggaatgttgtagtcacaggaacgatgcagtttcctcatgaagcttacaaactcgtaggagaagtagatgttacacaaatgttttcataagtgagttttcgatcatcattgtgataaagccataaggttcggtttaggatatcgtgggaatgtgtaacaggaatctgaccttgtctaggcagtcacgaaagactttcctgagtaagagatgttgaaaatgagacctgaaagcattgatgaatggacaggtgaagaggggaagagggtttcaggcccaggaatataacacacccaagactctggacctggaaagcatcgcactttctaggaatttggagaaggccctgatgggtggagcatagagagagaggagcagagtagtgggaatgagtttggagaattatgttgggatggaatcatgaatggctttaaaatccatatgaaggattttcaattttgtccaaaaagggatggaaagccattgaatggctttgaatttgtcagtgtcacgatgccatttatatttgagaaaaatcattttgtcagtggattggaaggagaagcagaatagatgcctggagatcagctggaggtcattatcgtagtccaggtctggaggtgactcacagtccaggtctggaggtgattatcataatccccctctggaggtgattatcataatccagctctggaggtgattttcgcagtccaggtctggaggtgattatcacggtcccggtctggaggtgattattgctgtccaggtctgcaggtgattattgcggtctcagtctggaggtgattatcacagacccggtctggaggtgattatcgcggtcccggtctggaggtgattatcgcagtccaggtctggaggtgattttcgcggtccaggtctggaggtgattttcgcggtccaggtctggaggtgattattgtggtccgggtctggaggtgattatcgtggtcccggtctggaggtggttatcgtagtccaggtctggaggtgattatcgtggtcccggtctggaggtggttatcgtagtccaggtctggaggtgattatcgtagtccaggtctggaggtgattatcgtagtccaggtgggaagtgatggtatcttaaatgcatttctttaaagactgtttcaaatcacttgttcttctcaaattctctataataccatttttcctcttattctcagcagagagccttacttaactaacaaagaaaatggaagccgttgggtgatgaccacctcaactatttctcttgtccatgccttaaaataaattttcacctgtattccaacccagtctgaatgggaaaggtgtcttcctaatcccttccccttcccatggacctcgtctcctttcaccccctcaaggaactcattccatttgtttgttccacttttctgaatcaatctttccttcactacagtctctttcttatcctcaggaaaatattttcagatgtctcttactgttgaaaggaacaatctttcttctaatctgtggttcttaatttttggcacgcaagaagttctaaaaatctgattgtccaaacagtaccccacacccattacatcaaaatgtctgagagaagcatccaggtgtcagtgtgtttgaaactcacctaggtgattccaatgtgcagccaaggttggaaaccacgtcagtaattccatctccctctttgactctttctcttaatagtcgagtttcttgaaagatttgtccatacatgttgtctttattttgtcacctctcacttactcttcagcccactgcatttcaacttccatgccacagccagtgaaattaccattgctatgttcactgaagatctgtttacactatatttactgattttttttcagtcttattctccttaaaagattctctatgatttctttgaattcatattcttgatttgggagaatgatgatgtgtgctttttacattactctgagtttaaagtgcctttgagacaataaaggagacacatccagaaagcagcttgataggaggttctggagtttagcagggagctaaagatttaggtgtctttagcagtactatagcttgaattccatgtatatatagccttaggacctaaagcttcaagactaaagctatttgatttctagatccttaactgtatactgagctcccaaaccagctttactttccacctcctatcccagtggatccactatttatccagttatccagcacagaaatcttgtcacccttttctcccccgtctttctcaccccacacatctcatcatcaccaggctctaagacttaagcccctgagcatttacattgccttgtctctctatcctactgctaccatatctcatccttggatggttcctatagcccctgtggtgtccttgcctccagtctcacctccttcctatctgttctccaaactgcagctgggatgatctttctcaatatgtcagtctcttgctttaaaactcctttcacgtctccctgcaaccttgaataaaatttaggatcctttatcatagcatgaagactctacaatattgttcctctctttggctctccggtcttatgttccttcatttttcttctttgcaccctcaccacactgacctacttgtgcttccccaagcatgtacatatgcctctcttccatactgttttttccagtgcaggatattgcatgtgctttgccctctgcctagaggagtcttcctctgccctctttaactgattcttcagagttgtttgtttgtttgtttgtttgtatttgagacagggtctcactctgtcacccaggctggagctcagtggggtgttcacagctcacttagcctcgaccacttgagctcaggtaatcctcccacctcagcttcccaggtagctgggactagagaggtgtgccaccatgcctggctaattgtgttttttatagagacaggtttttgccatgttgcccaggctgatcgcgaactcctggggtcaagcaatgtaccctccttggccactcaacgtgctaggattacaggcgtgagccactgcgcgtggcccagaacttttcttggtaccacctcgtctccgcgcctcccatagctgaattgggaccgtctcctgtgggctcccatagctcacttcattacaaattcatgtcgaatagcttgcctcccctagttcagtgagtcccttgcatgtaacatcctcaatgcctggcacattcctctcatgtaaaatgtgctcagtatatattagatgaatgaaggaatgaattacaaggaaaagaaaaaagtccctatgccattgggaagttatggctaaaatgctgagagttcagaggatcagaactgattgtctgcaagagatcatggaaggctttggggaaaaaatggcattttcgttgagcttccaagaatagatggggtttagaaacgcagagtatgggggaaggaacgccacctgtaaccaatatgaataagacatggaagggagatgaagttgcgaattgagtgttgtgtgagagagaatggtatcaatagcaaacaccagctattgttcacgcctaggaaatttgtattttttggttgtttgctggaaaccatttgccttgctgagtagttctactgtgtagaagtatgttgatgagaattcctgataagaaaggaaaaacgaaggctgaagtgtgcctggcagtattccaggtgccttcatatgtaacagaacctctcttttactgacagttgtttcatgaataaaggtggtgacagaaatgcagcacattttttatgtatcatttatttatttatttatttttaacttttagattcaagggagtacatgtgcaggttttttacttgtgtatatcgcatgatgctgaggtttggtttacaaattatcttgtcaccccctacataagcatagtacccaatagttagtttttcaacccctaccccactccctccctctcctctctagtcatccccagtttctgttgttgctatctttatatccgtgagtacctaatacttagctcccacttgtgagtgagaacatgcagtattggattttctgttcctgcgttaattcacttaggactacggcctccacttgcgtccatgttcctgccaaagacctgattccattcttttttatggctgcatagtattcagtggtgtatatgtaccacattttctttatccagtccattcttgatgggcacctaggttgattccatgtctttgctattgtgaatggtgctacaatgaacatgtaagtacatgtgtctttttggtaagacaatttgttttctgttgaatatatatccagtaatgggatttctggtagaatggtaggttctaagttatttgagaaatttccaaactgctttccactgtggctgaactaatgtacattccaccaacagagcagaagtgtccttttctctgcatggtctgttgttttttgagttttgaataacagccattctgactggtgtgaaatgggatctcattgtggttttgatttgcatttctatgatgattagtgttttagtctgttctcgcactgctataaagaaatacctgaaactgggtgatttataaagaaaagagctttaattggctcatggttctgcaggctgaacgggaagaatggctggggaggcctcaggaaactttcagtcatggtggaagggaagcaggcatgtcttctgtggttggagcaggaggaagagagagcagggggaagcgctacacacttttaaacagccagatcttgtaagaactcgctatcatgagaacagccagggggaaactgccccgacgatccaatcacctcccaccaggcccccctccaacatcggggattacagtgtgatgtgagagttgggcgggggcagaagtccaaaccatatcattcatgagtgatcttgagcactttttcatgtttgttggccatttgtatgtattcttttgagaagtgtctgttcatgtcttttgttcattttttaatggggttgttttctgcttgttcaattgtttactttctttatagattctggatattaggcctttgtctgatacataatttgtgggtactttctcccattctgtaggttgtctgtttactctgttgatagtttcttttgctgtgcagaagctctttggtgtaattaggtcccacttgtcaattggtgggttttgttgcaattgcttttgagaacttagtcataaattctttcccaaggcccatgtaggaaacacccggaatggtgtttcctaggttttcagctaggatttttatagtttgatatcttacatttaaatcttcaattcatctagggtcaatttttgtatatggtaaagggtaaaagcccagtttcattcttctgcatatggctagccagctatcctagcaccatttattgaatagggaatcctttccccattgcacatttttgtcaagtttgtcaaagatcagatggctgtatgtgtgtggctttatttctggatctctattcgatacaatacatatctgagctagagtcattgaagttgattttgtccctagtaagccctggctgacatttgatctcaagatcctgctctaaataaagatgtatgaataaagagctcacagtggtcctagcactgaggtcccagctctcaccaggaaatggcagaaagtggttttggagtaaaaggatttagagttgaatccagcttgacctttctgtgaccttgaacaattcacttaacctctctaagtttcagaggagtaaataaagttaataatacatcaagaattgataggattaagtgagataatgtttagaaaatatctaatataatgtctgacttaccgtgggcatttaataaattttagcttgtggctgttgttttagagaaagagagacggagccttcttggatagatttcttggcccttcatgttagtaaaagcagacagacttttatataaagcccagctttaccttttacttattagtttgaatgaacttgggcaagttacttagttttctgaatctcattttttcaaatgaaaattaattccatataattccttctctaggggatttaattattattagagacagggtctcactgtgtcacataggctggagtgcagtggtgtgatcatagctcatcgtatcctcaaactacttggctcaagcaatccccctgcctcagcctcctaagtagctaggactacaggcgtgtgccaccttgcctggctaactaaaaaaaaaaattgtagaattggggtctcattatgttgcccaggctggtcttgaactcctggcagtcctcctgcctcagcctccaaaagcagtaggattccaagcatgagccacagtgcccggcctttctaaggggatttaaagagagaatgcatatcacactgcctggcccaagaacataatgactgaccagttaatcataacattgtaagtgctaggcagttaaagttagtgctagaacaagaatctctgctttcctaactgtaggaatacttgtgaaacgtatagattttctttctttctatgttttttttattcctcccttacttttcttttttttttttttaaattccatttgtgtgggaagctgtcggagaacagatgccttctacctagacaggtttgaatcattccccatcaacagttcttgctgtgagtttgtgtgttatcttcaataatggtccttggtgttgcactgagcactcagctttgttacttcattcagtcattgatcatttatttattgagcaccccctgaggtccacacgttttctcaattgctttccttgacagtatccattgttaaaatccttaattcttgtatctcttgcatagggagtacagcttcataccaggttcaatacactagggactgctctgcagaaatttctatcagcctctcccaacctgggtgtccttgtctcttccttgcccctgtcaaagtttaaaggactcacctgatgtcaacgtcctggacatccagcagtgttgcagctgtgtctgtgttacttctggctctgcaacagatgtggatggagaagctcctgccgtgtaatgttgacttccagatggtgggtggggaggaaaagaaggtgtgacaacaggaggggagacctcagaaagtggggtgggcggcaggagggagcagacagctagtgggcagaggacctcagaaagtggggtgggcggcaggagggagcagacagctagtgggcagaggacctcagaaagtggggtgggcggcaggagggagcagacagctagtgggcagaggaagggaatgatgggtggcagagggaggaatcctaaggaaggggagagatttgtgacatgccttagaagagaaatggactagaatttataattagcaaaataaatgtcggtatatttacttcaaaaaccatacaatgttgtttaccatcagttatgtatgtccacataaataagtaaaatatgatttttagtagctggtaattaaagtttgttcctgtcatatggttccagaaaagctataattacacattcataatatatatgctcatgaactcgaaattttaaattgaaatgaaattgatatttttgatgttatatttaacttcttttcaaccttagttttatattgtaatgtgcccaagaatattttttagtttgttattagtaaagctaattgtatgtgaaaattagatttgtagacaatcctttgatgatagggatgtgtaaaaaaccataagtcaaatatgaaattctccactaccttcagaaagttaattaatatatctgcctaaattattttcatagggtcaactttaactagttctgtagttcgaaggcagacacctatcttcgttttattgatgtcaggttcttaatttactaaaactttggttcaatgttgatttttatcatagaattttagtaattgatttaagttataaaactgaattcacacccatgtcagcatacaatggtaagtttcaagcatcattatttaaaatgtgtcaccagttcttgttttaacagataaaaattgataggtattcctatatgttctgctgcttctacattttaaaaactgccagtacagtatgacattaagagcctagaagagtgacttcctggaaaagaacaaaacataattggaaaccagaaactataaaggataaatctaagatctagaaagcatttctaatcttgagaagaaaaactgagaacctaatacccatagagtccattggaaagccatttattctaagtatttactcattcatcaaatatttggtacctcttgaggaacttctactctaatgaggaaacagacaactaaaaacagtgggatgagtactgtggttgaggtacacagaggttgtggtgtgatggaggtatatatactgagattgtaggagcacatgccatagtgatattcaaaatattaatctttacagtgtgggaaacagtgagagtggacacaggctacaaacaacaggcatgactgtctcagtgcacacaagctgaatatcaaccctgaacgtgggaagggtcacctattttgtgctgggaactggagtcaaggaagacttcctagaggagaggagataatggctgagctgaaacctacatgagaaatgagggagaactagataataggggggcggttggggttttaccaacaaagggcactgcacagagcctcttctttgttggtttgcgggaagggtagtgggagccatagcagaccagttgctctctctaaagaacttcctccttaactctccccatcagtccttttataccttccatgtggaagaagggtttaagagttgtatgcttctgtatctcctctgaatttatttatggcactctgtttcataacttaattgggtgtttgataactgtcactttagggtttcaaccaaaaccttgactttatcatcttgttatacatttttcaaaatgaggttagagatcaggggaatgaataggagagaagtacatatttcagttcactgggcataggtgaatagaggaaggagaaaaatgaacatacccaatccacagagaaatggctcacagagcccagtgactatgctgagacgctattaattcaagaaagttttagtatttgatttgtcaaatgacattattgtttaggacttttattttcccttacagatgttgatcttgtctcagaatattgcccaactggaggcccaggtggaaaaggttacaaaggaaaagatttcagctattaatcaactggaggaaattcaaagccagctggcttctcgggaaatggatgtcacaaaggtacagaaagagattttagtgtaatcgttacttaaggaaatatttcctttgaaaaatgttttcctaatgtacaaaactcttactgttatcaggaggaagtttggagtagaaaagttttgtgatttcaagaataataaaaggccacctaatggttactcagcaaacattcagttactacatgcagcccctcagtgggtattgcatgtgcaaggatgaattagacaccagtcatggccttgaagagcttaagggttaagtggcagagacagacttacaaataaataagagttatattactttaattattgaatatttgataaacctcatttttctaaattaattaagagtgctttgtttttgccgtagatagcataaggttggtgtttacaataattgccaaagacatatattgacaacttaaaaggtgtgcttgacataaaaaatcttccacttccttttccttttcagacttggtcattaaaataaagattctaatactacatgatcttattggtgcttaaatttatactttaaaatactacattgtctgtgctatgggcatcactggttcgtgaatcaagaactaaaatgtttaatggtctttactggcaatgattaagatacatattgtaagaaatactagaagtccatctagatttcaatagttaattgctttaaaactaagaaactaataaaatcaatttattttttaccactaaaaacacagataatttgcttaaaatactctttgcatattaccttttattcttcaatggattttcctaaattttgacatatttgtaatgccattgttgctctataattcagtaattaaaattaattttaacatgtattaggaaagggagccattttaccctttttcttgagtttctataattctccatttgcttttaaaaattcctattagctaatgtagaagtttaagaagctcaaatttttgtgtggagatagggtggaagtgaaggaattagttcagaaggatgggaatacttaacctagatttataggtgaaagctatgataagacagttttcagttgataatagagaggcagctttctgttgaaatcagtacagcagagagagagttctctgtctcaagaactagctgaaaggacatatacatcagaagagcgattagactaaatcgccttgaagttgcttccaacgtggagataacatagttctggttcaatttaatgtgttaatttatttgaaatagaatttgagtgctgtggataaacatagcaaatgctgaactgaaagtagtaaagcagggaactgtaggagtgaaatgaagggataaaataattttaaataagacctgctgcttaaacagtttttacataaccagcttgtattggtgttgggttttaaacatcatggttgtataattattatcttctgatgttatcagttcggggttttattccattttattcatagacataaatattaatagtgaacaattgagaaagaaaataaagtatggctcctcatttttttcctgtcactctgaatttgtaatttttatttaggtttaaaattaatagtttttataaatttataatttttgaaatcggaggaataaactctctcacattgaaggcatttgaacttccaatagaatttttaataacttcattattgttctagctttctgagggctactagggagaagcctgttgactttttcttctgtcttgtcactatagcttttaaacatagattaatttatttttaaaattacttttaaggttctgttttgtttgtttggagacaggatcttgttgtattgtgcaggctggagtgcagtagctattcacagacactaccacagtacactgcagtcctgagctcctgggctgaagccatccttctgcctcagcctccagaggaactgggactacaggcatgcgctaccatacccagcttaaatgcatataggttttataccttagtctattctaatacctcagtaatgatgaaactgatttctaaagtttccaaaatcattatttttggagaaataccaaatacttgaaaagttccaagaaagcataacggtgagataatatattaagagccatatatttgtaaattagaagccaacttagctgacttgtacattaattgaactttctataggttctcagttctctcaaaaggcccataatttgcttgtttagatttatctgctaattacacttttcaaatatatttccatttctgtagcagtcctagattcgaaaaaataaataaaacaaagttcttagtgttaagtatagaggatgatacacaacacttttaagatactatgtgtgttcattattggtgccgtattacaattatttcatttaaatgcatattttccttttatattgaatgttacagtcataagtgcatagtgtgcttagttccagtctatggcttttgccagaaaatcttccttaacttgaatacctcatattgtgtatgataagatgacatctgcaaaccttgcagtcaatactggatattacagacctagatatcaatagtatatctatcagcagacaaaaattcctttatacatttccttttaaagagcataactgatgaagtctttaaaagaaaactttgtaatatagagtgaatatttaactgtatcaatgtgaatgaataataacatagcttaacattttaactactaactttacctatttaaaggttagatgatagtgcattttggttgataatatgcaattgaaactgttatataaaataatcttgggcacattacttaaattccttagttatgcatttatttatctgtaatttcaagttgttagaatcaataatccctggtgttgcttctgaatcttaacaagctacgttgaatagtctaatagaaaatggcattcttagaaaagttttgttgtattttatctatatgacctctagggggcaccaaaagatctaattgcaggcattgcctggtagattccagcaggtaatcatccagttttttacaatctaacaggtgtgtggagaaatgcgctatcagctgaataaaaccaacatggagaaggatgaggcagaaaaggagcacagagagttcagagcaaaaactaacagggatcttgaaattaaagatcaggtaagagaggacacagcataattgcagcaattatagatatgagtaacattctttctcaagttgatgttgttttattcctaatttatttatttgtattgtttctaactaatgggatgatccagtttacactgttaggaaaatttcttttatagttgcctaaaattatcacctttcacatgaatggtgagaatacaacagcatgcatataaaattccaatctgacaggtcataaatatacatttggatatgtgtatctattacttacaaaagtaaaaagaaatgttctaatgcacagtttgaacctaaaatatacatacataaagttcttgaaagatgccaacttgaatccaattttaaatgaaaaagtttaaaattcgtaagatgagatgagttgatatgtaaatatgtcaatcaaattgattgttggcagagtgaaaccagttttaactaagataaccatgaatacgtttgttcatgaagcctaaatacagtgacattagaaatgttagtggataaaagctgcgtactttaatttcagtttgaacagatgttttatgttatatctttattgagatgaagtagataactccaattttagttgacaacatggataaagtttttagagaggcagttctaataggctgacttttgattttctatttttatgttacagtacaggaccttgaaggttttcattctttgtattcaatgaaagcaggttgtttattcaattaaaatagtaagactgggttcttagtgtcaatattttaaaataattgttttagaatttagaagtaggtcgctccaaataagttttttttcaaatatgtttctagttcgaggtttttcatcatattttccaacatattttctcttttgagccaatgaagtctttacaacaaatgatgcaaagacaattgggaaaagtattgaaaatgaaagtgataatgaagactagaacaaaaagcttttcaagtcataactgaaatccttagtactaaattaaaatcctggcaaccaaagtaaaattctgcttttgtaccactatatttggtgttgtaatgggttttacattttcagaagacttttaattattaacatgtacaaataatgaaacattttattgcatccagttgggggcgtgcctgatagtggaatggaaaatgctttctgtcagggactgaaggcctaggtctactaagtttatcacagataacttttctttcctgatatattgtaattttttaaaaaggaatcaatatattggcatacttttggcctttcgtattattctacagcattctgacagcataatattttggactaactgcaaaaatacatcaggaaagagtctcagttatttaaaattccattataattttctagaggaaaaaagatcagggacaataggagtataatatcacttgtaaaggaataacttgtttagaagcatttgcaatattagaagtatttgcagtattaaatctcattttaattaatccgtgatggtatggaggctaaagttgcaggatttacaaggagcagttttcatttgtaaacgttttctgataatagtgaaacaatagtagttttcataatgacgtttagtggtatgtttttagatagagatgtgcctttttaggaggtcacagctttaggaataaaacctctgaacagttacaagatgtttgtgatgtgttgtgaagtgatgtgcttgttaccatttttttttcccagacggaatgtgaggaaatcttataggtactctttttaactgttttgtattgaacagacagtttcagaaaagaagtcgtggtgtctcattccatggatgatttggagtagcaaagcagcaattgttctttggtctttcagccatgacctgaccttctgtctgtgagaccaaagaactactttgcttggccaccatctgcactcaagagagaaatttacatttaacttttaaaagcggggcatgttgagcatttatctgaaatacctacaataatataaagtagattaaatgtttaagtgttgtgtatcttacaattcagcatcacaagcaggctatctgtaggtttgcaaacaaggtgttcttcataatatagtcattttattcatattttagttcatctgaccacttgatacatttttaaagtgggtgggaaactgtgagattggaatgtgtgagaacaacagcttttttgatgtatacaaaatagggcaaatggttaaccaccaaaataattttccttgtgacctgagccttggctctggcataattagaaggaaaggttaggagagtaacaatggcagtcgcttccacccactttcttcttttcttctttatattgtgtcaggaaccgatgggcggattatccttcccatcaactcctttgtatctcttcagcttagagaattcctgtcagcctcagaggatgcttcttgcaccagaaaaagaggcatttggtatggaggagaatgtgaaatatgctctttgatttttatgagaaatttttttaggcaatggttatacacacacacacactcgatcaggggaatttaaaaacatgtatgagggtatagggaatattgtaatgagtcctcacatttccatcacctacactcatcattttgcccgtcctcttcctcagtcctattccatcactcatcattttgccagtccccttcctcaatcctattccatcactcatcattttgccagtcctcctcctcaatcctattccatctatctcacttttttctctctacttctgtcctcatcgtcaccttcatcttctttgtcatgttttttctgctccaccttctcatcttcatcttcttctgtcttcttcctctacctctttttcttcttttgcagaagtattttaaatggatctcagaccttatgttattttactcataaatacccatgtggatctatgaaggatatttttacatactatgtcattatcatacctaacaatgttaacaatacttctttaatatcaaataacacccagcctatattcacatttctttgtctcaaaaatgttgattttacagttggtttattcaaattaggagaacaagtatgtttttgtatgtccaattttctggtgttaccctttttaataggaaataaacagaactcttagtaaaatttcatctttctttgttgttgtctgttaaattttgtacataatgttttgattatgctttatttttataaaatgcctcattgtcattctaaagaggtataaattaatcctacagcaaagtatgtgaaggaaatggctaccacgcagcattcctgataatcatatcccaaaaggagcttcctcgcatccgaaaccccaaattcagcattaatttcacagccttgtatttaagatttggacatgttgcaggaggccctaacatgacaaggatgagctgacctgaaatgagtgatgcagaaatagagtttttttgtcaacttcccttttggtaaattaatctgagaagacgattctttatagccgctaacctttgattagggcccagtgcaaagtgaaaatacaggacccttttgttcagaaagcaggaaagaagtgatattaaaaagaactaaaatataaaacattttcctttcttcttcagtctctctctccttgcccctcctccctcaccaacccaggctggacatgcattttttttttttttcttttttttttttttttaggacggagtctccctctgtcgcccaggctggagtgcagtggcgcgatctcggctcactgcaagctccgcctcccgggttcatgccattctcccgcctcagcctcccgagtagctgggaccacaggcgcccacgaccacgcccggctaatttttttttttttttttttttgtatttttagtagagacggggtttcgccgtgttagccaggatggtctcgatctcctgacctcttgatccgccggcctcggcctcccaaagtgctgggattacaggcatgagccaccgcgcccggcctggggcgggaattcttacctccctgtccagctctaagatggcagggatgggcacacttgactcaatcctctctaaacacacattcaggattctgccaggggcaaaagacacaggagaacacacacctcccccagtgacatacgcacctcccccagtgccctggtcccaccctaggtggagggacccaccccagcagcagggcagggcgggatagaggaagctggagaggagtatatttctgagaactgcgtagggctgcagtgaggcagtggaaagatgagaccacatacaggagttcagtctccattgttccatcagagtacacctacaaaacacaattctagccgggcgtggtggctcacgcctgtaatcccagcgctttgggaggccgaggtggcggatcacctgaggtcgggagtttgagaccagcctgaccaatatggagaaaccccgtctctactaaaaatacaaaaaaaaaaaaaaaaaattagccggacatgatggcacatgcctgtaatcccagctactcaggagggtgaggcaggagaattgcttgaacccaggaggcggacgttgtggtgagccgagatcacgccactgcactccagcctgggcaacaagagcgaaaccctgtcttggataaaaacaaaacaaacaaaacaaaaaaaaaaaaacacaattctaagatacaattgctaataatttcaagacattgaccacagagtattaaactgcaagtgtaaggacccttctgaacagcacatgtgtgactgcactgatcacgtgcccaagaaactgccataaccagggggatgggcaaatggagattttgcatactaatatatgtgtatatatccccactcacatatacagacacatatgcatattcaatatgctaatgtgcccagtattcataaaaaagtgttagccaactacagctcataggtcaagtctggcctgctgtctatgttacaaataaagttttattagaactcagccatacctactcatatatgtatcacctattgctacttcctgcaacaacagcagagttgaggagttgtggtagagaccatatagcccacaaagcctaaaatatttactgtctgaccctttacagaaaaagttgccaatccctaccttgagtatagaaatacaactgtattttttaagtttcctctgacttactaggatgctgagctttgagtttgaagacccatgtatcttaaataataacaatggttttagagtattttgcagtataacaaatgtgccacatctttagtctcttaaaaatctaatggcattactcagcgagtgtatcactgataatcatggcattttcttattagtggcacatgacttactagtggcttggatgggagtgtaaataccgtatgattttatatttacaattttgtttttaggttggttccaattttatttttcagagataagaaggctgatatagaaagcgtctttctttttttttttttaccggcattgtataaattataattttggagttgtggctactactgagtagaaaacatcaagtttgaaatgactttaatggagcaatcaaagcaaatattcagggtggggtatctctgcaaaagaaatagatccaaaaattttggctggaaaaatgagggcaaaaaaggatttgagggttgctcatatctacagcagtgattcagcacttggacactgacattaaggatggagtgtaaggacacaggaattatcgcctaaattcagttgaattaactagactgttggaagaagtgcatctatattgtatggctttgtgtaaggagaagaaggcctgcctgcaagccctaaaagtcagtccttttttctttctttttttttttgagacggagtctcatactgtcgcccaggctggagtgcagtggtgcaatctcggttcactgcaacctctgcctcccaggttctagcaattctcctgcctcagcctcccaagtagctgggactatgggagcacgccaccacccccagctattttgttgttgttgttgttttttagtagggacagggttttaccgtgttgcccaggctggtcttgaactcctgagctcaggcaatccacctgcctcggcctcccaaagtgctgggattacagacgtgagccactgcgcccggcctatgtcagtcctttttaaagttagagaaatataaaagcaataaagaaaagttgaagaattgtaccttttacttagagaagacttcaacattgcttcacatcttcaaggatttgacaaattatttcaaggaaaaagttaaacacctgatttgagtcttcaatatggacagaacaagaacaaagggatttaactacagcaactacaaatcacaatagcctgaaacaagaattttctgacagtaaggagattgaaattgctgcaacaggccatggaaccttttccctggaagttttagttttaaatagtagcagcaatatgatttacctgaagacccagctcatggacctctgaggtccagtcttctatttgattctggaagcgtcctagaaagacatcgttgtatcttttaaaagtgggtaacagcagtgttagtcttttctacttgaaacctagcacttacagattaaagtaaaatcctgttccgttctattctctgctttgtgtctttaaagctgtgtactctttttcagaaggtttttggggaatatgctaagataatggatgacttctcaagagccagacttcagaaacttatccaactaccacctgcagtctcacttctccctctacaaaatgactgggagaggggccatttgggcctgcctttggtacatgtaatcactcggtcctggtgatgacagagttgctctccagtattcttcacaccctctttcagtctgtagacttagcacattcttgtccctgctccctacgaagacaacagcagttccagagggcttggcttacccagaccagtatgctagacactgtgggggtaataactaggagacccaggtcctacccttagggagtttatattctagttgaggagtcagagtacacattagaacatgccttaagaatacttgcaaagcagcatatcgacaagtgcaaattaatgtagtgtgaacttcatgctggctacagcccatgagagggagaatctggttccatgtgtgtgatgcaataaagcttttttatagcatcttctctaagtatgccctaaagcattgttcagcatacttagagaaatttgtgttcttatcgcagcctaaccaagaattctgagaaaattcttcagcctaacatatgtctaataaatcagcctcttttgttcttgtcctggatgatgcttgaatgggacaagtaggatttattggattatacaaataatttaaaatatgttcatttaataaaagtctaagttattgattgaacttatttttctaaaatgctgtgccaaattactttcttcatctaaaatcatcatgttggtaaaatcacaaaattagcagtaaaaaaatataattcaatttttctgcataaagaagcagttccaaatcaatccagtgaataataccgagttggagatcattggggcatttagcatttagtcacgttgttaatgatttaggcagttgttttctgaggcagggtatgtatacctcattcatagaaacactgacttttcaattaacatgctcaaaaaaagaatctattaatttctgcttgttatttgattttccaacaaagatgataatgctgtttaacataataatttattttacaaaatcaaatgtataagcagagacaacacatctgaaaatagcaatttaggtatatttagaagataagagtacaaataggaaataaaacaagctttcttagaaataatatgccttataggagaaacattaagaaataaatatttgcctttggatgggaatagaaaactgtaaactggactctaagaatattcctgtgtgccctgaagaaatataatgtttgctatattttcagtttcagtggatgacatgtgttttggttctttgaacatttttttgcatgcttgttttgactgtaaaagttgacttaccagccaactgccaacttgcaaagtgccttctcaggtaccaactctgcagttctggtagctaccaggtagtgacagttctttaaatgtgtccatgcagcccaacaagctgagagacattagacataagacaactacatatgctttctttttgtttatagtccagaaatattagtacctatatccaatataaatatcactaattactacatatgcatacatttaaaaaaatttattgtataaacataagcacattaacagaagccagtagttccatcacccaaacagtgtaaattgtttttatttttctgttttaccttccactttttgtacatatgcatctataatatttgcaaatataaatagattctagttttggtttttgcttttttcatttaacattatcttaagcattttttctgtgttgctccttattcttcatagtgatcactttactgtggccatttacatatacctgtaagggaaaatgatagtaagttagattttgagaacagccactatgacagatttagagcccttttgccctaaacttcatatgttgctttaattcaataaccatatattatgtgcactctacttagctataatcaatttctgtcagaaaggagtatgtaaaccaggtatgccaataaatatatgtcaaagagaacatagtagctatcagcaaaatgcaaaaggcatgggaatttgggaggggaaagataacatccttgcagggtggttagaatgttgcctagggccagccgtggtggctcatgcctgtaatcccagcactttaagaggctgaggcaagcagatcacttgaggtcaggagttcgaggccagcctggccaacgtggtaaaaccgtgcatctactaaaaattcaaaaattagccgggtgtggtggcgcgcgcctgtaatcccagctactcgggagactgaggcaggagaattgcttgaacccaggaagcggaggttgcagtgagctgggattgtgccactgcactccagcctgggcagcagagcaagattccatctcaaaaaaaaaaaaaaaaaaaaaaaaaaaaaaaaagaatgttgcccagcacggatagaagaagaaatttatttggttagaaggttcaacatggcagcttgagcaaaggaatgggggtgaaaaaggagggtgcatccaagaacatatgtgtcttttggttccatagcatttttgtataactgacctccattatttcaagtgccacttctctgttgtaatagattgctcatagaaaatgggttttagtaacactcagaatcccaatataattgtctccttgtaatatactgtatgccctgcagtcaggcacagaagtcatggtatcgtttgggaatgtatgcatatgtatttcatttgctttgtagtaggttttatgtaatggaaaaattttaagatttttcaaatttcagataacataaataaaatgtcattttatttacagtgttagagtcatataggattgttttcctagaaataaagaattgacaattatcttgatttgtggaggattagcacatgactgttgatgaaaggtgaaacacagatcatacagggtactactttacttaaggaccatgagtacaaagtcatgactttctgatttagcttttccagctaatttcctgagcaaacctctcagagcctcagtttatttcccagtgaagtgagaagcttggacaagtggtagcaaaagttttctccagctgtaaattcttgcatttctagaaacacaggaagtatttctttgcccctcttaattgtgaattaaatattcataaaatcaacagaaattgcatggagcctcaagttttattctgtattttccagttattcactttcactttataaacatgacacttttgttaagattataaaaatgaattttgactgtcatctgcaattttagacattttcgttatgattggtaatagaacaataaaatgtctagccttgtaaagagttaagtttacttacaagacagacatcatctaatttgcaacaaggattaaagccccactctgaattaaaatttctactggaaagatttgaggcactggcaaactgtcaaaggtagtattgtgcgagagtaaccagcttttgcaagacctgtgaaagtaaatctcttcggccagagtttcttaggtgtgtgaacttatgatgatcaggaatacattggtggattcccactagagaaacgcaccattaatagttaatgctttcactttctgttttcacttgttgccctcataaatgcaagcatggaatgaaaagctgtggtagttctggacacagatgacctagaatatgatcatcttaagattttgctctgggagttctttttaaaatcaatcaaaatgaaaccaaaaacaattttgcaattgtcttagaggttttacagatccctggcatgtttttctgaccctcactggagttcagtatgagacagaccacgctacaaagagattcctgatctaactctaggctgttcatgagtgttagacacacagtgtgagacagatcaccctacacagagattcctgatctaactctaggctgctcctgagtgttaatgagttgcaaggtgtttagagttttcatattactcttcttaacagatggtcaagttaatttaactctttttggtgttaacatctgtacttaagtggatttgttacacttacatttaggaaaaagacaagaaagctgcagggtctttatttctggcctgccttctgccatccctgaaaatttctggagtttcctataggaatggaaaattcttctttgtataaaatctctctacttacaactgaagtcctgataccttctctctctctctctctctctctctctctgtcccctaccctctctccatggtaataaattatacaagtagtagtattagcctttcttcatgagtcaagctgtcattgaaaattcccattaaagtgcgaggggacgctcatatctttaaagaaagtgtggctgccaaggaaacgagggaggtaaaaataaacttttaaggagatcttgagatggaagagaaagaatcgttctactcgaaagattatttcaaatgctaccttttctgttggactcttctttctttctttatgattaatattattattttgggatttggtgttttactctgttgtccaggctggagtgcggtggcacaatctcggcttattgcagccttgacctcctgggttcaagtgatcatcccgcctccacctcccaagtagctgggaccacaggtgcatgccaccacacccggctaattctttttgtatttttttgtagagtcagggtcttgctatgttgcccaggctggttttgaactcctgagctcaagccatccctccacctctgccttcccaagtgctgggactacaggcctgggccaccgcacctggtgtggattcttctttagcttgcttagaatgttctgcaaagaaatctgaattcactcatatggagaggtgattgtcatatcctagtttgcattagaaactttagggtgtcattttcaactaaatttatcgtagaactgtaggagggtcagtgtttcttccctaatatactgaaggtccactatgtgtatagcaaattaagctatgcaaggttttatataataagaaccagacatgtttcattttaaaggcggcgtcaacacagactaacgaatacatcaaatatctgtatgtatttttaaatctatatgtagatatatagctttctatatatcttattaatctataaccttactgtgacttactaatgatttttcttgagcagaacctgaagtttgaagtatctcaatgctgaatttgacataccatagacttacttcaatggctaggagagcaagaaagatgctagaattatctttagttataaaaacaagaagagaaaagaaaagtagtggcgggggggtggtgggggaagtgggaagagaaaatgggaaagactttagaggaagacattctaaaggcatttatactaagaagaattgggctttttttttcctgtttatactgtttcaccttaaactataactcagaagaggcaaacatgaccacctatccatcagtataataatgcatcaggattttcagaagggaaccacaataatggattttaaaaaaccattactggtatgaaaatcccttttcccctacaaccactgctgattgtcgaaaataacttcatgctagacatggtggcttactcccgtaatcttagcacttcaggtgtcccaaagcaggagaatcgttgagcccaggagtttgagaccagcctagccaacatggtgtgaccccatctctacaaaaaaaagaaaaaaaaaatcaaaaaattacccaggtatggtgtcatgtgcctgtagttccagctacatgggaggctgaggtgggaggatcactcacacccagaaggtcaaggctgcaataaattgtgttcatgcactgcactgcagcctgggcaacagagcaagaccctgtctgaaaagtaataataatatataataataactttatgtactttggcatttttcagaagatgcttcttacccacatagcaatggaatttatgaaggtaacttttgggccgggtgtggtggcttatgcctgtaatcccggcgctttgagaggccgaggtgggtggatcatgagatctggagatcgagaccatcctgactaatacggtgaaatcccatctctactaaaaatacacaaaattagccaggcgtggtggcacatgcctgtattcccagctacctgggaggctgaggcaagagaatcgcttgaacctgggagacggaggttgcagtgagctgagatcgtgccactgcactccagcctgggcaacagagcgagactctgtctcaaaaaaccaagaaaaaaaaaaagaaggtaacttttgtctttagtctttcctatttcaatggccacatataaaggatggaaggaaaggcttcagataataaagagcaatggcttggtgggcaccaagggtcagaaagactttaataacttagtccacctcctccattctgtatatgatgagactgtgagtcagctgggagtaattaccttatttccatgcagccatttatttaactaataattagtgataacctattatgtgttgcaaacaaatacgcacaggggtgcaatgaaaaataaaaatatatttactgctcttaacaactcttatagtttggtgaggaagttaaatgtgctgggggctcagcaaagggtgtggcctactgtggcgggagagggtccagaaagattttacacatttacagtcaattgattttcagcaaggatattaaaactcaatagggagcaaacagactttacagtaaatggtgctgggaaaacctgatacccacaggtaaaagaaagaacttgggttcctacctcatagtgtagacaaaaattaactcaaaatggatgaaagactaaatgtaagagctaaacttagaaaactcttagaagaaaacataggcatacatcttagtgactttggattaggtaatggtttcttaggtatgatgccaaaagcacaaagaacaatagaaaaaaaatagataaattgaatgtcatcaaaattaaaaacttttgacctttaaagaacattatcaagaaaaaagacaacccacagaacgggagaaaatttttggtaactcatgtatctgataagagacttgtatctaggatatgtaaggtacatttacaatttaataataaaaagactcctcaatttttaaatgggcaaaagatccgaatagactttttttaaagaagatatgttaataataactatattattaacaaatgattaataaacatgtgaaaagatgctcaacatcattagctatcaggaaaatgcaaaccaaaaccaagatgagaaaccatttcacatctactttggataagtgtaataaaaaagacagataataacaagtgtcggtgaggatgtagagaaactggaactcccccataagttgctggtagaatttaaagtcatacaggctgaaaaatattcgggcagtttctcaaaatgttcaacatagagatatcatatgacccagcaattccagtcctgggtctatactcaagagaaatcaaaacatgctactcaaaaacttctacacggatgttcatagcattattcatagtagccccaaactgccaataccccaaatgtctatcaactgatgaatggataaataaaatgtggggtgtgtgtatatagatacatattacatggcagtaaaaaagaatgaagtaatgatacattctacagcatggtagacttacaattgaaaacatcatgttagatgaaagaagccagtcacaaaagacaacatattgtatgattcaatttatatgaaatgtttagaatgggcaaatctatagagacagaaagattagtgattgtccaggtctgaaattggggacaaatgggagggactcctgatgggcatggagtttcttttggggtgataaaatgttctaaaatcggttgtggtaatagttgcacaactattttatttcctcagtcctgaacttcatgtccaggtagagatttattccctagagtaactaaggaggaggagtgttagccagcaccttcctccttcctcttggtgactagagtgttagcacgtcagtccaattctgaagttcaatcattggaagcctacttacccatagatttgagccacattctctaaaattgatttcattgctaatacagatgaacaggcttgctccatactgttctacaggctgtgcactgcacaattccacagatgccatttgcactatagtcatggcggcctcacagtgaatgtactaaactccgtgaatgtactaaaaactattcaattgtatactttcggtgggtgaattctatggtgtgtggatgatcttaataaagttgttattttagaaaaaaaatatatcatccaagtcatattttagcccagtctggagggaacaagagtgggaagtgaaggccattcaggaaaacaggacagagtcacaaaggcactgttctgtgtgtacctggagggcacaagcgggtgcaacagatgaggaaggaaagacagagccccacaaaactgaaatgacatgccagaagtggctgtaaggtccttaaagtcagggtcttaacttacccttcattgtgtgtccggtactcggcacagaggagacctacggcagatatttatctgttgattgagtgaatgcatagtgagctaagaacaaaccttgaatacttagtgatagtatctaaatgagatgactgagcttctcactcctaggtcagtctttgttgtgctatgtctgatggaaagttttagaatcaagatgagaataactccttttataatgatactcatattttagcagttatatgtgttgaaaatgtttgatcagtcttttttatatttagttgttctagtaagtatataatggtatctcattgtggttttaattttcatttccctagtgatgaatggtactgagcattttttcagatgcttttcttctgtccatatatcttcttcacatatatccactgctaccgtctagttcaaggtactgtcgtcttcagctgtgttattgcaacagtctctttttttttttttttttttgagatggtgtctcgctctgtcacctaggctggagtgcagtggcgcgatctcagctcactgcaaactctgcctcctgggttcacgccattctcctgcctcagcctccctagtatctgggactacaggcacccgccactatgcctggctaatttttttttatttgtatttttagtagagatggggtttcaccgtgttagccaggatagtctcgatctcttgagcttgtgatctgcccacttcggcctcccaaaatgctgggattacaggcgtgagcccccatgcctggccagcaacagtctcttaactggggctccctgcttctcctcatctagccccttcacagcataagggccagagaaagtctgttaaactttcatcagccaggtgaggtagctcactcctgtaatcccagcactttgggaggccgaggcaggtgaatcaggaggtcaggagttcaagaccagcctggctaaaatggtgaaaccctgtctctactaaaaatataaaaattagccaggcacggtggcaggtgcctatagtcccagctactcgggaggctgaggcaggagaatcgtttgaacccgggtggtggaggttgcggtgagccgggattgcgccactgcactccagcctgggcaatagagtgagactccatctcaaaacaaaacaaaacaaaacaaaaaaacaaacaaaaaacaacctatgtctgatcttgtcacccttctgaaaccatccagtggttcctacctcagtagcagtcaaaggcaaagtcaaacagtgaccccctcatggcacgcatctgctgacctacaactgggcagtgaatatagacatttgcatttacctgtctggaacttggtcattttcgtttgggcctgttgtgtcagcttgtccgagctctcttggatcctcttttcaacatattgccataataaattattcctctcaggtttatgtcactggttagcaaggtgctaaccagtctgcccccacgaccacttcagagcctttggacttgctcttttcttcgccgggttctctgggatatcctgtggatcacaaaataacccttcaagtcatcgctgaaatcatctgtgtgagactttcctgactaccttgttttatgttgtaaaccagtttccgagtactcctgccccctttctgctttattttactccatatcttactcatttgtttattatcatctttccttatcacaaccttagcttcataaagttatgccctctttattcatactcaacacatttgcgaaagcaaaacgtgaattgcattgcattgcattgctcttccatttagcaatttggaatggcttcccatttgcatttagaaacatgagtccaaactcctttctacagtttataaggccctgcataatctccccactgcctgtctttccaccctcttctcatccacccttcccctgtccattcagtggagcctccgtggtttgcctttagcttctcagacatgccatggcctttggacaaacatcttccacatatattctttcccactcttcctttgcttaaccagctctttttctttcttttggtttccaattcaatgtctctacttcactggctactaatgtatactctgttattctctcacagcacctcattcccctccttcatggagcttattataagttttttattattttattgttcatttgcttttaaacaatcagtttcttccattaaaatgtaggttgtttgaggacagagacttttacttgtcttattctcttttgtattcagtgccccagtgccctgattgcaattagggtcacagtaactggatggataggtgggtgaagagatggccaagtgactgcctcaagtaacacagtaactggatggataggtgggtgaagagatggccaagtgactgcctcaagtaacacagtaactggatggataggtgggtgaagagatggccaagtgactgcctcaagtaacacagtaactggatggataggtgggtcaagagatggccaagtgactgcctcaagtaacacagtaactggatggataggtgggtcaagagatggccagttgactgcctcaagtaacacagtaactggatggataggtgggtgaagagacggccaagtgactgcctcaagtaacacagtaactggatggataggtgggtcaagagatggccaagtgactgcctcaagtaacacagtaactggatggataggtaggtgaagagatggccaagtgactgcctcaagtaaatttctcattttactacccactacccaatgaatctgaacaagttactgaaaatgtgcaagcttcagttttcctctttgtaaaatgaggatagatacaatgcctaccttataggattttgtaaaattttaggtcatctatgttaacctcatagtacaatgcatgacatgtaataattgctcaatacacactaataattactagttttactaatactgtgatccttagcttttccaccttcatctctctcccatctgtgtcccattttatcacattgctttccagagtcgtgatgattactgaatatgagactgctagtttgaactgcccagtgcatagcagtggagctattgcctaagcttatgttaatctagcatcagagccaactatcatttgccttattgtttatcaaatatgtctcattgtaaattcttattgagcttaaaattcaattaaaacccctcatggcacgcatctgctgacctacaactgggtggtgaatatagacatttgcatttacctgtctggaacttggtcattttcgtttgggcctgtcgtgtcagcttgtccgagctctcttggatcctcttttcaacatattgccataataaattcttcctctgaggtttgtgtcacagacacatttgatcagcacatcggtggcatcctcattaaagtcagtggtctaaatagtatagcacagagagcatcacagagcctatgacctgcagcttccttgtaatttgatatttgctgttctgtcttccatgtgatttgttctaattgatgtttaagaaccagatcatgtttatttttctgtttaagaaccagaccattgccttcttcaaaataattctagtcaaataaaaaaattatttttatgcctactgtgtgtaagtagcttgcctagataccgatgaaccatgtgacagaagcttgccttgatggtgggcaatgaggaaatcgggcatggatggctaagaaatcaaagtgccgttgtaaatatggagcagatttgtagtttggcaggatataaacccgtgttgggaaactcccaatgagaggtcaaaattgaaatggggctgtctgaaattccattttgttcatctagataacctggataaatgggctaaattggaaatttgagtcttaaaatcatttttttgagatttctcctattcattctattgacttactctccattttaaagtcttttgtcctaatcatttaccctatatctctctgttctatgcctattttatttttctttatgaaaatgggtgaaagcaggaattttgctagttttctaattatcacagcatataaattcagtaatgtatgtgaaagtgttttctaaactatgaaaagctgtatacatacataggaatagaatggattgtcaataaattgaagagatgagtttactcctttgtatgtggaagctgttaatttaaaataacacactcaaaatattagctaaaaatctacttcacattttggtgctgcttgctaaaattagttagaaaatataggttatttttgagttaaaaccaagttcaataaattcttaagttcctcaaatagaattttacagaaatatttacataacccacagctaaagtgagttttctaagaactccccataaggtgagatcacgtacaccatgtctcagtacagaaggatttttttttcaatcagttatgtctctataaataaacctagttttgttgttaaaattgctgtttcctcttcacataagaacatgtcattaattttggtgaaaaccttccaacaaaataaggttaaattgtccagttttccagtggaagaggaattattttgtgtcaccaacaagcagagtaacagcttaaaggtaagttgaacacagacatgctgtttgggtggtcagaatattttgcatccaagcataaatgttagtaagagcctataggtgagaatgctttaggtatgtttttagtaatgctttacctctgctactctccttaggatttgggaaccagagcattcatactgatgttctctgtaattaggtacaccaaggagtaacagaaactgggtaggtaggtaggtagagagaggtgacctcagccagagccggtgtgtttgtataggcaagaagaggagctgtattccatggtctgaactattaagtgatccagactacaagaatatgacttccttttctcagttgtttgaagttcatttagcgaaaaattaaaatacagtttcctataaaacaaaatcatttagtttgaactggaaaaacatttgaggttttcttggtttgagagaaaataaacattttcttttgtcctagcacctataccaaacagtaatattgacaaaaaccaaacctaagaaaatgcattttttttcctctaaattaagaaatagtatgtatggctttaagatgctgcttaaaaaaaaagaataagtcttacatttgttctagttgtcagagattgacagaactaataagagaataaaagagcaaaacgaaaaagttcttgctgattaacagttgtctgaggagaaacagacgatatgttttctttattgcattgaaaagttaattattaccaatagaagcttatttatgcttgtaactgagttagcgttgtggcttggcattattccacatttgaagggaaatgggtatcggcgaagagtctggagcttgagttctagtacagttgagtgggcttagcgagtggtttaacttcactggatcccacgttcccacctgtaaagtgaggcgatagattaagatgatgactgaggtgtcttgtgtccctaactgcatgtttttttcctaaaggcctattttgttttttatgaaacaaaatattttatcttcacagggaagtttactcccaaatgtttttgggaccatttagataggagtacactttagaaaaaaatataagcagcacagtatttaaagaacagaaattgtatttgctaagtaaatactgtacatcgaagtcttggaagttagatacaaaataagccaaaagtttcattttatattccctttagcaatcagaatatttgattattttctagacagtttctgtaagagtaccatttggtataagagttttaatttgtgatagtagaaaagtaataaaaatgtgtacaccatctaagagacaaaataattttgccaaaaattgccttttgttctggttaagaataaatgggccaatttcttttacacaataatttttagtagcagataccatatctaaaaaactatatttactatggcaatagtagcagactaattatccagctttctttggaaattgtgacttttgtagttgtcaatacttttatatctacactgaaaaatttttggctttgaagagtatgcctgcatgtatgttgattttcctgtaattttagtatctgggaaaatattccatctgaagcatatgtagaagtatagaaaattgttgaaattccattttgaaatgacctttaggctgctcttcatttaaggtaatagtgtcaattttgaacaaactgtttcaaaaactttatttaatttaggattatgaatggcatccttgttggtttttaagtatttttaacctcatgatgagaatctgagagcattgtaaatacatttaataatgaaaaagatattttctaaacttgaagtcaataataaacttcttgtatttaaattgacttatgaagttttcttaaggcaaaatcagttataactttatgaatagcaatattttcagttcatttaaatttattttatttttatagatagtgaaagcatctgtatcttatttgaaagtgcctgtcattctcttatttattaaaattgctttagtgtggtttttatatttagtcttggtttttacttgtgtttagccatatttctacacatagggaatggtgcaggagctacaccactgtaattagtagtgggcaatgtgaccaagtttttttaatcttatatttcaatataatttcaatgcaattactctattgagtaattaataactttaatgtttagacataagtgaatataattagcccaaaatataacaacataatgtgaaaatgatgtttagacttcacttactgagtcctgaagccctaatattaatacttataatttcctgctgtaaatttttatgaaaactaaataagagtatcataataatttctgttatttactgtagcccagatgattgtaaatttgaggaggaaatgatgtaccttagatgtgtcattggacttgcacttgttttttatcaaaatgatagggaatcaattaatattttaatagttacaaaagaaagtgaagagtgaaatagcttggatattattcatatatagtgtgtatatgtgtgtgcacatatgtatatgtaggtatatatacatgtatataaaattatctggccatctggatcatatatatatgtataatgtctggcacattgcacatagcaggcacatagtatgtgctcaaaaatatttattgtattgaattgagagcttgggaaggaatagtttaagggaataaattaacagtttgctttcctaaactggaattattttattatattttatttttgcttttggatgatttttctcagttggcaaaaaaaactattgtcaaatggtaataaaagtcaataactgtaatgaatattccttttattatgctgtgatatgttttcctgcattttgggtaactgtttaaagataatttttctttggtaattcttttatctaccagcttttatactttttagatttttcatttttattcgccattggaaagactactttttttatatggagatgtcccaccagaaaagattgttttcctggttttttgcagttcattttgaaagaagcaactccaggtttatttttgatttgaatacagctagtgtagcatgagaaaatccttttgaagtgctttcagaaggattaggtcagggttaggtgtagttttttttttacataaagtaaatttagagttgctattttaaaaaattgtgccaatttgttagcaaacacaggtcaaaggtacctttacactggtgactttcacctcagaaacagtgggtgatcttcaccagtcaccctctttctgcttttctgccaaggaagggatcatggcttggtctcagggaagaaaggaaggagtcccagtttcttcctggtacttttgtttactaatgtactaagggctattttattaaatagcattataagtcaacttgaatatattacatatatttaatatatgcattcatgtataatattaatataatatatatgtatatcttaaaatagatgtatatatctaaatattatatgtaaatatacatgtgtataaaattagtcttatatattaacattttaagtggaaaatgattttttctttcattaaattggaatgtcaagtacatggctgacataatttccttctagaaaataagaacctggctagacacagtggctcatgcctgtaatcccaacactttgggaggtcaaggcaggaggatcgcttgagcccaggagttcaagaccagcctgggcaacatgacaaaaccccgtctctacaaaaaaaatacagaaattagcctggcatggtgacacagacgtgtagtcccagctacttgggagactgaggcatgagaatctcttgagccggggaggttaaggctgaagtgaactgtaatctcaccagcctgggtgacactaagacaatgagaccctgtctcaaaaaaaaaaaaagaagaagaagagaaaagaaaagaagggccaaactgttacttttttgagcctttctttctttagaaatcataacatttgggtggtcatagcatattaaaggattccttttatatgtataccaagcaaaggaatataggtctacattagtctttttagttatgttctctccacaaacattataagaccatcatatttaaatgtcccaatatagcattttatagtatgtgcagtagaatagatgccatagaattaccagctttgcaaaacaaggaactgccaaatatccaaaatgttttgagtttattaccttcgttaacatagctcttgtgatacagctctgaacaaaacatagaaacattctcttggatgatagttcatttaggtgggtttgtaagtcattgagcaccattcctgggatgtctttcctacagatacagtaaacattgtagtcctccagtagtcagatactaaaaacagtcaactcccagctgagtgagggggaagagcggaattaggaagccactttcaaaatctgtacagtgatatcagacccttgatatttgtagggacaaatctacaatcttcacaagtgaaggcaaaaacaatgaatttctcctagtaagtgtagtaaggtataacgggtcccttcaacctctggaatgtttataaacttagaataaaaattatttgtgaagccagtgaaataaatcctactactaagataaactcagtgtatttcatcccagtggagtgacatttcaggagggggttatgttccaagttcagcctaaaaggttgaatattgcatgtgaccaaattactttaaaaaaatctcataaattcctcataatttaatggtctacatggatttgtctgtattgattttatgtgcatttagagccatatattcctgccacattggagacattcataccctatctcaaagattttaacccctatcactttactttcattgttgggatagattgctgttgaatcaaatggggagtcgataaacaagttgacttgtgtttggcaatgtttgtgctttgtatgaaaaatatacgtgtttcttagatgaaattaccacatagtgttgtcagatggtcatactatgaaaggtacacatgtactgtgaccgaccaagggctcagtggagtcatgtctcactcttcatgctcactccaaggcattcactcattgagttgaatggtggatggagtcacccatacttcttccatttatctctttctgttacatgttgcaactctactatatgttcctattgcagtaactatgaaccatctgattttatgatggtaatgtttgaagacaaggatgaaatgtaccacatagcagggtgataagagattgcatctcttgagagccatttacatcaaactcaagagcagaaacaggggaccttaaaagtaagaaatgaaggatacaacctgggcaagagacaggtgtgcttctgaagtggtaggtttttaacattgtgattgatggctgtcttttatagttcagctcttgatacattttctggtattgaaccaatgcaaaacttattgtcagacaattttaaaactccacaccattgacagatgataactggtgtggtcaacaattaggagatttatatatttgactccttcattattttaagacttttctatttatttcaacattgtcttttttcacttcatctctttttactcacaatttcgggttgtctttatccatttcaatctgtaatctgaatctacctctcccagttactcttggcgatattcacattaccctaacaactcttttgcaatgcatcgtttgaaaaatgtttcacctctcttttatagctttccaacaatcacatcttatttcagatttttccctcatccagggctatcttaatgttcctttacaccttttatgtctgctcctagcatcagcagacataaaaagtcaagatctctatctatgtatgcaaatatgtcagcatacaataccttgaacattgttaatattttactcatttagaacactgaaaaagcatgataggattaggggcagaaaaggccctatattattttaaagaaaaaaaattgcagatttaatgaatggcctgatattttgtctatgatgattagaaacttacattcataagagtgcaaagcaattttttttccatttttagcaaacataaagtctttattaaacctgtcccaaaaaagtagagatatcacctgaactcatttttgtaaactgaccgcagagttgtaatgattcttttgccactgaatctcctggcatgacagaacagtggtgtaaacttggcttagtcaaaaagtctgccgtattgtcgcaatgtaatacagtcagctttatatcagatgtctgaaattcttctcttctttagacacatacttttagaaaggcacttctttcttgccatagttccatttcatctgttttgaacacttgttttggctgagagctacgttagctctgaggaagtgcttctgaatttaagtgatcagttgatgccacttctgttaacattatgcaaagaaaaaaaaagtttcttaaaattccttaaagaatatttgcttagagtaaggattgattaaatagccacattggaagcaattggaaaactgaaaagttccacaaaaatgttgcatattttattgggaaggctgaaaggttaagttgcacgttgattcttaggctggcgtggagttcatcatgttgtaaaaggtgtagacagtgggacttgaggctaagcaaatccaaacctcaggacgtcttcaagtcactagccctaaagtctcctgcagaaatgcttcttcagagtgaaccaggcccagggctttgcacattgagatccttgtgtttggtagcatgatacttgacccatgtcatctgggttgtatcttctcctttgtctctgtgctatttgtgtcttccacctatgtcacattataggccaagaggttttagaaggcagactgtgtcatttcctctttattttctcttgtatctaggattgtttagggagacaatatggtgtagtagaaagattataggacttgaaatcagactaactccgttttgaatctcagctctgccactgtataatcttatgtaagttacttaacatctgtgagcttcagttttctcatctgtaaaacaggaataggatacttatttttatatggttgtcatgaacacagaatggaattttaaaatataaaatgctaagacagtgcttggtacatggtaagcactcaaaagtgatagctggtatcagtgttactattaagtccacagtgaaagcatgaagtcagcgttatgtgcaatcaacaatggtaaccgtgaacaggatttctagaatggtatcagcaaccttctgcatctgctacagtgaagaggataatcatttttggctgtttctaaaatgagtttctacttataatatccttttgttcacataggctggttccccaagtgtctagcttggagaatgagtcttagaaataaattttgctatattctagaccagtgctatgccaaaaaattttctgtgatgatgaaaatattttatacctgcactttccaatatggtagccatggaatcaccatgtggataccaagcacttatactgtgattaatgcaagtaaggaactaaattctttattttaattagcttaaatttaaatagccaaagcaagctagtgcagctctagacaaaaatttactaatgatttgacaaaatcaatcttaacatctataagttaataaaagtatgaactagtaaatactaaatttccaatgagttcatattttacacacaccgaactttatagaaatgattattttctcccaagtgatagattatatgtttcaattttcagtattatatactaccttacttttggaaatatattctttgaattcatccattggcttctgagtgataaattcacattgtcaaaatttgtcagcctcaaatccaccagttccttcttttaacttgcgaggatttttggatctagtcttcttactgttctgtaatttttcttctccccattctcatcttctgttacacaaacaagtcaccctatattaaagatggcgaaataatttttaagtcacataatgtttactagcaggaataaatcactaccattgaggtattatagtttatgcttctttttctttccaggcaaatttatccttttgaattaagatgttatataatttttcaaataggttttgcattcatttctttggatattttttcttaggaaatcaggaaaaatgtatagtagagtttcttttaatgaaactttttatttggttctacttaatttatgtaaaaaatatattttaattatctgaaatacagaatgcttctcaaattgtaggattgtgaaatcaattttatagattgaagcaagaaatgtttttttttaagaagtggaattggacaggcatagtggctaatgcctataatcccaacactttgagaggctgaggtgggaggattgcttgaactcaggagttcaagaccagcctgcgccatatagcgagactttgtctctactaacaattaaaaaaaaattatctgggtatggtgacacatgcctgtagtcccagctacttgggaaccatatctatatctatatctatatctatatctatatctatatctatatctatatctatctatatatatatcttaatatatatataagataagataaaataaaagtagaataaaataagatggaataggaaatgtcagagcacatcacacatagtaagagttaatattatttcttgaaatgcttcttacatttatatgtgtgtgtgtctctgaattgtgatttaaaatggattttttactatggatcttggccaaaaaaatgtttgaaagcaactgcataatttattgtacgatgtggtgaaggcagtgaagtcagaagatctggttcaaggcttgagtgtactgctttagacaattttcaatgtcttcaacccaaaatttcttatatgtgtaaacagagatacctgccctatatgtttcatgcagttgtttcaaatatcaaatagaattctaaggtgatgtatagttgtaacactccttattcctttcaagtaataattttatattgacaaaactcagtggcttgcaccaacaatcatgtatatttatatttatgagtctgcaggtcaggtacgctttggctgatctgtgctgtatttgactgggtgtttctgcttcaggtcgtgggttgtgcattgtctgggccatggttggggtttggatctgatctccatgtattctttctgtggtctaagccaaaggggcagcggctacccagtgcatacacttctcatggttaatcaccagaacatgagctaaacataaatctatttatgatttttgcttacattatagccatgcaaattccactggccaaatgaaattatatggctaagcccaaagtccctggggagacataaggtattccactctcagtggaagggagatgggagtgaatatttgctgaacaacagtctaaataaactatcatattaccccaaaacttattaaacccacacgtttattaactgcctcattcttaaatataaaaggatagccaagtattatcctgtatttgaggaaaacctacaacataatggaaagtccaaatcagacaaacaagaaaggaatgtggaggaaactgaggcaacatataataagcaaaggaaaacatttaaatactgtatattctaataggtaaaatattatattcatagattaaaattagcatgctatgtaaaaaagtgtccgtaaaaacaagaaatagctcatagaaatacaaaatgggtagaaaattttcttaacgttcaaaatgaggtgtcatcagtcaaagaaatcttccagaagttacaatcagaagacagagatggaaaatataagaaaatgagataatcaatccaacaactaatgtcctggagctaaagtgtatggcattaaaatattttaaaatagtagaagaaaacatcctcaaactgaaaaaaataagccttcagattgaaaaggactcactgaaaactgcgcacaaggaatgaaaaacagctccattccaagattcagcattgcaaaatttcaaaatgacaaggaaaaagagatgactgtaaaagtttccagaaagaaaaaaatgtaaatcatagaccaagtactaagaatcaggatggcctagggattttcagttgtactattaggatctagaagacagtggaatagttcttaaaaatcctgaatgaaaactaatttcaaaatagagttttatacccagccaaacaatcaagtgtacacatacaataatagcattttcaggcaggcgaatactcgaaaatgtgtttttcgtgtaccttttcttattaaagctacctggagattgtacttcgaccaaaaaagggaataaattgagaaacatgatgacttatgacacagaaaacagagaaccctaaaagagcatagggaaggcttgacagaagatagagatcaaccaggccatacataaggtgccaagaaggatatatccagttcttaaaagaacatacactttatctaatatgttcatttaaaaaaaattattgatgattgtttaacagatatgtttgaatatttgggggaaaatgtcagttatctagaaaaacaaactattaaaaaactagacaattctagaaataataaaatgatacataagaaaattaatttaaacaagataatgcttgtctcagcagtgagcaaatttttcataatcattataatgtaaatgaactactgactaatgctttaaccaaaatcattatatgggagcatgaggtgggtatgtagggtgggtggtgcgagacctaaattgtcacccttcttcacgtaagaaaggtctaatattgaaaacttaagaaatagcagtataagtttgtcttttaaaaatgtgaagataaacatcagaagaactaatggtgcatgccattggagattaggtttgaaatcggggaggtagaccatgggcactgctgttccttgttatgagccatttaatactatgtaacttaaattaggtgcattactttgatgggcaaatttaatcaacaataaaaagaaagttaacatatgcccatgattaagaaaaaaacttcctacagtgtggagggatataaatgaacagcatcaagtctcccttttccaaattcgatccccagtactgttttcttgcagtgaccacttttaacagtttctactttgagttgttctggtggttatagtcatgacttgaaagataccttttgataaggtgtaaagctatctggacctgcctttgcccagttagccaaaagatggccacatcaaactgcactgtagacatgcaggttaatagtgtgctttgagagtaatgtacaattggcctatggctgttgttggtctttcatccccaagctactatatacagccagggaagcagccctgacctagttgggtgaggcaaagggttatcctgccagtgggagcatggcatttctggcaagagatttctcttctaacggttggacttggtgccatggcagattttcctgactcagggagtaagtgttgagccctggtccagctggttagattatttgttgattttgattatctgcaccaataagctctttcactggcatggataatcagaagcaggcagtaattttccatcttcctaacaaaaatgcatttcacattttgaaattacaatagatgaagttttattcagttttcaccaaaatactgcttcattgagaagggggaacttttatgaattaaattgagaactctttagagatagtcatatattcttaggtgggtcattttttcttgtcactttgctgttcttgaaagacagagggaaaaatcagtaataatgatatttgctgtcttttagtcagattttactatgtgctaggcactctgctaagtattcctagcctaatttaatcttcacaacagctttagaagcttgttatcactccgattttaggaggaagaaactgtatgatagtctaatgacttgtccaaggtcacagaaaagtgccagagctgtgtctggagccctgatttgcgttggctgttagacccatgttctttacctctgtgtttggactgttttggcaacgcaacccttgactttttattacatgaggaaaagaaagcagctaatttgtacttaaaacctaattaccagtgtaaggtacatatgttgttattgttgcatagtgcttacaaaaattgtatcttttctttttaaaaaagttttgaattttatacattttctattctgtcattcttttgtcttctctcaattcaaaattccggagtaatctttggtcttctgattcctctccttttatttccataaaatcaccattttctctttatatttctgttttaagtccctccactcctcatgtctggaatactgcaattatcttttcatggtctcccttccgccattctttgccaccttaaactgattgtacacattgatccagttttctcaagctcaacctctgtcatattgcatacctgtttaaaccattaatgtcaccctattatctataagaaaaatgtagcgttattaatctacaattaaagagctttcataatgtgatctaaagtatcactccggagcttttgtgcccttacttctttctcacttttcttgctcatgctaatatatccctcatctggctactgaggcatgaattttctctataactcagttggtgtttttatatgctttgcattttgatagtcttcttgtgtatctatgtctcatttacccagatgaattattaactactgagtttagagatgggaactctgaattcatcatattatttagtatagtttcttacatataggactgtgtaagaaaattaatgaataaatttttgaagttttaaagttaacctataattccaattctgtatttctttgcttttgttaattttataaatgttaaacaatacaaatttaatagtctttattatttttatctctttaattatatttaattatgaaattggaaatatatgggtataactttaataacacagtattttaaagaaataagtcagtttaacttagtattccaatttgaaagatacagaaaatctacagtgaatgaaaatgatacaattatttcacagtttttcaaataagccaatatttgagaactgtactaagttattatattgttggttaatgtatggttttgatggagataaactgaatatttatactgttatgaattcaagaaaaaatgtaaatgaattatttaatttatcttccatgatgtatcaaatgtagttggagattgttcagaatattgaataaggacatgaggaaatttggaagtttatttaaatactaaatttaaatccctctacttacacatgattttgttttccaaaaggaggttgcaattttttctgtatcaaatttgcttcttgctttctgctgaatttgaaaatgtttctgccctttctttttttttttcttgttttaatagcctaaatatttttaaaggttcatcttttattttctttggcttaattttacagatgttctattgataaataaatatttctactttaatatataaattatttaaaattatggcctatataagatatttttgctttgaaatatttgagtttcagtaagataaggataatttcatcccgaaaccaaaaaataaaccttcataaattttatatattcatatttgtcttagagtgttcttgttgactttttaaattgcaaatttaaatggaaatattattttagctcagaaatctcatacactctcaatgcttaaatttctcatgcttttttttttcctggattattttttccaagtaatattgaacatcataatcatgccattttttacacctcacatttttcgaaaatctctcttatttattttacctttaatttgggttttgaaacacccaaatgaagccataaatttatcttttagaataaaaagtacatacttgatgtaaatcactgcatgtgtctgattgaatctcacacaaaaatgttactttttaaaggcagtggtattttaagtaaatattactttttaaagggaacgactcttagaatgaaagtgcaattatccactttgactactctcatttaatcatttcatttttaaaattagatttcattttacaatccaaaataaaacctcattcatgtgcatttttggatgtgctaattccttttgtcataaaatggaagctagcctaaattttctaataattttttatcaaattgaaattcatggcaaaaaataaaaatgagctaattttgaattcaagtgcatgtattttatatggatgctttttccccttctctctacctaaggaaatagagaaattgagaatagaactggatgaaagcaaacaacacttggaacaggagcagcagaaggcagccctggccagagaggagtgcctgagactaacagaactgctgggcgaatctgagcaccaactgcacctcaccaggtactccctaatcccattatgcgccatagcaccgatttcattccactgatttttgccacaggcttccaaacagttgttagagttagtcttagtcattcaattcacacttagctttcaggcatattaagaaaagtggagatgtggtaagcaaaacacccagacatgtgaatgataagtgtggcagggaattactgatagattacaaaacctttcatctacaatgctcaaatatttaggtgattctctatcaatataagcgaaatgacatatttctcctaccaccactactacctcttctgctaattctacgtctaataaaaatcttgaactgaaggatgtgaggaattcatttaggaaaataataaaatactgtcagtggtgagagagacaaagtaaataaattgtaagatgcaaattgaaatggaactgatacaaaataaggaatctgcatcctaaggaggtgtaaaattttgagatgaaatagattggcactgctcatgttcaaatcattattataaccaggcttacaccattgaggtttcaaattacttcatttccatcatgagattttgtgatgtgatcatcattgtcatcaactttagtaaatatgtagctcggccctaaattacagtaagactctttaggttgtaagcattgtgaatttgctgcattggaaaaaaacatacacacacatacacacacacataaatacacacatggaaagaaaaattcaaaagagaaagtagatatttcactttatcatatgtggtttcttttcactttgagttttattacgattttgcagtgttcacatcaagcctttggggttgctcagttcttaaagtttttcagtttttagagagaactttgtttaaataaacatgtaagttcatgatatttggtttggtttataaattagaaaaacattggtcttccaatcatagtaatatgttgaatttaaactatgaaaggggactgatcccttttacattaaatatgacaatgtaattctgagcacggtatgctaacagatggagaaaagcaccacttgaacagcctgcgtttggagaaaaaaatattctagaggttggtgaacctcccaaagttttgggtgagtgttaagatgcctctggttctgttaaaatcaaaccttgtataaaacattttgttatgataatattccaaatgatttgacatcttcccttttaaacaataaaagaaagaggaaagaaagagaaagcaaagaaagaaaataaattattaatacatgtctggtatctagaaaaaaatcctaatagatgaaacacatatatgagaaaaaaattgcttaatattgcagaataataactgttcttttaatgctcatttaaactattgtcattgtagaactgagaacataacgttagcataattcctgtggctatttaatcttagaagtttcagaatttagcttcatcatggtaatgttaatagtttttcttttctgtcagacttctattcagaaccaaccatttgtgtgctaagcactgctaaacctcagaaataggacagcttttaatgtctcagtgtggctgagcttcagtaaataaatattaatgctggttttgccccttttgccattctgtcttattcagagagttaatttctgaagtcaaagtccgtagagagttttcccgtatagtatcaatttatagtgtttgacaagatcaatttcttgcaagtagagcatattaagatgcagcaactgctgaaaatggacgagtggtaactaattcctttgttcttaagaaaaacggttttgcttggttccatagaaagctttttttttttgttgagctttatttaaaccaattctactaaaatttaaacgtagttttacaggaaataaaaattattttctaagtgcggtactcttttgtaagcattttatgcttagtctatattcatgttttataaaatccacattcataaatttaaagatgacaattagaaatgcaaggaactgtgtatatctcccctttgcactgacaatgtgatttggttgttgggctatttctgatatatagtacttttttgtttttttggtttttttttgaagtttgccacccctcaccatactttattgattcagtatactcaggtgtgtgactgagaaatgttgtgtcgttctttttcagtgtagatcagctgaaatacataactcccacgcagataacaccttaccacacagtctcaacttaaacacttcaaatggcatattctaaacaaagtttaaaattgaatatgaaaaccgtgtttaaagtaatgatgaaataaggatccaaatctttagaggcaaagaaaatttaaaaactgtagtagagatctgtacatcaacctaaaagaaaaatagcctaccacttttttggtgtttctccttatgggattttaaaacggtaaatagaggccaggcgcagtgctcacacctgtcattccaacactgtgggaggccaagacaggggaatcacttgaggctaagagttcgtgatcatcctgagcaacacaatgagaccccatctctacaaaaaaacaaaaaatattagtcaggcatggtggtgcacctatagacccagctatttaggaggctgaggatggaggatcacttgaactctgaggttcaagcctgctgtgagctgtgattgcgccgctacactccaacttgggtgacagagtaagaccctgtctctaaaaaaaaaaaatggaaaatagaaatttagcattaattaaaggacccaaatgggtgagtgtaacattcacttagtcaacaaatatttactgagcacctactatgttttaagtactttgcttggtcctaggcatagagagaaaaaataaaactcagtttctacccttagattgcgcatactctagtaaagaagctacatctgtatatgcaaatgtaatagactgtgacaacagtgcaatgataaaagtgatgattaccacaggagcacatagggagggggattggcccattctacaccataggtgaaggcgatagtcaaagaaagctgatatcagggaaagctgacagtgaaaagggatagtcagggaggtggagatatttggcagcaatcttgattagtgagttcatgagtaagaattctgaaagtggaagaaagtgggttgggtaccccaggtagagagaccaatatatacagagacataaagatgggagaaaacagaaactctactatcagattaggtgtttggtaggagataagactggaaaggggagcagggaccagcagaagagccttatgggccatctccggagtttcgcccattctgagttactcttaatgcattttaggcaggagcgtcaacatgattgactttctgggttgggagctggactcagagagcagtgtggaaagtgagctttgagagttgatctaggagacaggaagaccagttagcccaaggtcagcaattgcaacccatgggtcaagtctgacccatcatctgtttttgtgtgaccattaactaagaatggtttttatatttttaagtggatgaaaaaaaggggaaacaatattttttgacacataaagattatacatctataaataaagtttgattggaaaatgctaccattatccttcatttattatgtatggcactaccacacttgagttgaatatggtcctcaaagcctaaaatatctactatctgtccctttacagaaaagtgtaccaactcctcaggaggctgtttagttcaagtaagaagtcaagagggcttgaataatgacagattcaaatatgtatttaaagaaggtaattgaagagctttgtgaaaaatggatgggttgagaagagatgactggcagggaccccagttagaatataagcaccatagtccagggggagagtaatgaagcccttggctgtggctgtcccgtgaagtggaaaggaagtagtatcttcagaaggtatttggagtcatgaataagagaggacacaattaaaggtgactgtaagttttctagcccaaattgactagaggatctgttaagccaactgaggaacttaaaagaggtagcagaggaaaagaatacttttcattgtgcaaccccagtggagatgtccaatgttggcttggtgtgaggagaaggtcatgactagaggcttagatctggatcccttttacataaaggtattcattgtagctaagggagtggttaaaagcacatagaaaggatcatgttttaaagaacaatggaagaacagccaccagccgataagactgaaatggggtcttcgaatatataagaaaagaataaagaagaatgattcgaagagtattttcagggggcagtaacaattaaaaccatatacttttcttaggggaggtccccagacagcctaggattgaagaaacctgaattatagtatcttctgtaggcattcactccaggcattctttgcaacttttgacaaattacttaactctttgggcctgcttatgtacctataaaatgaggtgaggctagatgatttataagtttccttccagttctgataatcaatgattctaataatgatttaagacaacccattattaagttcctatatctggacattaggcatttaaattgcttggatgatcttttgtttaaggtatttccttagtttgaacttcagaaagttcattgaaatgaccttcagacccaccacttaaattcattgtaacttaggttctgctgacctctcacaaaggttatcaaaattgtctcaacacccttccagtctcttttgctgaccattgcccggtgaatattcataagcctctgccttgactctgttgctatactctgaaaaccttccatggtgccactctattagagaaaggcaaatgacaacatggcatgtgaggtcatcctgataggctctcaaccttccagtcttatttcatctaagatgaaaccctcttacctgctgatttccagacaaatgtcagtacacatagctcccctttttccctccatttgctgttctctatacctagaatacccctctgaccttctctagctctattataatcttaccttcttaccaaggtctccctgaaatcctgatttttctacctaggcctccccattgattcttgtcagaaaggagcgcttctccccttgaatccttcttcccactttgagctgatggcatttgagtaaatgaattactcaaaggaggaaaaagcaaaatgtggaaaaaaaaagaattaatatttggaagttttttgtgtacttgctattttttgcttctggaatgtgttattcttcaagtaggaggagaggtcttatcagtattatatttctcagagcccctggctcatcactttgcagagttggagctcagtaagtcattaatgaaaatggtgactgtattccaaatgtatgactattctttcaagctcagtactgctatacaaataaatatcttctcacaaatatcagagtacaaagtataagaaggtgataaggctaaaattttttattgagaattttacttgtctctatgatactatattatgattttgtaataatcacttttttaaatttttaactttgtgtaaatatatatgtttaagtatatcagaatcaaatgataatcattctaacaaacaatgcaagtaggtttagtaaagtgcaccaggcctctcacttacatgtacgtgtttaaaaaccacacacacacacacacacacacactcactcttaaactagagttccgcataattaaaagatgacagtggaagccatgtactgtggtgcacacctgcagtcccagaaacttgggaggctgaggtaggagggtcgcttgagcccaggagttcaaggccatcctgggtaacatagcatgaccgcatctctgggggaaaaaaaaatgacagtatttgaaacaagtgcctcgtaagcatgttcactaaacacgtctagcctagcatgtatgaaaacaaagcaaggctgctttcttccagttattactgttaatattattcaaacaacttcttctttttccataacagactttcaggtacatttaaaaatgttcatccatttattcacccgttctacatggagcattttctgtcataagacgctgtgctagggatgaagggagatagaaagataaagaggcctcagctgctgcccttcagaagcttacaggctagcggggaagagaagaaaatacatgagtagatcgggtgtggtggctcacacctgtaatcccaggactttgggaggctgaggcgggcaggtcacttgagccccaggagtttgagaccagcctgggcaacgtggcgaaaccccatctccacaaaaaatacaaacattagctgggcatggtggtgcgcgcctatagtcccagctgctctggaggctgaggtgggaggatggcttgagcccaggaggtcaaggctgcagtgagctgtgatggcactgctgcactccagcctgggcaacagagcaagaccttgtctctaaaattaaagaaaaaagtaagaaaaagaacatacacatgtagtcggtaagataaatgataagatccagaagggaggttctagaaaaggattacagggggagagacagattacttcttactgattttggtaggatttggatataggaaaatgggaatgaagggcattccgtgtaggggaatcgatggtatttgggaggtgtgcatgtatgtataagagtaagttaaatacagtacacacagcgatcaaacagacacctaacaagtatcacctcggaggttaagaatatattcatcttaggccgggcacggtggctcatgcctgtaatcccagcactttgggaggccgaggcgggcggatcacctgaggtcaggagttcgagaccagcctgaccaacatggagaaaccccatctgtactaaaaatacaaaattagccaggcatggtgttgcaagcctgtaatcccagctactcgggaggccgaggctcaagaatcacttgagcccgggaggcagaggttgcagtgagctgagtttgcaccattgtactccagactgggcaacaagagtgaagctccatctcaaaaacaccaccaccaacaacaatatattcgtcttagtatctgcgtggtaccacgctacatgtagcagctctttaaaaaataatagagttatagctaacagcagtggctaacatttgctgagcccctgctgttccaggaaccaagctgagagcttctcatataatcctaccaatagctctataaggtacagactcctattttctgtaatttacagctgaggcaactaaggcacagagaaggaaaggagtcttctaaggttacacagctgatatgttatcgaagcaggttttgaaccccagtaagttgcctgcaaagcttgtacccttatccattaagctgtaattctatgtaaattactagagaaatggattaatgcagttgttctgaaaaagacaacttagaaaatcagtaacatgaatttataatagaaataaatgttagcttcttccggccgggcgcggtggctcacgcctgtaatcctagcactttgggaggctaaggcaggcagatcgcgagaggtcaggagtaatcccagcactttgggaggccgagacaggcggatcacgaggtcaggagatcaagaccatcctggctaacatggtaaaaacccgtctccagtaaaaatacaaaaaattagctgggcatgatggcacacgtccgtagtcccagctactcaggaggctgaggcaggagaatctcttgaacccgggaagtggaggttacagtgagccgagattgcgccactgcactccagcctgggtgacagagcgagactccatctcaaaaaagaaagaaagtgagagagagagagagagagagaaagaaagaaaggaaagaagtgttagctgctcccttatgcatgacacgtgacggtgaattttggcttgaatttttcctaagaaacatagtttcccttggcccattatttgccattgtcatttaaacatattataatgccattgtcattctactttactcccttacttaattttcacccaagaagaaagagaggcttttattaaaaagtagaaatttttcaagtatttatttttgacatgtccaaatatctgtaaagagctataggtatcacctcggaggttaagaatgtattcatcttaggccaggggcggtggcttatgccgctcatatgactaccatttatacacacgtggttgggttaatttacgatatggctgaataaagcaaccacttcttaccgtttatgtgattcttattaactgcttactgagacattcttttccataccttttgcccatgtactgaaacacatttttttaaatcctgcattttttttttcttgtatctgatcttgaggggaactactgcaggaagctttcttttgtttattatccagagaatttagaactcggattgccctaagtacaaaaccttaaaaattcttatttctccttttacataaatgatctttttaataatatgtatgtacttcaaagaatttctcagagcaggaatctaagtgagagtccaccaaacaggtattatactgtgacctacttttgtgatccagatgggaagatctgacctgtgacctagagagacagcaacttgacctataggatttgtgtctttttgaaagtgagaaaagggtacagcagaggagtcactaggttaacctgttatgatggatagatcatgtggggagagtgatagaggctgcctttccagggctttcagtttccacatagtaactagtacagttacttatttgtttctttaatttgaagcaagagtcttgctctgttgcccagcctgcagtgcagtggtgtggtcttggctcactacaacctctgcctcccaggtccaagcaattctcgtgtctcaccctcccaagtagctgggattacaggtaggcaccaccatgcctggctaatttttgtatttttagtagagacggggtttcaccatgttggccagactggtctcaaactcctgacctctggtgatctgcctgccttagcctcccaaagtgctaggattacaggtgtgagccactgtgcccggcctctagtacagatattttcttgaaattaattgtttgacctcccagcctatccatacgagtcaggactttttgggtgaactgaaatccaaaaaggagaaattgataaatttttataactagaccatgtacaatccaggtgcagctggactcagggtttcctggagccagcatgctatcatattctaactttccagaacagggctcaatttctatctgaattttgctaattctttcagattctttcataccatgaagtaaaacatctttcattctgaaattgatgataaaggaaatacctttgatttcaaactgtaagaatgtgacttcctagctccttcacttccaatttcaaaacctttggttaggatcacccttgggcacacacacgcacttttgggtgctgtggctggtagcctcttcagaaccacatggaataagggaagaaagtttcactaagtaaggggaagtgctcttactaggggaaaggtgtcagggatcctgggtgagtaaaacaccaagtatctgcactgttgcccttgttgtctttttaaaaatataatccctggtcaggtgccatggctcatgcctgtaatcccagcaccttgggaggccaaggtgggaggatcacttgaggccaggaggtcaagaccagtctgagcaacataatgagaccccagctctaccaaaaaaaaaaaaaaaaaattaaaaaattagccaggcatggttgtgcatgcctgtagtcctagctatttgggaggctacatggtggtgcgcgcctgggtcctggctacttgggaggctacgtggtggtgcgtgcctgggtcctggctatttgggaggctacatggtggtgcatgcctgagtcctggttatttgggaggctacgtggtggtgcgtgcctgagtcctggctatttgggaagctacgtggtggtgcgtgcctgagtcctggctatttgggaggctacgtggtggtgcgtgcctgagtcctggctatttgggaggctacgtggtggtgcgtgcctgtagtcctggctacttgggaagactgcttgagcctgggagtttaaggctacagtgagctttgattgccatcgcactccagcctgggcgacagagcgagactctgtcccccctcccccccccaaaaaaaaaataataaataaaaatgcaagtcctgatttttcctctaagaaatggtttcaagtggagagaggggagtgaagtgcacatttttgtccatgtatgttggaaaatgatattctccattgtcaacatgtgataagtccaaagaggcatcatcagttcttcacaacaacagggtctctttgttgttttacttagaaaactcttagaatataaaaagaaagaagcacagctaaatctctagcatgcacatgtattgtgcttggtttctgcatagtgctgttccagctgtggcccatgatggctgcttgttagtgtctatggcaagataagtaccggaatctacagaagtatttggcaaattttatatcaattttaaattgtcacaattttcaagcgcatgatcaatgagctttttttgggggagtatcttttaaatttttttctagtaattcatttttattgtgttttaaaaaactatttgcaaaagattagaaattaaaacaaatatgctgatcatttaccacaagaagcttgagatgctatgcttctcactgcttccagcaagcctaagaaaaaacagtcctttatagatgaggaagccgagcctccgaaggggaagcttgaggttgggcatccaggagggaggagagtaggcaggggatgaagggcaaaagcttgtttcaaactgagatagaaacacttttggtgttgtaaaatctcagcacccagaccaggaagcaggtctctttcatctctgtgcccccagcaccaagtcaggcactgggtgtttagcagattttctataaacattgagtaaagttccctttgctctttattattgggaaaattaaaacaaaaagttggggggaactcatcttaagataacaacaagcttaggtcaaaaagccaaactcattatctgtttatttgaagaggatattataacattgatgtatattcttgctattttacagtgaactttatcttttttttcctcctgagttttattcaagaatttttagcctaaagtttccatttcaaagttaagctcatttttttcttgtactcctttcatgaataaattaagcagagaatgtgtcaaaaataattttaaatggatatatgtgcaaccaacatcttcaaggcttgaaatagatggccttggtgctgttttaaattgcgtcctcttttccttcccccacccagtatcagagaaaacaggctgtcagaaagccagaaaagaaaaggcatttcattttgctctggtggacaccacactgcctgagcctgctctgctccacctgtttgaagggctaagaaccctggtctcagtgtggcccggggcgggagaggttcgaaagtcaggcagtgccaggaaatgtgtgtttgcaggttctgcttaacgttccctggctcgctcctctcagttctgtgaagcccaaatgtgaatgcaatgaaaatctccactggggatgcactcatctcccctgccacataggcccacagcctggagcatggtggcagcggcagccaactcatttcctgaagaagcccagaggaaaccgagaatgtattgcccacaccacttgcctgactcaacaacaatgagcatcaggttcaatgaaaataggaaagaaaaagcaaaaacatagaattgttctcatagtagccctaagccagagtatgtctctaaaagaaagttctgctctccaatattatttttaaagtaaaaggaatataacaaaagcccatcaccttgatgtttaatttcttccggtaaatttctaaaattaattcacattcttttatatatatttttagaggcacagtctcgctgtattgcccagcctggcttcaaactcctgggctcaagcggaactccctcctgagcctttcaagtagctgggatgacatgtgcgtgccactgtgcccgcctttgatatttagtttcttcttaaacacctcctcctagtgaatgtgttctttacatcagttgttaggcattactgccttgttatttaatgtttccgtgatacccacaaagtacatcgtgatttgttgattgataaatcttggaattaaagctcattttaaggatcctgagcaagtaagaggcttagggaatattcagtctcctcagtgccctctcccaagccatgtctcatgggagaccagggcccacttcaagtaaacacatttttattatgctgcaactctgttagagccaccaagcaaaggatgcagtcagtctcgggagatgagagtaggcaccaaacaggtcagaaaatgtttggaagcagcttgccatctagctgagctaagagtgtgctccaccttggctctgtgtggcctctccccagcaggcagggtcacctgtgatagggctgagcatctcctgccttgaccaagccatggagggtagagagagagagccacaggctgcttggttttcagaatatcaaagggattccttccccagggtgggcaccagtgaataagcagggcatccctttgacacctttcctgtatctaacttcaagaagcctattcctgaccaggagatttaccaaaagaatgaacccagtgttgaggaaataaccattagaaccatatgaacaaaagaggtaaacaaaataaagagcaagtcactattggaatgtgtgcaggaggtgggggtggtaggcggtcaaggtgaagcattcagagtgggtttgggcagtggtttgggcagtgttccggatttgccctttgcccagtagctcatctgaagtgtggctcaccaggcctttgcctggtagctcatctgaagtgtggctcaccaggctggacgttgcttgagcttgacagtcgtcctagttctatttctgattattttttgtcaccttggggaaaatcccctattgtacttgatttcctacagaccttaactgtgattttatgaggatatatatgagtatgcaaaatcattttaactcattcagcgttttgtaaatctgaggcttatctattcaggtactccaatgattttaatatgagttcaggtaaaataaattaatgagtagtcagtgtattgatccgtctagaaaactttagagcaattaagggcatgaccacctgactgaagctctttatggcaaggctatttggggcacagagtaatatattgttctttctacatcttaaatgatcctctttgtctttagaaggcaaactatcttgccattcctgatatcaactctttgtcaaaacaatatctaatggaagcagctctgtgccctaggggctctgtaagttctgctttgttacagtgatggcagttctctattcttagcctatttccgaagtcaggcatttgttcggaatcattcactattgaattagttaacaacgtttggtttgaggaaagatgataatgatattaaggaataataaaatccatctacagtgaaaatcgagcccagatcagaactgtggaggaacccaaattcagatcctacactcaaactgatttgcacaaagaattatctgttaaaagtgggaaaaagaatggcagcatgcgacaactcacgtaactaatcaactttttagatgccgtttcatatgtttgcttttcattaaatgcaggaatggttgggactatgttgctgtgattcagtcaacatttattcctatctgtttttcatgtacaaaggctgagggatgccagcaaataaactgttaacggagaattaacttctttggcatgctttcatacttatcttccaaattaaagaaaatgaaatgggcagaaacagagtgtagattacctcctttttgtcaaaaatggtgggaatttgaaaattaataataaaaaagggaacagatgcagtaacatgccagagggagattaatgtggagagtaaaatctgtgagcaacaaaactgaagcaaactgaatcagtgggaggtggttgtacaatcaaaatcaggataaaagagaaattacaaacaaccctgcacttgtcaaagtagtagtaatgaaatcctgactctgccagcagtgagaacctgtgttagcactttggggtaaggatggtagccgggtgccaggtaggagggcagtgttaggttgctgggcagcagccatcttgtgtagaacagatggcaccgaaagctggcaggggaggggctccttagcagaactaatcagacagtaacagatagggcagctgggaagactgaccacagagagggagtctgcggggtagccgagtgccatgatgtttgcagtggtgtgcccattggtctgagataagaccttgcaatgtctttcccatctacagaagaactgaaactttgttcaaaaaggaaaattgagttgaattgtgtcaaacttggagggtgggggtgggcattgggatagtgactgagaaaggaagaattgtccatctctgaatttgtcctgtgagttttcagttccagctaccatggaaccttgatttttgctgtttgtatggttctggcaatctaatgtatacagtgtggcacatggaatgatcactttatacattttatgcatcaaaaagtttgcagtatcaaggctatagttaaaattagaaaagattttttttatatgctttctaccacatatgtctttcacaaaatgaaaaactaaaagcaaccatgtgatacaggcatttctacttaataatttttcataagctcatttaagctgtgtttgattcagagtcacttgcccttcttttttcccccatgtaactgtgggttgaacatcaaaatataagcataattcagagccaaaaaccttaagacaaaaatcaaaccaactcattctgcaaataaaagagaaaactgacctgttaaaatttgataacttattaagtagtcgtggttcttgaagtatagagttgggacgtttgtattaaaacgacgactttaacaaagaaatccagatctcctacatctgcttttgaacttgtctatttcttttttttgcagaaggtttataacttggctcaatttattcattttggagggggagggggaaacattacaggatttgaaataggtggtataacatagccatatgctatttatgcagcagtttctgcaataaatctaatttggtgctgtcaaaaaattagacttatttgatatagcagcacattagtaaatgattgtggcagatttaaagttgtcatttagtctcttcttactcttaacagaatctcgcaaattcattttcccccttgatcaactctatgaaaatatcccagttctttgtcctgcagccctgaaaatatttccacatctgaaagaaggtcttgccttaaggtaattgaggaagggggtggaaaaatgaatatcctctgtcgttaaaagacttcataaatatataggcagaaaaacaaataaaccagagaaaattacagtattttcatcatttacagttcttagaaaaacagaactgcaagtctcattcagaatgtagataaattaaggtcagttctttattaaggagtttaaatattttaccttccatcctacgtccatatgctgttttaggaaaactgattattaaagaatgtgagtgacatcagctcttcgccttcacctagcagcgcccttagaaacggctttactcttcggtagtgtaacctggcaacattgcttcaatgcctctttttctgttttttttttttcccctgtaaaatttgtgtttcaggtgttagtatcaaactatctaaactttttcctagtttttctgtttgaaagataagataagcaatgacgcattaagcaggtaaatattaacggtgttctctgagttcctgaattagtccatttataaaagtaatgatttcgtttcccgtttctttttcttgcgtgtttatggaaaagtgtatgtgtgtatcgcatttacgtgtctgtgtgtgactggaagtgatgttaaaactgagtgcttttcatttgtttatgttcgtatcatacaaattatccaaaagaaggctactagtgtgtttttgaaacgcagtttactcagagtgaagagttccttcacggtgatttaagcagcctctattaaactagcatcttgcaaatgcttctttcttttatacagcaaatcagaccatggaagtgatcaaattaccaggattgtttcactgctattcagaagcagggatccaggtgaccaaagtactgtcaagcacagattacactaaaggaaaaatatccagaaaagcagtaacaaacttgctgggaaaacttaatcaatatttttgaaatttcctccacatgaagagaaattatttagaaaggatgttttaggaagatgaagaagaaaacacctcctagaattcatattttgagtagaaaatccatacattaaattacattatatattacatgagaatgatttatatgacactgggtattttgaaggtcagcaataaaattgaaattatagctaagaagcatgtctcagtacttagattttaacctatctttttgattttgtttctgtttttaatttagcctcacaatttttaaaaatatgtctgaaaaactgctttgataaaatccttttcataaattataactgtttaatcagtcagaactttaagatttaaattttaaattccacgttttctccactgcttttgttaataaatttgacattcaattttatatcaataagaaatatttaatttttattttttctaaaaatttagaaaattttacagacttgattgattttacttgatacaagcatctgccataagattaaattttgggataatccttcaaaatataaaagcagccttatgaatgaagtgccatttaggttcacgtttaagttcacatttgtaacagtgttacttttttgccatatattttctcctaaaaaatgatcttccattttcttataagaaatttgaattgagtcattggtttgcccttttcctaaagaatatgatatctaaaataccagtaaataattcaacatagagtgatttcatgtctgatttatgaagggagagtaaatacttgatagctatagatgccacaaaataaattcaattgagagtataattttcacctaatttctatgagtttatttttttcacagaactagactattgatacaacttacatttctttagatagattatgtgtttgcttggcagcatatatttgaacattagtgaaacagaactttgttttttaaatgatggaatttataatatacatgcattgatttgtatattatgggttaagtttttcaaagcagtaatggagctgtgtgttaatatatagcttataattgaaatggtacatatttgtacattttaagcctttcagtgtaaaatttcttaattggaatactctctcccttggctaattcattagtgaaaatatttattcctcaagttaatgctatatagtatgatgcaatttttatatagtgtaaacttgtttatgatattttgatttcactttaaaacttttattttgcttcttagacatatagttcatactcagtataatgagaagtgcagacacacatgaagaaaatacatatcagctgtctggttttacaaatgatcattaaaacaccatgtcttactactttgactccaaattattgtcttcctgaacccaaaagtaattttcacaagtacattacacaacagaacttcatcttctgctggttagcagtagaggatttaaatccatgccgacagttcatttgacaatgaccttgaggggctttgcttcttgaagaagaaagcagaagcttgcggtaaacaaagttcacttctgacagatggattgaatgacagaaaggttgcgagtgccagaatagccctggcagaggaggaaatgttcagtggaatccaacaggagaggaggtgtgaacaggtgcagggttgctgacggaaggggaaccagatggaaggagccagagccagtttatttaaaggaaaaggcagaaaacattgaaaggctgtgcgatcagtggctaaaagtgttcatagaggaaggtaaaaattcacaaagcaaaactgcacagtggggtagctaacacttagcataatggtagtaatttgtgagtttagtttggaagttgcgattgaaatacattcatcttggctcttgacaccatccagtatagatatttgaaagttgtttatttttttaagtttctaagcttttttaaatccatccattaatttaattttttccagccagaagctccattatgataatactaaaattatgtcgtcagctaggaaaagaaaaaaatttaaagtgaaggttaacgttccattcaaatttatcttgtgatgcctcagttttgttcacatatggaaagcaaatgcatgcactgttgggtgacatctgtaatatctaagaaatttgcaatgttagaatagatgccgttggttgcttttgttgttttggatctctgttcattttgtgaagtccggtttgattgtttcagtaggaataatgctctttaaaatacacatttgctggccacaatctgcaggttaatttctgctgctgaggttgacctgattttcattgactttcagtgacctgcctttgggcagacacctgcaaacccaagtacaatttacaaaaggaacagtacgcatacagtggagcaagaaatgaggactttcttgttttctaagacctattaaaatgtaactttctccactgcaaaccagagatagccctgctaatactctgtgtggtcaattcatacataccacttatgtgggcccttgtctaccacagttttccttgaaaattttactacattacatttctgacaaagagacgccaatagaggaggagctattaagaagctatcaccgggaaaaatgatgacaatgcacaattattttgaggttttaaagatctcgtaaataatccacaaaagtttctgcacactgctcacagagattaaacacacaaagtaaatgagtactgtattgacattccttttctcagaactgcctggatcaaatagattacgtttgattaaggctggatgttttgagtttagagagaatgtctgtgattcgtggcatgcttttgtcagtaaatataaagaattgaaatcagattaacagttatagaagatgttgatttactcctgtgctgtatatcaagatcatcaattttggtctctttttttttaatctggatgaggcaatatacaactatattttgaaggaaaaatggttagtgatttcttctagtaaaaggaagttgatgacctgtattttaaagtcatctgcaaaatgtacttttttctcccacttgttaaggaatttttatctaataacttcttattaatctaaaattttatataaaatcgattggagtatccttgctttgattatagtgtactgattttgccatctcttccatcataattaccaaatttatttatataataatgctactagcatggtgctgctttttaaaataataacataaaactcacttgaactacggggttcaaattgaaagacagtaaaaagaaactgcaacaatcagtgtcatcatttgatagtcatatcacaaattaaattgtaaacttcttataggtagaaccaatagcttcccagaaatatgtaaatttagttgtacctagtaaagtgtcttttgtgatatgagtctttaatttttttgaatgaagggataacaagttgattgctgctaagcaggtattcagtcaacatttattgagcacatgttctgttctagctgcactaggcactatgtaaattttcaaaataaagagcccatgatccttttccacaagtatcctgcaacctaccagacaaggtttatgtaattacatatacacatacgtgtgtgtgtaaaatctagaaaatagtatataaatttataaactttctgtgactcatgatcatcttaaatgaattgatgaaactctcatctagctcaacacttataatgtgtgagaatgttgagagaagctaagtgattttcctaataccaacggtggttgagtgacagcaaaaagtagagtctaagtttcctttctctaagtctagtgctcttcctgcatcccacattatacttctttgttctcattgatgatatgacttgtctgagaaaccccattaaaacccttcagtgcaagtctttcacagcctgttttggaaaggaaaaaaaaattatttttggattttggcacacggttactggttcttgaaacaaacaaaacacaaaggttctttagcttgcaaacagtaattacgaagttcacttcttagaactttttttaattattatttatttatttatttatttattgctggagtctcactctgtcgcccaggctagagtgcagtggcgtgatctcagcttactgcaacctccgcctcccgggttcaagtgattctcctgcctcagcctcccgagtagccaggattacaggcgtgcaccatcacactcggctaatttttgtaattttagtagagacgagatttcaccatattggccagactgatctcaagctcctgactaggctcaagcgatcacctgcctcggcctcccaaagtgctgggattgcaggcatgagccatggcactcagcccgtttcttggaactacctctgggagtggtagtaaagataacctcccgcataaacgctgcttaccctgtaataggcatattcacttaatccccacataaccctaccaggtagattctgccataagccccattttacagataagaaaactgaggtattcagaggttagtaccttgacccaagtcacagcactgctaagtggtggcgtaggcactgaagcctaggcagctaggctcccgactacgattttatccattacactatattgcctctgatggtggatgttgtgaaaaataacttctgtcaccagttccttttggaaagttgtattcaacaggctaaaccaggtttcttgacagtagggcttctcagcgtttttaatatgttagtgcacactgtgactctcttagaaaggaatttagttttcagtgtttccgaaatttatatgacttatggaagcttttctatcaaatctccacacatcttccaggaatcacgtttttaggaatacacttggggaaaaactgaactaaactaatttgtagtaggactgctgaaaactatcatatggggattattcgttattgtatctcatcagtgcctctgcaacaccctactccatcccaccctgccccgcaacttcactttcattagaacacacacagttcatggaaagagtagataggttggtaactttcaattttcatttagtcatttctctaaaatgggggtgtggggtggggaagcatctttgaccagacttcaagagtagctggacagttagctgtgccagagtcacgttccaagttcttccatatcttactgtcccaactttgcctttatgtgataattctatttattttaaattatgtgtttattctagaaaacaaatttgacaattacataactagattgccagtcagttcattgaagttagacaccttttaaagcatgactctgaatgagatttcatagaataagatgttattgtggatgctctcctgtataaacgttttaggcaatctcctgccaggaattattggcacaaatttgaagtatgggccactaagtcagactgcactagattttattttccttcaacccatgatatggcaatattcctcccttttatgtgtattctttcctgtgttaggaagaaatggagcaactcatgggcaataagctctggaagtcgggaagtttagcactcataatgtgctaatttttctgtaaatacacttggaggtgcctataatttataattatgtcaagcagtttctactggtgaggttttctataaataaccatcttgtaatgataacgactggaattgtgattctcatgaagacttactatgtgtgctcctagctttcccacctgccctgctttctgggttctcaaattacatttccttcaataaatcaactccagcaatttttattaaagtttgaaaccattcactggcttatttgtattcctcaaggtgcagaaaatgtttgggaataagcgaaaactacaaaggcaacagattaaatccccaggcagtgggatagcttactaaactggctgacacattgattgacaagctaatatgactgcaaggtcctcttgatgaactttgaaactagtcgtttcttactagaaacaagtaatgaatgatataaggatgattactagagattgagtaaagaaatccatgtctatttgccatttaaaaattatagaaacactatccaatgatgaagattttccaattttatttacattcacttattaggaaggagtctgtgacccaggtacataactgaacattttaaaaataatttgccagcttggctgtatggattaactttttcataatactttgtaatttaattttaaatgtgaatatgttttttgggagttgcctcaaaccaaatctgatttacaaaaaaaaaaaaatgaaggggatcattttggtatactatggtgactacttcagcttcggttgttcttagtgttctatcagaattcttctcctttgtttctcctttcaaatcataggtgagtggctgaattaaatgagaaacttatcaaggttaaaaaaggtcattttaatagtttttgaaaattatgagttttgatatcttcatgaggcacttacgtttagtagttttgggcacctggttatttttatttgtggaatcaggatttaaaatgctgctttgctatagggtggtagacaaaggagtggcactcagaccagtgctgtccaatagaaatacagagggagccacaaaatgtaaaccacacatgtcatttaaaattttcaaataaccacattttaaaaagtaaaaggaggctgggcgcggtagctcatgtctgcaatcccaacactttaggaggccgaggtgggcagatcatttgaggtcaggagtttgagaccagcctagccaacatcgggaaaccttgtctcaactaaaaatacaaaaaaattagccaggcatgatggcgcacacctgtagtcacagctgctcaggaggctgagacaggataatcgcttgaacccgggaggcggaggttgcggtgagctgggcaacaagcaaaactctgtctcaattaaaaaaaaaaaaaaaaagcaaaaggaaacaggtgaaattagttttaataacataatttatttaacccaatgtatagaaaatagtatttcaacatgtgatttatataacacattattaatgacgtattttaaatttttttcctaagtcttcacacccctttgtgtattttgcacttacagcatgtcttgatccaacctagccatatttcaagtgcttactaaccccacgtggccagtggctgccactccagacgtcacagccctagacgtttgttactcagttttccagctttcccacaatgcccagcagagatgaagttagattctcatgagcttaaaccctgaattgtttctacaaaaatgggaaccattttattaaaacaagaaaatcatgtcatctttttcttgaattttggaggcagtagccaggactcatattgattagtctttttctgaagaatcgccactttgaggaggaggaggaagagagaggaagctaccacttactggccattacttgaagagcagatgagtgattaaatataccagcatcacattataataagttcttctatatcttactctcccatctttgccgttatatgttgaagagttgttgaaaataaatttgacagttaaataactagatgccgatctgttaactggatttagacaattaggaacctttcaaatggtgatctgggctggacgttgccggttgcctcatgtggagcttcccacataatcctgataatatcattttattaatgagaaaacagaggcttagattgagatgaggttccgccttgacgtgacacagctagcacatggtggagccagggctgaggcccagccctgtgtgtgcaacgctggccaatgctacctccccctgtgtagcttatgtcaggaaattgaggaaaatttttattctttcctcaaggctgtctttgagataattatattgattgtttcagtttgagtagtcatcttctaggaaataataaggataacaatagtaataatacgtactaattaatattttttaacttactatatgtcagtgctgtactaacagtattttatatgtaatatcctcatagtcctatgaggagaggtactgttattaaccttatttttcattcaagaaaactgagtcgtaggttatgtgacttacttagagcaggagttcccaactcggggtcacctgacctccatctcctgtcggagcagcagcatcattggattcccatggggcgctaaccgtattgtaaactgcgcatgtgagggatctaggttgtgcactccttatgagaatctaatgcttgatgatctgtcactgtctcccgtcaccccctgatggaactgtctagttgcaggaaagcaggctcaaggctcccactgattctacattatggtgagtgttataattatttcattatatgttacagtgtaataataatagaaataaactgcccaataaatggaatgcagtcgaatcatccccacaccccctaccctggtccgtggaaaaattgttttccatgaaaccagtcattgatgccaaaaaggctggggaccactgacttagggcacacagctgctaagtggaggaattgcaactttgatgctaagtctagcacacaccaaagcctgttctctaaacttctgcctccttgtgtacagatgccctgctggcagtggagcttacatgcgaagggataaaggctgaaagtatcctattgtttttaggggtattttaggatttcagttgcttatatttattttctcagagcacaaagtcctcagtttggatatagtcagggcaggctaccttgtggaaattagtttgaagatagatttagaaggctggaagcagcaggtttccaggaatggaaagggccgctctgtagctacaggaatggtgaggacgaagactaagaaatggctagaggaagagaaagatccagcagacacaggttattgaagcagaggaaataattaaggatgtagataagaatagttataagcaagtattacaaagtcaaatagaaataatgttaaatcataaaatgactaaaaggcaaaatgttttgatgaagaaagtgacttaattattgtatcaagaaaagaattttcttatttagaggaatgagaatagtggagtaggaatcagaaaacttgggctcacgtcagtttttttcttctgtagatgtagtgctttttacctccagaattgtgtgcaaagacggagaggttacagagttctcaatcaaactctaaaaatggactacagtggtcttgttgccaagtcaaggttactagtccatagaatacagccgtaatttctgtatacatgcacattggatgtttgaccaaaggcacaccatctcagcaataatgaaaattctactatctttattacagaagttccccacttactcaaacttagacttcttcttttttttttttttttggttttgagatggagtcttaccctgtcgcccaggctggagtgaagtggcatgatctcggctcaccacaacctccgcctcccgggctcaagcaattctcctgtctcagcctcctgagtaactgggattacaggcatgcacaccatgcccagctaatttttgtatttttagtagagacgggatttcaccatgttggccaggctggtctggaactcctgatctcaggtgatctgcctgccttggcctcccaaagtgttgggattacaggtgtgagccaccgtgcctgtcccaaacttagacttcttgctagtttgaaatatagctgtaaattgaggtataaattaaaacgtacttttaagaagcaagtaactatcacaaagcccttgcacttttctgtgcagcatctgtggaactatcctaacacacttttaggtgttaaaaagcaaaaaggaaaaaaattaaaaacaaaataaaaaaacatggcagcaaatcacagcaaaccaaccaataaagaattataagaagaccagtatgcttttggttctttagaataacatctgagaccttccttgcaataaatattattgaatgccttctgtttctagccactctattaagcccttaaagatctggcaatgagcaacgatccataggcacttactagcaaaaggaatagcaacagtaagtatgcctaccttgttttaaattatgaaccttaattattaaggagagcttattgtatttggtatagtttgcttaagaaagcagacataattaacacattttagacatatttctattgtaaatggcgagaattctgtggatctaatacctggaaaattctcgtatgtggaacatattctcaacattctagataaataatgcatgcattactctgtcatacttatgagataaaatataataaaaaatatataaattataattcttactattatacatatttctgaataaattttatagccacaagggaaccaacatgttccccatttaatattatatcctagaaattaattcctaaaacattttaataatagaataatagaatagaatagaatagaaactgttatgctacaatttgctaataatgcatttccattgacatgttatagaaacgccactagaatgcatattgatcctactgatacctgatttgaagttactcatcagagggattagttactgggaatttgtagatcaagtgatatttttcagagaagaaagccaagaatgcataaaagtcattagtttatacagacaaattgaaatggaaaatatgaatttttgaaaatatgaagatacaaaggcaaaatcatgatcgaatttattttaggtaatagcatatttggccttattatttagggtgatgaattgggctcagggtgttgtataataggatacagtagtgctttactatctcacaggatctttgccccatgcaatcacttaatgcatcaggcaccctgagctattgaaaacatttgaagactgaaaattaatgaagtgtgcattgtcaaatgcactgaggctgttcagtctcagtatctacctatggtatctaccgtatctaaagaaaccattacagaaattgctcttactattgctgtagtaataagtgctttccctgattctaatgttgtcccttccccatctgttccccacactgcagccagagtgatctttctaaagcacgagtgtgatcacaacactccgctgcttaaaaccctacattggctccctatttccctcaggacgagggccttaaaaatagcttcatgttctggctcctgcctacatctccaagtctcgtctttcttcaataatctcccctccaccaactgtgcgctgctgccccacaacatatatcctccagcatcccgtcatgccaaaactgtttgcagtgttctcagggcacctggttatctctccaccctgtgtctttgcacaaactgtccacttcacttgtaataatcttctttatattctttgtatggcagattactactcatattttaagcttctgattttttttaagcttcctgaaatccttcctccctgtccccagctactccccaattcctatcctttccacctgtatcatggcaggaatttagccctactttaatatttactgtaccatgagttgtttttttccccaaaactcgtttattttgttcactagacaatagactctctgaggccagggtctacatcttgcacactgatgcatccccatacttttgtgcttggcacaaagtagttgcttaagtatttgttgaatggatgcgcaatccactgtttgattaaacaaacccatcatgtgaggcagtgccatggaatggaaagaacactggacttggagtgagaagacagatttggattccagctttgctacttactagctgcatggctttgagaaaaatctcttaattcccgagtttgagacactttatctatcaaacaggaatatctgttccatctctctgccccacagagatgttatgaagaatagagaggtcggtgcatttgaatgtgccttttaaaatagaaagtacagacatgcaaagggtgatgcgctagtaactggagttgatagagtctgtggttttgttttaaaagtagatgggaattgtgcatatgtaatagaaacaggcaatagctagtctactgtattgtcttttgccttgaaggtaagttttcaaattattttggagatactgtaagaacatttttggagggaaaattatttttagagatgtttctgttaaatatttcctttcttttgtgtatattcccttgaaagaagttgacctcctttctgtttctgctttcttccctagaagtgactcattctctgatctgataactcatctttcaacattgtgcttgaagttctgacatactttgcaatgaagaaaatagaagtaatttactccaggaaatatgccattaagtcttttgcatacttaaggaagtagagattccagaatctcattcctgtgttttcctttctgtttcttctcagtagttccacatttgctcaaataagggaatacagcccctgttagctgtaaataagcatagaattttgggttcttctgaaacatggaagacatcatgctgtctaccaattttattattgtttttgttttgttttattttcaataataataataaattcttgcaaaaatagagattatcttatcatattctctgactgtagtcagtagacaggatgatacttacacctgtgaggatacttagtactttccgtcttttagtagttgatcattcattcattcgtttattcattcatgaaatgttcattgaccacacaactgtgtaccaggcactattccagattttcgggataaattagtgagcaaaacaaaggttcctattctccatggatttagattccagattgatgcacatgtcttatcttttctagagtctgtggccacttgaggcaggagatgtgtttgtggtacctttcaatgtttttgcaaaggtgaatatatgtcttcgagaaggacacaactaattgatggtgtcattgtaggagaaagtaatccaatagcttaggggacaacagggaaagaagaaggagaactagcttgggatttggctgtcaagatggataatatggctattaaatggcacactcccatatagataattgaaatagacacttgttatcctttcaaccttctctcatttctctacatccctgataaaagaagagactgaagcatagtgattcactgtggactttagagtcagatagccctggatttcctggctgtaacctttaataactaaagaacttggacatactgtataacctctctaggctcccattttcttatctataaagtgaagatactaagagaacctactttatatggttggtatgaggattaaataaaagaatgcatgtaaagaccttagcttatgtgtaaacattagtaattagtagcttcttaaaaggattagtcctttaaggttggattttctttttgttctgcttgaatgaagaaccccagtattaaaggaagaaagttattagtctatagtcacacaggtgataaggtggtagatgccatactctgaccctctagctctgtgagtttggctgtactccattgcctctcaaggtgtcatcttcccagagcacaaagagaataaactcaaaaagtacctatacatttgtttaaaaaacaaggcaaaacaaaacaaaactataagcaaatattgaaatctagttactagtagatttgctttccatagattattaattttgaaactactttctgtgtattccaagtttgaacaaacaagtatgttgaggataataggaaccaagtttcttactattgaggaaaaaattacaattatggaaaaaagggagacaaggttctatgtatgttgttggattgtaattggaaagaccagtatgaatgtgtatgcatatattcatataggatacagacaaatatttatatttatattcacatttatacacttacatgtatattcatatccagacttagtccaccaaggtgacctagaagcaatgattttgcagtagcagtgagcaccacctagtgacagatcctgatttctaaataccattctccattaaaggcacaaaaacagctccttggtcaaatgctgattccaagactggtacaaggacattacaagatgagcctgcaacattttgtggagatagaaagccacgtgaacaatagagacatgtcacgtaggaaccaccttgaaagggttccccctggccaaatccaggataaattgagcataaaaataataatcataatggattataacccactgaataagatatgaatccatgactccatgctgatattaatgaattaataaatgagagagaagggaaagctctttcttataatacaatgttaactaaaaaatagagaaagaataatggagtaaaaaagtcatttttggatgtaaaactattagatgagagctcgatgaagaataggatgtttgcatagtctaggcatctcccaacaaattacctcttacttattaggttggagcaaaagtattgtgatttttgccattaaaagtaattacttttgtgccaacctgatacagagaggaaaggagtaactttacagtagagaggcctgggacagctcacctaactgctgttttgctgagtctgacttgtaccagcccatgagagccaattatgtgtatttcttcccaacttggtattcagtgatgtcactttggtagctgaaaatagagcatggtggaagtgtctacactgaaaattggtgaatactaccaaagagggatttcctgtcccctggagccctgttgttaaatatcgtctggcacaccaatgatgttaatcaagctatcaaagctaatagcaccaatattgggacaggtgtacattttctgtctaaactcacatcggtacccagcacctccctgccccttctgtctgtattccttaatgattttcagccagtaagcatgttataaattctcacaagttttttcataccaatatgctactatcacaaagctcacaaaattttatcttaaaagggaaacaccttttagccaaaagagttgtatgtctcacattggaacttcagacatcagtaaaaaggtgagtaggaacatggaaggtgggattggtgcttcaaccccacaactaccaggtccttgttccagacttgagcctttcattttttctgtcccagggtcattgttgagctaaatttaacatcattagaaaatgtactttaaaaaatctgcttaacaaatcatttttgctctgtgacatgaacattttttaaattgcaagatttaaaataataaacgatatgaaaaagttgagtatcaaaaatataagcttaatgcttcagtgccgtttctaaaaagtgggatggtaaatatcattgtgaccatttttagaaaatgcaatcaaccagaactataattggtaaaaaggaatgactatgcttccatgtatatgtaatctgtgtttgaggcctagccagtacttgttcactcctttaattctgaatttttatgaagaaaacattgacatggcctacatacgcctggattacaggtgatgtgaataacttggagaataaaggtggatgttcctattctagaccatttgctcctcctttaatttatttatttttatttatttttttattttttgagacagggtctcactctgtcgcccaggctggagtgcagtggtgtagttatggctcactgtagcctcaacctccctgggctcaagtgatccttctgtatcagctccttgagtagctggcactacaggcacacaccaccgcatctggctaatttttgtagttttttttgtagagatggattgcaccaggttgcccaggctggtctcgaactcctgggctcaagtgatctacctgccttagcttcccaaagtgctgggattacaggtgtaagccactgatttgctccttttaaagatcagctttattggggtaaatttaaatataataaaatatcaccaatttctaactgtgcaggtaaatatggtttgacaaatatatagaattgtggaaagatcatagtcataacatagaagaacatttatatccacccaaaacatgtccttgtgcccttttgctccctggtacccctctcctacttccaaatcctggcaacgcggatctactttctgtcccttagtgtttacttttcttgaatggcctgtgaatgacatcataatatatgtctttggtgtctggctttttaaactacgtgtactgcttttgaggttcagccaagtgctgtatgtggcattgttccttgttatttctacccttcctagccatggttagactataccacagtttatccattgaacagttgatgcacgtttaagttgtttcccgttttgagtgattgtgaataaatctttcagccccataactaccaagaaattcttttttactcagtgttttgagtgggaattaaagcaaaccaattggagagactggcttgaccatccttcaccaggctctcacacccagctggatttgactctcattttgttatgctttggtaaattttccccttatacctttcttacgaagtattttgccatctactttctgtttggccattttgaactccctgctaggggcaaggagcatgtcttatctatctttatttgacccagtgcctagcagagtgcctttcacataagagagttatgataaatacttaatgcattgatttacattcttctctagttgctccttgaatgcctacgtgctttttataattttttcaatccattatcgtattacctctagagcagtgtgtctgatcttttggcttccctgggccacactggaagaagaattgtgggccacacataaaagacattaatattaatgatagctgatgagctaaaaaggaaaaaacaaaaaggcccgtgcataaatctcataatgttttaaggaagtttatgaatttgtgttgggccgcattcaaaaccatccaggccgcaagcagagtaagctgtccaactggcggcccaggacagctttgaatgcagcccgatacaaactggtaaactttcttaaaacattatgagattttttttgtgtgattttcttttcttttcttttccttttttttttcccagctcatcagcaatcattagtattagttttagtgtattttatgtgtggaccaagacgattctcccagtgtgacccagggaagccaaaagattgcatacccctgctctagagtattataaaataggattccccaaataaaaacattttaatcctacctctgcctttaaatcattcactatgcaacctataagcagacttcaaattctttgtgacccttggggatttttaagtaggttttttttttccaactgtaaagtgagagggtttgatgaaacacatttgaggttcccttttagttctaacattctgggaatttataaaaagcctaccaagtcagaacctgcaagagaggagagaaggcaacataggaaagtggaaggggaaaggaggttggaaagcaagactatgtcatgtttctaggcaatgaaacataatgtatagtttcccaaatagagggaaatttggggaaggattcgagaaacatcagttgatgtgtaactcaacatttgttggtagaagtcttttaaattgttttattttataaaaaggacttcaattatgacagtagttcttttctatagtcaatttattttttatttttatttatctattttgagacagaatctcactctatcactcaggctggagttcagtggcacaatctctgctcgctgcatcctctacctctcaggttgaagtgattctgatgcctcagcctcccaagtagctgggattacaggcatgcaccaccacgcccagctaatttgtgtatttttagtagagatggggttttgccttgttggccatgctgatctctaactcctggccttaagtgatctgcccaccttggcctcccaaagtgctgggattacagatgtgagccaccgtgcctgacctatagtcaatttagaatatcagtaattaggcagcttattctaaagaatgatggtgagattgacaacccctttacattggggaactgtaagtaccagtttgtgatgggtagtttcagttgtgactgttatcttggtataattattaatagtgcccctttcactttcagatgggtattggtgttggagaatgcatttatgtcacccaattgttaggggttgcagagccccagatttctatctctggctcctgccccggcagggggtctgacttggggatggtctgacagggctttttgtttttttagctgactcctttagcagcacggtctccagctggcagagccattagaaccattctcttctaagcacctttttctaacacgtctgaaaagtttttgcctcctctcgtaagacttaagcagattctccagctacacgttaagatagcagccttcctttcccctatgacaagagtataacaacatccaatcatgaaatattcaccacccacttcctgtgtgccaagcactgaggctgggctgagggtatagagagataaagatgacaaacgaagcagacatgttaaacaataactaaagtgtgataaatactatctttgtacgatgtacacaacatatattgaggtcattgagggaagaatagttaattcaggagagaggaaggagaggggaagaattttgagttaggcctgaagcgggtagttgtatgtatacatcttacagggggattgagtgggcaggtggaggggctttccaggaagaggaagagacatgtgcagtgatccatggccagaaaatacatggtgtgactggggaggcaaaaagtagcctagtctgactatccatttgttgtatatactggtttggaaccgagtgcgacgcaagaccttggaccacatcccggggggaggtgttgttattagaagtaccagacaggaccttatttcacatttagcatggacccccgatgattccatttgagtgaggtgtgggtgtattttcattccagaattttatactacaacatgaccacatgcattgaccaattttaatacaggctttccttatgttgctttataattagaagccagtgaattgaagttccacagcggtacatagactagtagtgatagctttatggaattgtttatttttagtttggcaaaggctaagcagtaaatatctcaattagtaaactaaagcagcatggatgagaaatgcccgcaaggagatcaggagttagaaataactaagtcagttaattgaaggaaaccctaatatcacttacccatatttagagtttgaagaaccattctaatatgtgtgtgtgtgtgtgtgtgtgtgtgtgtgcacatgtacatgcacacacacactgtcagtatccacagtgctgccagcattgaggtcctttgcattccccaggttctaattgtttaggaagtttctctctttggagccactgtgcttggttattgacccagtgggataggtcagtgtcctatcacagtacgatgggttgttgtctgactacagaagcttttcatcctgcaatttctttcaatgtgacccacgagggattttattatgaagtgctgggggaagttattcgtattcatatttgtattcatattcacattatatggcctgatgtgtgaagatatttagtgaaaacatgaatgtggcactgcagaatcatttactcgcctctagatagaggctcctgcattatatttaagattccattttaagtttagagtgaaaacagaggtggtctacaaagcttagttttaagaatttaagttttgttcctagagttccagtatctctgggaaagattgaccactcagaagatgaaacattcattgatagtgtaaaacattaagaatattagagaaaaaagttttgtgttttaaagttacaaaataccattatttagttgttatgatgttttgacactgcacactttagtccatttggattcatggcacgtatttaacactgtatggaaggttgtttggatcttccccctaaagtgggggagggtcattagaaaggtccttgtcttcttatgcttaacaatttactacgtatcagctctctctggtctataggggacatgatgggggtttgtgcatctgcagattaaatttctgtatgtctcctctctgttttgcagacaggaaaaagatagcattcagcagagctttagcaaggaagcaaaggcccaagcccttcaggcccagcaaagagagcaggagctgacacagaagatacagcaaatggaggcccagcatgacaaaactggtaggtggtagggaaagattagagcctgggcactagctcacaagtcaggcccacgccttactgtgaaatgacatcaggaacacctgtaacctttggctggccgaagggagcagatgctaactacaccggagattccgaattacatattagttagcgtttaaaagagaaaatggaaagtattgcccactgtctgttgatttcagagtgctgctctcacatctgttgcaccatctggattatgagtttatttacctgtgttcaagaaacgtaaagctgagagagaccacaacaaagtagaaaaacaaagggcttgtttttggctgggttttcaggcacacatgttatataaagaaaatagcatcagaagctctgcgggaaatgctctgagcttacagttagagtctcctgaatagcattgaacagttcccacagtacacacattatagctactctaaaagcctaatgagtttgcttcagcatccaaactggagaaaagctttagccattaatcggttcttaattcactgtcgcagctggatgtaattcagtggctccaaattgatatgttcctttatttaatctttgcagcttcgaacatttttagcatttgtatgatttccccacctcccccaacccaatctagagtgatgtttaatcctttgcattcttcaagttctcacaactgctgttaaaattcactaatacaaggcactgaccacagctggcagcttggctaaaaattgccatctttcatcacattggcactattctgcagactgagttggccagtaactctttacctttaatttgaaagtaaaatgcactttgaaaatagacagtttgatttgttcagtcagagcattatgtagtttctttcacttttgagttgtgtgttcacagacagtgttagtcaaaacaagacagtgtcagtcattataattccacaccacatactccacactgattgtactattaaaacaaaagtttaattgatcctgtctcttccagaaaaatgttgcttaattttagtgccttgatttattttgatttgtatgctatatgctttttgccaatcattggctaaaattgaaaagaaataaaggcctcttaaaacttatgcttagaggtaattttcatatgatttaatgtattaatatattgtatttgatgacacagtaagaaattatttcttatcctatgggtgaaaaattgccaacaggcaagtcattaaataatctatttacttatgaagaggcaaatgtcatattgactcacataattccctctatcactttcagtagagattttcttccaacagcatttggccagaagaaacgaaaattcaccaggtttagtagaagtttttcctctaaaaacaaaaagaggcaattgtaggataaattattgtttttgcccccactgctagcatgatcctagtgatcagagtcttgggcagaatctaagcactagattagaatgtatttaactgttaaaaccgccttaagaacatttccttttgtcttgtacacacatacacaaaatcacactgttttcaatttctttgaccagatctccattgaagctcatgctgttgacaatgaaattaaaattctaaagaaaatacacatttttaccttcataattagagaagtgtatgcaagattgggggtggtggtggtagtaaaccatgtgtgcaaatatgaaacaaagcatgaattacagtgtagaagagaattcctcgatgattttagttttgagttatctggttgtgataatttttgacactctgtttatagtaaaattgtcaaaataaaaatataatatcttgcatattgcaaagatataagcatctattcttccacttgaggtatttgacactttattaacatgttaaaatgttacaccaagctggtatgatgaaaaatgtttctggtgtataattatgttgaaaataaatgactcccaagattgagtgtctttccagatgataagtcctttgacttaggacattgaaggtgatctagtggcttattggaaatgtgtaggggtctaagcactttaccactctatgtatggaagcactgcagagcgacaaccataaacatcttatgttggtgggggtttattgttatttctagaaaatgaacagtatttgttgctgacctcccagaatacatttttgacaaagttaaaggaagaatgctgtacattagccaagaaactggaacaaatctctcaaaaaaccaggtaggtgatgttatagaatactttcaagagcactgtttgtgtgattactctaatttttccttaaaaaacatcatttgcactgttttatagtctaatgtcaaaattaggtatctgctgatgttttctttgaaaatattttctacatatggacattttcttaattgtctatacgcttttatgttttttcatggttatgtgtatgtactattatttgacatttcaatgtttagaattgaaaactgtgaaatttcaggaaagaaggatcaatatggtaataacataaacatgcagataaatcaagcagttataaaatcttacataggtatggttaacacattttaatctattgttacaattcaccatgaacacaaaagctgtctttaggttaaatgataacagatgaaatgtgtatatataaaaatgaaagtagatggtactttgaaataaataaaccaaaactattcttcccttctcctaaaattgttatattttaatagaacagccatcattcattttatagcatactactcttttataaatccattgattggaatcttaatgacttttttctatacactttctagtcagattatctcaatgaataaattatttcatattctaaactgcaagaagcccgactccccatctcagctccgacagtaactgaataatcttggacaaatgtatttgacctacttggactatagtttcttcttttgtaaatgaaagacattggacagaatcactttaaattgaactatagaaggcaatattcacataactgataagatgtcaaatactactttatatgataactcaatgaaaaaattgcctgtgtgtcttcttttctgcatttttctgaaactcacatagatctattgagagcaggaaatatggctcagcaaacaaactactgacctagatgtttcattcgggaaggatttctgggagtatcagggcatatctgatcactctgagctccatcttggaatcctgcatcaacaagctgtcttagctgatagaacccccatccctgaatcttttggggaatcagagggctcgtgcatccaactctccctgctcaccaggaaggcagaggctcctgtaaccaccaagaatgtactctgacatgcgcaccttcctagcgtatactaagattgtattttggtaggggaaaacctaggtgccaaaataccagatatttcaaggaaatttgaccaagaaaaccaaatgattttgtcatgaaagagacccataaaatatcaacagtagctattcttaaccagaaatacttgatttgcaccacatagatccaaaagtaatttgttagaagcaaacaaacaagattgtatcatttagggataaaatgatatcaatctgggttttatataaatgtattaggtctaaaattggtttgtgaatgattagtgatcttgctctccaaggagacctaattagggaaatttattatataaaagagacaaaaaggtgcttggtatgttatttaattctcaccacaacttgaggcaggaattattatcttccagataaggaaaccaaaactgtttaaataactggtgagtgggagagctacggttctaacataggtatttctggttccaaagtatacgttctttcttatggtaattacagtattttacatctattgctaaagaaaattcaagccacagtagttatgatgagaaagtttgggaaggaaaaattcacctttaaatttccgtggagaagtaagcgtccttggcatgtaacggttaacttactctgtgcccctaggccctctttttcctcctctagatctgtcatcttagcctgtactggtctaactcagaacctctattgctcctcctgcttctcattcctccagctcctgaacagtactttgtaaattggatgtattcttttgtatctgacatagatggcatttaatgaataaatgatgaatgaatgaaacaaataggtgtggtgctattcgcacctcctgatctgacttctgatgccagtctgtcccattgttgatggctgacagtgtgcagtaaagaacacatggcaattcagaggaactaggtttgaatctcactctcccacttggagctttgtaaccttgggtacatggcctcatttccccaaacctcagcttctccttctgtaaaaacatttctaaagccacactgcaggattgttatgggaattagaattgtgtatatagatacgcatacatacacgtatcaagtgcctagcacagtgcctgacacatagtaatacacagtagctgctattattttcactggtggcatttttaagggtcttgactggtaatttgggtatcactttacatagctattgtctttgccagggaaagtctgactgtcattttccgacggacataagtctatgccacaatgaaagcctttttaaaacagccagatcaggaaaatgtggatctagttgtattttgtaactctgatgaattaaagcaggcacctactctaagtttacaatttgactcaaccaaggcctggcaagtagtaaacacttgataaattgttacttactatttttaaaactctcaagcgcccctaaaacttacgaaaagtgcattttgtgtgcctcacaagaaggtagtgaataggacaaattttgattttagggttgtttgttcttaatttcttttagttccagtttcatttctccctggcttcttactatgacattttcaataactcattcatgttaagttttacattccattttgatgttaccttctgctttgaaaccacctataaaacttgaagggcttaaactgcttcttttaaaatacaaattattaatgtagtaaactctgaagaagccctccaggagtgtgcctctgcataccccatgccaaactattgggataaataattttccctgtgctttgaggtaaggaaaatcttggagtttctaaagttttgtcattgtggaaactcagtctccaaatttatacttatgcaatccatatggtaattttggtccagcttttcctcagagtattacagtaaaattcttcttgaaaagtaagtgtatttattttgtattgagcaataattaagacatatttttccttcctctgttactagcaacattactctaagagtcttgtttttcaaaataccaactaaacaaatagattcctaccatttaaaacaagattttaaactcacagatctagtcatttgactgaagcccatgcagaatgacgggaaagctgagagcatgggctcggcgtgcacgtacgcccttactctctgccccagcttcatgctaggctgctctgttgctctgtgaaaatgttttgaaatggtacctccgtgtgtgtgtctgttgtatgtgttttctccccaaggagaccgtaagtcgcattatggcagtgacgactgcttctgttttctggaagcctccatagtgattagcacagtagtttgcgcgctctgtgtactccacactgcacgtagtggtgtctgtaaccccggggtttgtgaatggcacgtcccattttaaaacttaaaatgaactgccgattctgtgcatgttgtatagcttgtttttgaccatcaggcaagagaattaattccattttgcttttaattggcaccaggcagacattctggctgattttagttgaagctcacataaactttcgctatccttccttctgtattccccagtactctgagagcttattatagttatggggttgttttttgaaggaggtaaacggagctatttaaatatcttcggtacaactgtgatttttctttatcaaagtgaaggaagtgttctctctccccacgcgcttagatgaatcagcagtaaaacgttgcagtgcggtttgcagtgctatctaacacctggcctgggagagctggaaggattgggtgctggcagggagtgagcctctgccagccacagagtggagagaagtgtgtgctaggttttagcttccacctcttgcacactgaaaagaacaggatagagcatagaaccagggtctatgtggttttgcttctttcttttctgtcattgtcactttctgggttgtgaggcttgtggactgatgtctaacactgcccattgtgtatttgtgatttgcgttttgtaattaagaggaacaatgggagtccatggggtctcgttatatataatggttggtttaatttgtttcacttctatcttgttaattgtaaattgatcattaagatttgaattctaatctgtcaccagggttgtgagtattgaggctagagcaatgatcccggttttaatcactgatgatgagaaacaaattttataattttggtacatattgcagttcatatattttaacactatactttatggtgttataaatattgttaaatgacttttagtgtagttttactgtgtggactataatgtgtaaattatattactgttttggcaacagtaggtatccaactgtgtgagtttaattgaggtgaagaacacacacccggttgaactgtttttttcctttgcatgtttagatgatgttaggttgggatactataaaaattatattttctacaagaggagactgatattggcctctgctaattgttaccaaaagtcaaactagaacctaaaagaataaaaaattaagatattgtatttccctttgaaagcaattatcattttaatccgaattatagtagtaaaatatatttcatgcaaatgcaattatgcaacataactggtatataaaaatacaggggaaagttcatgcttctgtaaagccagaaattgcctgaattttctatgaaaatggattagagtcaattatccttttatatgacacaggataatcatgccagaaatgtatctcctaactaacagaaaacttgtaagtttactctttgagctttgcaaactactagttctaggaacatatcgtgagctgcagacagaaaaaggatgatgtgcaggcatatatgtcaaatttttattgaaaaatggaagttggtaggcaaattacaattataaacaaagaaaaaaacaaaaatgtgaagcagaaaaaaagattgttgcaatacacacttgatagtgatgtgtactttataaataacatttatatttttgggattatgtaagacatcctcaatgcagggaatttggaaaatacaaagaagaattaaggaaaatttcctgtgccactaccagctagagataactattcttacctctgatatatttcccttcagtcatttttcatgtgtatgtctgtgtacatttatagtgtgattgagattataccgtatatacagttttgcgtctgctttttcatttgatatctaatgaacatttttctatatcagtaaatactctgaaaacaaaactttattaaatgatttgcgtgtataagaattattaggcttttaagatgcttccaatttttaaccgtttatgaataataatacaacaaaaactttgtacctaaatctaaatttttgattgtttccttaattgctggtccaagacgattaatccttttaagggtgttgatgtgttttaccttgctgaagtactacactaacttctaataactgtatatgtagccatattagtaaataacattacaaagaagtgagatttttttaaaaaagcatgagaggcaatattgcacaggtgggtggaaccacccctttagaggtggactaagtaatatctgggcttgactacttggatgaccttaggcaaattattcaacttcatgtttacctcacagagaaaagaaaagaaacccttacaagtaccttataggattaattgagatcatgaatgtaaaggatggatttcactgtttgttatacggtggcatgcagtaaatatttggtggtagtatctggttttgttgtgctattttttgaataatagtgaaattgaatatgttataaatggtattgatcatttgtgtttcttctgtagatattttcaatatttcttatactttttaattggaattttgatggagagtgcagttagtgtttcattaaattatgcttttaatgtttgtcttatttttgtaaataatttcctgttgtttacattgattttaattaataagctttattttttagagcagttttaggttcacagcaaaactggacagaaagtacagaactcccatatattccctgttccttccacacacaacctcccccaccagtgacatctacattttgttttattatgatttttttcaaaatcagaatgaatttatttaaaacaaataaaatacatatctattttaaaaatttagaaagtatggaaaaggatgaatacagaacagagaaaacattcctgatcctaccatccagaaataaccaatattaatagttggtatgcatgtcaaaatatttttctaaattataaaatgaaatcacattacacatgctgacttttaatgttttctctttgttactaatatgtcacagttttagatcaataaatatcacttataaatagccacattatcagaataataagtaacataaccaagctcctgttgatagatttcttggttaagtttccagattatgggttgcaaagaaaggttgtttctagaaacaatgctacaatgaatactctcacacaaacctatgatatattttaaatgtgatttttttatgcataaaagttttgtatttttatattgtaaaatctatttttttctttgtgatttttctttttaaaagtgccttttgcttggaaagtgcctgggaaaagatcaatgttctgcatttttttctaatctggtttaaggattttttttcttcttttgaaatttattttagtgcatggtatgataggagatactaatcttggaagggataccagatcaaaaatttatcataactgcctctaaattcttttgtattgtatgtgattctgaaaggagaaacgtaagtcattattaactcctttcggactatttcaaatatgggtagattcttattaggagaagcaaatgtagattgagcacttgatctgaacttgaaaatgagataatccatgctctcatacagaatatggtaggaaagacaaggcacagagcacaatttaaaagaataaattataagctaatgtatgcataaaggctagaggtagcttcaaaaaacgtgctgacatattgagaactgcaaggtatcaatcagggcaagcttccttttggatgacatttgaaccaagatgaaaacaaaatgaagaatgaggtgaactaaaagcaagagtttttgctccatacacgtgagcagcctggtccttgggatgaacaatttgtaaagtaagatttcccttagcaaatccaaatccttttctgaccaggaagaaaaggctatcttgcctactggaagaattctttctttgaagggaattaattttatgtcaggagtcttcagaaaacaatccaatcattaacctgaaaacgactcataatatacaagagttttaaactttccattctaactgattaggcattagggcatgaggagatggtggcagtaggcagtaatttagagtttacttaatacaaggaaaggaatataatttttcttggataaacatctttctgatcttcaaattttgagacttggattgtcatctaagacacgaaaaacaagatattcccattttgctcaggggaggtcaatcttttttctattaagaccttcagtggattggataaagcctgcctgcatggacggcaatctgcttttctcaaagtttactaatttaaatgttaatatcatctaaaaagcaccctcacagaaatgtccagaataatgtctggccaaatgtctgggcaccatggcccaaagaagttgacacataaaattaaccattaaagaactatttttattttaactgtgtgccattaaactggttatgttaattaaaagaaactctgttatagaaattaggcctagggtttcttctttgacagcatagtgtttggcctataacaagcactcagtaagtatttgttaaatgaatgacagtcttttaaaaaagagatttgatcattatcatgtttgtcttattccttagggaagccatttctgttagagtaagttgttattcctttttctgtctaacacatgagtctctacaatgtatcttgccatttctgaaatattttcttttgcaaaggatgtagttttcattatgctatcatgtttaagtgtggagtttaagataatgttaaggttatataataacaatatgccctagtaataagaacttctaacatctattatttttgtgttttcacctctagatctgaaatagctcaactcagtcaagaaaaaaggtatacatatgataaattgggaaagttacagagaagaaatgaagaattggaggaacagtgtgtccagcatgggagagtacatgagacgatgaagcaaaggtaatcaaggtttcatgtcaactcatgtgccgcatattgaatgtgtttggtttacacactgaaggggaattgctgcggaataagtagaattcatcatcattatgctacttgtgacatgctcaaaatctaatactttattttatgtatttatgcttccttaatttaggttgttcttattatatacaaagaggagagtacatcctctttttgttattctctgaagacatagaattagatttaacatggaagaatggaggaaagccattttcctttaaggtgtaagttggtaatattgtaatatggaggaatttcaaattatctctcctagaaattagattttatatgctttttgtaaggtaaagcacatagtaggtctaaagaggttaaacatcttatcagaggttgcactaatagcattgctagagtcagaacttgactacaaacaaaaccttcacttctttctggtggtgttactttgagcaagtcacttaagttctctgagtgactgtttcttcacctatatattggcgctaatcatatctactttgcattttgatggaaagatcaaatataatatggcaaagcacatggctcataaaggccacccactaaatgtcatcaataattattattctctttttctagatgaagaaattcggctcagagaggctaataggtttgctcaaagtgacagatggaataagtggtagagttcagacttgaatcttgatcttttgactccaaaatccttttctttttgtgcagtaatggggattttttttttggcaataaacacagcctcttactattttttatccatgtgccatttctcacttctgtgtgataatggattccctgggcagaaaataatctcagtatttcacagcagacagtgaataggtttctgtagacttggacttccacatgacaaccgcatgcacgatgatagcagccacccttccagtggacacggttcgcgtggcctccagctcggcatccccacaccatttcccagccatccatgccttctctgtttcaaaaacagttcttgatataattgaaggaaatgaaaatatttatagactccttgtatttttttaaatgtaaagtaagcatattagcctggggtgggggggaggtatttttacgttgattacttgctttattgaatgaagacaggcagtcagatgatggcactgcttgtcagttatcaaaataccaaaatatggatatacttgcaaagtaataattattcattcactattaaaatgtttacttaagcccaggcacttctgtaggccaggggtctgcaaacgttttccgtaaagggccagagagtaaatatttcggactttgcaggccacacgtggtctccgtggcatagtcttccttgttttgtgttttttacaacccttggaaaaagtaaagaccattcttagctagaggaccaacaaaatgagccagaggatttggccattgggccagcctttgccccagtcctgtgcacctggggcatctttccatttattttcttacatttgtgtattgctttagagttcctagaatgctctcacacatagtaccttatgtaccttgaagcaaccttgaaagtagctgcatttatcatctccatttccagatggagaactaagcctaagaaagacaaacgtgccgaatgaaggtcaggtggcaaattaatggttcgttcattcaacattgattgattgattgattgattgctgctgtgtgtcacattttctaccacatgctggaataaaatagcaaagtagatatagttcccactctaatggagtatacatccttatagggaagatggatattagcaaaagaatttcataactgtctaattaattatagttgacccttaaacaacacagatttgaactgtttgggcccatttatacacagattcttctcaataaatttattggaaaattttttggagatttgcaacaatttgaaaaaacctgcagacaaaccatgtagcctagaaataatgaaaagaagttttaaatttaagtatgtcatgaatacataaaacatctgtagatactggtctttatcattgactaccataaaatatatgcaaatctattataaaaagttaaaatttatccaaacttacacacacaaacacagatcatacatggtaccatctgcaattgagagaaatgtcaaatgtgaaggtgcagtattagatcgtaactgcatgaagttaactgtagcacacactgtactaccgtgataattttgtaaccacctcctgttgctattgcgaggagctcaagtattgtaagtatccactgaaaacgctgtgtggactaaatcgtctgcatgtgaacagtttctctctccagtaaattgcttattgcaataacaagtgatctattgcagctcttgtgtatttttcatcatgtttagtgcaatacataaaccttgaataacaccgtgggacccatacgaagtgccactagtgatgttggaagtacttccaagaagcagagaaaagtcatgacgttacaagcaaaagttgcattgcaggatatgtagcttagattgaagtttgcagctgcagccgcctgtcatttcagatgattcatcttataaacagacattataaacttatggcatcaatatataacagtacagtactgtaaaagtattttctcttatgattttcttaatattttttctagcttactttattgtaagaatatagtgtataacacatataacatataaatatgtgttaatcaaccatttatgttatcaatataaggcttctggtcaacagtaggctgttggtagttgaatttgagaggagtcaaaagttatgcatggattttttgactgtacagggggttgatgctcctaacccccatgttgctcaagggccaactgtacagtaatgaccagttctatgaaggagaaatatattttgtggtacaagtacatttaataagggaacttgttttttaaaaaattatttttaagagaatatctcactctgtcgcccaggctgaagtgtaaccttgaactcctgggctcaagtgatcctccctcctcagccttccaagcaggtagggctacaggtacataccaccatgctctgctaattttttttttttttttttttttttgagacagagtctcactctgtcgcccagggtggagtgcagtagcgcgatctcggctcactgcaacctccgcctcctgggttcaaacaattctcctgcctcagcctccggagtagctgggattacaggcgcctgccaccacgcccaactagtttttgtattttttagtagagacagggtttccccatgttggccaggctggtctcaaactcctgacctgaggtgatccgcctacctcggcgtcctctgggattacaggcatgagccaccatgcctggcctaatttttaaaactttttgtgggtactaggtcttgctatgttgtccagtctggtcttgaattcctcgcctcaaaccatcctcccgcctcggccttccaaatctctgggattacaggtgtgtgagccactgtccccagcagggcacttaacattgattaagaaaagcttcaatgagaacatgacatttgaatcggtaagcagtgggattagatcaggaattggcaaactatctggccctctcctaaaaaattttactgactcctgttctagagaaagaaaatctataaaatggaagttcctgagataagaaagcatagtactggaggaagagcaagaactgtgtgtccaacataaaggaaaacagaaagtgtggcatacaatgaggttggagaggtaggaaagggctggacctaaaggcagggtctttatgtttttgtttttattttattttatttatttattttttgatacggagtctctctctgtcgcccaggctggagtgcagtggcgcaatcttggctcactgcaagctccgcctcccaggtccacgcagttctcctgcctcccgagtagctgggaccacaggcgcccaccaccacgcccggctaattttttgtatttttagtagagacggggtttcaccgtattggacagcatggtctggatctcctgacctcgtgatccgccagcctcggcctcccaaagtgctgggattacaggcgtgagctaccgcaccgggctggtctttatgtttttatcatggacctttaaatttatcttgttactaatgggaagaaatcaaaagattttttaaaaaatagaggagatgtgatcagatttgcatttaaaaattgtattctaactccacaatagataacagattggaacagagccatcgtgtttgctcaagaccagttatgggccgggcgtggtggctcacgcctgtaatcccagccctttgagaggccgaggtgtgtggatcatgaggtcaggagttcgagaccagcctggccaacatggtgaaaccccgtctctaccaaaaatacaaaaattagctgtgtgtggtggcgagcgcctgtaatcctagctactcgggagggtgaggcaggagaatcacttgaacccgggaggcggaggttgcagtgagccaagatggcaccactgcactcaagcctgggtgatagagcgagactttgtctaaaaaatcaaacaaacagaaaaacgattagggagtttttggacttagtcaagcaatgatgatgcttggactggaatgctaatattggtgacagaaataaacactggcgaaatgtgtaggaagtagaaccagcaggagttacttgattggcagtgctgggtggagaagaggagcgtgtcaaggacgacacccatatttctgacctgagcaatgggtgcctagtgctgctacttactgagaactagggaacactctaaagaagctggtttggggttgagatggcctgggtttgggatgagatcaagcgttacgttttggccatgaatttaatgttcaaatgatggtaaagatcattcaagttgtaaaaacgaagaaagttaaattttcaactggtggtttggaacccctggtgtccacaaaggcagtccagggaattcatgttaaagatggcagtgccattttttttttctgtttttattttaaagtaagtatcaattcacctatttctccctagaaaatagagctgtgtgaaaatcccccagtgtatacagagtggacaagccccagagccagtggagcactgctgagcacctgtgtcctctcatctgggcgttcactgtcaccgactcccagtaatcccgggggtttcgtcaattacacagttttacaggagttttttcccccttttgtatggtaatatattgtttaaagtatatccataaaaaccattgtctaaagacatgcagcttctgatcgaagtgtaacaatctagtaatgagtttaaaataggtaattcttctataaactagattcaggatgatctttaccaaatccgtaagttctatgtttgtcatagaaatttgattcttcaaaagccaatgttaaaaatacaaattataatattgatttctatctaatttgacattttaatttggggaattaacactatttactattttcagaaaagtgcttgaaaatagaagcctgaaatcttaatctttatctcataatttaaaaacaaaaagagtcctttgcaggaacatgaatggagctggaggctattattcttcaaactagtgcaggaacaaaaaaccagataccgtatgttctcattgtaagtgggagctaaatgatgagaacacatggatacttagaggggaacagaagacacaggggcctgcctgaggggaggaggtggaagaagggagaggatcaggacaaataactaatgggtactcggcttaatactagggtgacagttataatctcttcacaatctcccatgatacaagtttacctatataacatacctgcacgtatacccctgaacttaaaagttttaaaaaaatgggaaaattaaaaaaagagagaaagctgtaacagtagcagttgaattttatattcaaaaagcaaacatttcaaaacaaatcatgaaattgtttttatttgttattgattttataacatgggtttaatttcaaatctatgttttagagtatcttttggtgtgaagacgttattagccaatggtgcctttttctttcataattaattcactatggatttaatttatgtaaatgaaatagtggcattatttattgcacaggaaaattaaaattttatgttacaaagttcaaacttatgcttattttaaatgaaatgcttttacttaaaaagttcctctttattatatataataatgagatgatttaataaattccatgtgtttctatggagggggtttgagagtcaaaagaaatttggagacgctgaggtagacaaagtgcggcgtataaggttcctgagaagagaggtgggttgggataccaagcactgagcagaaaatgatagtgaactgggcgaagggtcacctcctccgttgccatcgcagcagctgtagcagaagagattatatgagctgataaatgcaggcttatggatacggtgctggaaaggtaacctgatgccagacttagtttattctgtgtttattgggcatctgttttgtaccagtcactgtgctaggcctggagacacaaagatgtaaaagatatactctgccttggagaactgcgtgaactcggagggcggaggttgcagtgagccgagatcgcgccactgcactccagcctgggcaacagagtgcaactccgtctcaaaagaaaaaaaaaaaaaaaaaaaggatatactctgccgcactctcgtggctgcagacttcctttctgtttgggctggcctaagtattgcaatcctgcagtgcagagtagccatggcagcacctgccatctcctgggaggtcactcctggctgctgccatgcctccagaaacccagatgcaagaagaaagtctctcctgaggaaccagcctcccttggcaggctagacaggagttggctgcccttaaagtgtttatttgtttaagtctcctgttctctctgttttatatagacctaaaggtctgttattgagatttggagtgtatggtcaaaaacttccactgcccctggggcagtcttgagttgttcatcctttgcttagaaaagtgatcaaggtgtagacccaagctccctgggtagtgatgaccagaagactcaccccgagtataggtgtttttgtcaattcttatggacagtttcaaaatctattaagtaaaaaatttaaaagtactaaaatttggtttttataagccaaaacaacttactgcgaatgctaatgcaatattctactggccgcctccacacccggcagagcttgtgtgatgtaacataagcgctgctagtttgacttttgatgatttggggaaaggattctaattattactaggttatcagcgttgttctgaggtcatcttcattttcaaatgctgctcttcttgcttttaattataaattgctgttaatttagcttcatcacaataatttagtttgttttggattgttttgttaaccccctacggtgcagtattgcatacttgcatcagtggtataatggtttcccagtaactacattttaagtcccgtatgacttgtaatacagaaatgaatcacccattatctcttttgctaaagcagatatatgatccctgcctcctgccaccacctcagcaatttgctgtagagaggcagtcctttgatttgctccttgcaaatgtttgtttttaagtaactgataacatgctattaagagcaaattaacaaaattagatttatatgccattattttataatataaaattatactcttatgaagaaatggtaagagatgtatatgttgctagaaaagaatcttattacatcttgttttgaaatgttccgttatccctagagtttgtttcactggaccactgacatgtttggattagggaggctgtctcatctaaggggtctaacaacagacaatcgaatactagaaatcacatagaaaagtttatccttttcaaattattcaaaaattgtaagccaattggggttcaaacagtccctttgtaatgagccagttgtatgcattgagaactccctgtgaggactggaagtcacgtttgtttatactgtggtgggaaggccagatcagactgctgccctcccaataagttgggagctttgccactctgtgggagttagaattttgatctgggaatggataatgagttatttaaagcaggctgtgcatttaccttagctgggacaaggcagctgctataactgattaccagggagaacattaagtgggaaaaggaggcaacaaaacaaagttgggacaatgccaaagaaatgatgttacacttttgcctgggataggcccactacccaggaaaaagaaaaagacaccctttgatttattcatcaaatatttaccgagtgcttatacactgctgatgtgcttgggatacatcaaaggacacgtagacagccttgtccttatggaacttacatgctttaagctaccttcaagatctagtcctttgtttttaagacctaaagccaaaagtagagagatagtatgcatcgtacgtaacagcatccttcctaaaaccaagttctctgggctttcctcagtttacttctttgtagctgctttgtagctccatgggctaattccttaatcttaaacttcatcttcctcactttcttgatctccaaaatgctaccttgtaggttgtgaaaactgcctaaaataatccacaaaaaggtctttagaatagttcctggcacaacgttagtgcttaacaaatgtttcacattgctattcattcatatccttcattcaacatatttattaggcccttaatacatgctgagctctgttctggattctgggattgcagcaggaacttcagagacttagattctaaatggttgtttatttatattataggttaaattgactcttgtgagttagtctgtgaaccaaaataccatgtttacataatgttatttctaaggcaaaatgccttttgaattttcaacaactgatttatggaacgacattttggaccacgacttgggatatgcctatgatgttctaagtgtttgtgaacatgtgaatgtgtgtgtgtgtgtgtgtcctctattcgatggtgaaaattttcagtatgagccccaagtaaaatttcaagagggatatatctatctagttgcttctttacaatcgtattttcagcatagttaggaataaggaacactctaaaaaatttttttatgcaagttttaggttcacagcaaaattgaaaggaaggtacaaagatttcccatataccccatacatgcatagcctcccgcattatcagtatccaccaccagagtggtataattgttacaattgataagccttcattgggacatcataatcacccaaaggccatagtttacattagggttcagccttagttttgtacattctgtggtttggacgaacacatgatatatctctaccattgaacatgctctgtatgatatcatatcatgtttatcaactttttttttttttttttgagcagtggcaaggttttttgtgaagagcaaaagaacaaagcttccacagcatggaaggggtcccgagcgggttgccccaactttttttcatgggtcgtacctttggtgttgtagctattgtcctacctgtggtcacctagatgttctcctatgttattttctataaattttatagtttcgtgttttacagttaaatctgtgatccatttcaagttacgttttgtgaagggtgtaaagtctctgtctagattcattctttttttgcatatggatatctagttgttttagcactatttgttaaaaactctatttttgctctattctactacttttgctgtttgtcaaagatcagttaactacattcatctgagaggaacactctttttaaattcctaattgtaacttcattaagtctttaggaacagaaaaacaaaaggctaacagagtttaacttctactcctgggagggaaaattttatattagtactaggaaataactaatgcctgtttggaggcaaaaattctgacaaaccatctataacctgccaattttaatatttttataatgtttattatttttgctttttctacaattaactgtggataatacaaaaatattcaattaataataattgctacacccatgttagcattgtacaaagaaccacaagaggctgtgagtattaaacacctatctgtggaaaggtcttttcgcaaaaagacagaataggtaaatttctgttcttatatcagaggggaaaaaaggtacatttcagtgctgaaagtccctgaaaaatttcttccatatatccaatgtaaacctctttcagtcaattcactctctaaagctgattttctctctttggtttatctttttggtagatccagaactgattagaattttcattatcttaactcttaagacttaaaatttaacttagaacttttaaattaaatctgatttttcatttctgtagttgtgtttgttgctttgccttagactctacaattttaaacattgaatattaaatgtgaaaacctagattgcctgtcttttgctttattttgcaccttctaacttattaatgtatccctgtatttattaacatgcattcagcactaggtacaaaaggaaaaaagacatgatatttcccctttagaagcttcgaatccagtgcgggaggtatacggtaatcatacaggtgtaatagactacggtaagagtaaacccaggatgctctctgtgtacatcagactggcatgtcacccaggtttggaggtacagggcacaattcttttgagaaataatatctatcgtcaaatcctaaaatgacatggaggaattcttttttttttttttttttgtattgaaacagagtctcgctctgtcgcccaggctggagtgcagtggtgccatctcggctgactgcaagccccacctcccgggttcacgccattctcctgcctcagcctcccgagtagctgggactacaggcacccgccaccaggcctggctaattttttttgtatttttagtagagacggggtttcaccgtgttagccaggatggtctcgatctcctgacctcgtgatccgcccgcctcggcctcccaaagtgctgggatgacaggcgtgagccaccgcgtccggccagaaagctgttttttaaacattaaccatcacaccactaatggattttgcttttgccctccctcagtgacagttcacatttttcctaggatcagggcaacaggtttccacccatttcccagaggaagacagcttttgcctctcaccttctcctggaggcagtgggcctttttcctgagaaggtttcttgcccctcccccgggagcttgaggcgtttgcttcatatgaaaaaatagtctagtcagtgggcagtggatgtcctcatgccccacctcggagggggaagctgctcgtgggtttttttgccccgccttcaatctttcctgtgcgcatccggggggaggaaggctgtggaaaagtgttcaataatgagtgcaggtttctcttgtcctcttgtgtttggggctcccatggattccaggctggcacactagcccacactttaagaacccattaaaaggttggctgctttccttttatctacttttacagtggccatttcccctttccttgctatgccaaagataaaacggttcaattgttctgccttcagagagtcatgtcaccttttggaatttacatcagctagttaccttgcaacctcagctctctgattggctcaagaaaaaatatgattttgaagattatctggcttttgcccattgttagagtgggagtgattgtgtgtgtgtgtgtgtgtgtgtgtgtgtctatgcacacgtgcgcgtgcacctgcctacctcctagtaggaggtagacccctcagaagttagacctggaggagtctttctcttgaaccatgtaaaaatgtttaggatttcttctgagcactctgagaggggcctttgaagggttttaaacaagggaaagacatttctgtgatgttagcgttttcagtaccatgaggcttttctcatacttggtgagccagagtggctcctgataactttctgctgatcatggcctatctttaactttgcagtttgtttctgatctctgagtttattgacattttcaccagtgattttgctcgcattatccaactacttccattcctatgacattcctctggtttgtatctttccatatctgttttaagatatgttaactaaccaagtgagtgacttcaatgaagatgctgccaattccttcattcctactgtcttagaacctgtgcaaggattaaatatgaatgtttattttggctgtagtccctgggcagtgagagtgagggaatggaaggtgaggcgtggaagaatggaaaacaatgtgtgataatgtgttacaatactggtgactgcttcttcttttatttttattttattttttattttttgagacagggtctcactctgtcacccaggctggggtgcagttgtgcagtcatggctcactgcagcctcaacctcctggatttaagtgatcctcccacctcagcctcccaggtagttgggacctcaggtgcatgccactgcacccagtttaccattttaaatttaatcatctggccggccgcagtggctcatgcctgtaatctcagcactttgggaggccaaggcaggtggatcacctgaggtcaggagttcaagaccagcctggccaacatggtaaaaccctgtctctactaaaaatacaaaaaattaaccaggtgggatggtgggtgcctgtaatcccatctactccagaggctgaggcaggagaaacgcttgaagccaggaggcggaggttgcagtgagccaagatcacgccactgcaccccagcctgggcaacaagagtgagactccatcacacacacacacacacacacacacacacacacacacacacacatcattggagctattctgtagagatagtagtattgccttctgtttctagagggggaaattgaggctctgagaagttatataacttacccaacatcacatagctaatatgtggcattgttagtctaggaatgcagggctatctgatgtcagagcccatgcttttaactacctgagtttccccagcaagccagcctctcagcggggcttggactacaagtgacagtgtttgttacatctaagtcaaattctctctctactaggggcctttcaggctaatgtgtcttagaaagcttcccaggttgtagcaagactaaatgagcttttaaaaagactttttaattgctaatggagcatatggtgcataatggttaatgatatgcagtttccggagctttctgcctgggttctagtgccagtcccaccactgaacctgctgttgaccttgtgcaagttacttcacccctgggtgagtcagtgtcttcattataggagagaaaaacggaaaaggtcccacctcatagggttatgaggcttaaatgagcttagcatttgcctggcgtgtacaaaacgacgtatgtttttgttaaataaaataagttcttcggttttattctgcaattcacacttaatagtatatcattattaaattaaaaaaaaaggaaaagaaaaacattaactagcaggtcttcctttaaaactaaataagctctgctgctagacaggaccctgcttttgtctcaggaaacactgaatttcaggctgcctttgagaggttttgttccaaggcagacccttttcacctgacttgggaagggcagttcactttgcctgtcggagagcctatgggtcagttccaggaagaattccaggaattctgggaaatggctggaaggcattgacatggggttggagctgtgtgtaaggccctgtaggcagcagtgttccaattgtgcacttttgatgttgcacaaaggattgaaatctagactcagtcaaacataatgaattaactgctttgtgggataccatggctttttgacatttctttggtaattttgaacaaaataacttctgaggtgattacataaggaaagcaatgcctttcgtgcttttgaagagtgttttcctttgttgagctgaatgtgtatatttaagggggaagagcagtttcgtgcattgttttggccgtgtgtagcatgcaggctgctggtgatgggaattgagcagattaaagtcaatgtttggttttgtgataatatcttgatgatctattcctggtgatattttctgggcttttgttttctagaaattaattggtttaaaaatggccattatccataaaagaatttattttgtatatgaacatgggccaaaccattttctccttcttatctatggaaaatagtcagctttaaggagccggtattttaaaggcattttgtatgaatatagaaaaacagcattaaagaggcttttgagtcactcttttccaacaaatgtaaattttaatatttatatgttaggcaaatgtgtcattaaaagaaagtaggcatccatctagctgatgtattgctgactctggctgctaagtgaagctcacacagtcctctgcaaatgtgggtacaggggatggatgggtattaagatgccaaacgtgctgttcatgctgaattgttttctaaccagcccatggtacttctctgctatttttttatctttttctttgtctgatactcccctcaattttacattactttcctgctctcttttcacggtcctgttgctttggttcttcatttctagaatactctcttcatttctagaaggaaatctgtggtcagaatttatgctcttctacagtaaaatggtaaatggtgtgcctaggagtagcattttcttcaaattcatatggctagattttattacctaaaatctgagatgtactaattagggaacaaagaattttaatcaaaaatctagttgtcagaaaactctaggtttgttaaaatatatatatgtaaatataggtacagatatatcatacagactttggagtatcttaacattgagattgttttatacaagtcagatcagcacataggaggagtcacaactgtcattgatcataatttatgaccctttctagactttctgaatgttgttatagaaagaaatgtcttatattgagcttgattctttaacatcatagaaattcattcagaaaagtttgatgaataacagaagaaatctttattcactggcccaaagcttagtttatattctgtgctgttataacatctatatgtgtgtctatattagtactatcagctctctgtggcaaaaagaggctctttaaagatggaaactattataataaaacttcgtatttttacaaaatacctcaaattggtagcattcaaaatgaattcatgttggttaataatgaggtgtacattttgctgtgtaagtgaatagatcatcatattaccccaagaggtgatttttacatctatatcaacagtgtttcttgagattgaggaattgtgaaaaggattttagtagaagggtggcaatttgcagcagatgtgtatctgcacctctggtatcactggttgtaattgaacaataaaaatgttgcaaccgtctgggtagcaagatggctaaggtcggctcttgcctgtgatagtaagaatggaggagatttgtttgacgtcatagactctggattataagaaggagacatgtcaagcagtaactacgtggcatgtggctgtgatgcgtctacagccaacctcctggtgtggccttcccaaagacaaggaagcgtcccattcaagtgtgtctcagtgcttgcatgacacagtgcctctggattttacgtcagttctgccttcagtgtaaagccctgattttcatagataacctaatctgtagggaaaaagaacattaaaaaaaaaaaagtatagccacaaaagttctttccactcatgtgtggatctttccagttttttcagacagaaaccaaatgacagcctcacagtcacagaatcttccaacactgaaagttaaagctgatttcttcttcatggagaaaagcttacaaaccttttcagactacttctttagtgtcaattcttggaaccacatcttcttcctgatttaaatgtttggctgtgtacctccagctagagctattagagtttttgctgatttgcttggcatatctccagcaaaatagtccattaaaattcaaatcctttcccaataattgagacaatcaatttacattaaacaaggcacaaatataattttatgtacaatttaaattctatagaaaataatcagtatgcaataaagagggacacttattttgatgcaaagagatgtttttctagtctgcattaaacaaatctttcatattttcaaaatagttccctcattatctttgtgtagaggagctctattgtgttttattttgatgtaggaacaagtgtgtgtccatggctgcatgtttgataagcagtgtaactttctctcagtgacatgtaaagggaaaggtttgagatagaataaggaaagtatttgcttgctatttaacttggaacaattcatacaaaaagggcgaagaagatgcatggggaatttattgcctttgtaccagtgttagtgaaatgggcattgtttgttcatcttcacctgtttatgatacaccaggtggttgttgctctgccagaggttgtgtgttaggtcctaggcaaatcactcaatgggacttgggaaggttgcataggatgggggccatgtgcacacacataattgtgtgccttagtgcagaagagttcctgggaaagttttaaagccccagcaggtaacctcgcaaggcagctagaccccaccagtgtgcctgaatcctccacagttctcatttgtaagctcttaatgagactggtattgtcggtcaggaaatctagaacactggagaaatattattaggaagaatatagtaaaaataatgacaagatcgaaaacaaatcctgtcagagcccaagaataaatttggcttccgcttgctgtgtctgtctgtttccataatggtccagaatagaaaccggatgtttaaaatctctctccttttcacatgctctcctcccctcctgtcttccttcctcttcagtattagtagacttactatttttattattttttatttatattcctagttttcaatatttgccatttgtgtggataacacattaatttttaatgaaatattttcagactcttggaactcttggaatagctgaatcataaaagaaaacttgaaattgatatagactccaaggcagcacacaaactgaaaattacgcttgtttttattcttcccactgacaaatgacaaatggttatttgaaaggatcatgtgtacttagatttaaacttcttatgtttctatatgagcctagtttgtataatttttgtggcacagaaggtaattcagacaccattttaattaataattaaaatgaaagaagcagcaaaacaatatgtgaggtagtgagctccagtaattttctttttatctagaaatacttatttttgacaagccacattgctagtaaaggaattcaagtgtgatttagattacgtcataggcttaactttattttagttctgttgcggcactaaagtttttttgtttgtttgtttgttttgtttttttttttgggatggagtctcgctctgttgcccaggctggagtgcggtggtgtgatcttggctcactgcaaccttcacctcccgggttcaagtgagtcttctacctcagccccctgagtagctgggactacaggcacatgctgccatgcccagctgattttttctattttagcagagatggggtttcaccatgttgcccaggctggtctcaggctggtctcaaactcctgagctcaggcagtccgcctgcctcagcctcccaaaatgctaggattacaggcgtgagccactgcgcctggccagatctaaagatctgaaagaaagtggcatttgtttctttgggtaatttatttccaccaatcaataattgttgttagtgaaattaaagttaatactgaatattatttaattttatactgcatggtattctcagaaatgcaactttgtaatccactttggaactgtaaattaataagaatagtttcttctaaaagtttgttttttgttatagatagcatggacatttaagatataacatcttttagatcttttcttattctcaaattataaggatatcaatttctattttatgttggcaacttaaatcttattttaatcatttatatatgtggttacttttatattttcttcttttaaattaaaattcctaaaaaagtctacttatctcaagtaaatttacttattctcacattaataacaaacatatttttccaaatattattttctaatgtatttctaaagactaataaatttttaaggagctctgcctgtcttatatgacccgagttatgtagaatggcattttatagaatcagaagaggcctgaaagattatctagtccaacttcacctcttgtcgtctactcccaccctccattcccatccccatccccagcaccacattttatagataagaaaacggaagcccaaagaatacaagtaatgactcgaatccgttttctgacatcaggtctagtgttttctactgtacccactcaataacttatatgcttccagaaatagggaggtggactagtactaatgatgaaaaggaaaatatacaatggacataaataatcagatgtttaccagaagctattttgtccagtgaccttgagaccagaagttggatggttaattggaaggtcaaaaaatacatgacaggtgatggatatgtggggctgaggcatattttttgtgtgtaaggatcacctgatttggcatgccatgtcatttgccctggataaacaacacccaaaatacatcttttattgcacccaattttgatttctccaaactaagtgaggacataaagacacttgggaaacagccttcatgcagaatttgctattttaatggcccttgcccaccaaatcttttacatttatttcaggcacacctaattggacaaactttttgtgttggggggtggaaattcagctttgttgaatgcttctaaatcactccactgcgttttcatagaatcagcaactctttttttaacaatcatacttctgaattcagcaaacatggaattacgtttatgtaagcagcacacacaggcttgggaagaaacatggctgactttaggaagtagagcacaactgttgggagcacaagcgcccatttgtgctggtgagtagcagtcattggccatagcactgagtgtgccgtggacatcattcatgtgtttgacagagggaaaaggaaagggttagttgttgggtgatcagggtaagtggtgctccatttagagagcttctactgtactttggaaggaactacctgagtcagacaagtaaagatgtataacataataactggttaagaagaatgtgcattgcattctccatgcactatctttcctccttctttttttaagacagggtctcactgtctttcttgcccaggctagagtgcagtggcactatcactgcttactgtagcctcaacatcctgggataaattgatccttccacctcagcctcccgagtagctgggactacaggcatgcaccaccatgccggctaatttttgtatgttttatagacacaaggtctcactttgttgcccaggctggtctcgaactcctgggctcaagccatctgcccaccttggcctcccattgggattataggcatgagccactgcacctgaccaatttttttctttgtgtcagagaaaggccaacttggaggcagaagaaagggaactttatctgtttcctttctgctttctctgttcctggcttaagaacatcagcctcaccccacccagaagctgggccagtggagcttttatatactgagcaaaccatccatagctacttggcaataaaagcatcggccactgttcagcctggagaatatacctcatgtacaggttttcaggtgacctgctgcccagttggggctgcttggggctgcagccaggctttctcggatggggacctgattgactccttgcataaaagtcatggaaggactactttcttaggagactgtatggctgaaaatacaaatagcttcaaatgggtttaggaaactcttggattaagaacccatgcttggccgggcacggtgtctcacgcctgtaatcccagcactttgggaggctgaggcgggcagatcacctgagttcaggagttcaagaccagcctggccaacatggcgaacccctgtctctactaaaaatacaaaaattagccaggcacagtggccgtgtctgtaatcccagctactccagaggctgacaggagagtcacttgaattcaggaggcagaggttgcagtgagccgagatcgcgccacggcactccagcctgggtgacagaacaagacttcgtctcaaaaaaaaaaaaaaaaaaaaaaaaaaaaccatgcctcattcttaaaaggcattatgaatgtattaagtctcatcgctaaatgaggaatgaacaaatcaataggtaatgaacaactattctctctctaaattgggtgaatataatccttccacttttccttttattttgggggaggaaggggatctgagcatccattctatttttcttccttaattaggtcttagtatctatcaagatggtgattatagtgtgtgtgtgcctgcgcacgcacacacacactatcttacataactgcctgtttactcctttgctacactgtgactcaaaggggtggggcagcacttttgcaaatgtgttttacagacaatccgtccttcacagatagtctttgaaaaaaaggtttgcatgatatcttagttttggaacatactgcataaactatgtactttttagagagtcagaatgtacattaggatattaaaagcattgataagtcttcagaattattaaccatttttaaaatttaagttatagttcaaataatataaataaaaatatttgtaaacatttaaaactttacaaagaagggtaaggggatatggtgtgaagagctacaaacttccctgtggggtggttcttggagacatgtcaccaaactaagcatgtaaatggcttcctgtggcatttcttagaggagctaaatagtttctgcgtggctttgtgatcatctttcacccttcctgtcccaaccgtggcttttattttggctttatttcccttatagcatagtgtgcagcaggattcccgagtccttgcttcctaactcatgggttgggagagctgctcatggctgtagctgctgcaggcacccgcattgctgaacaatgggaggtgtcatccacaggtgaagcttgaggtgtggttcatccaggcttctgggaccttgtcaaggcatagatttagacagaaacaggtcctccagggcttggttatgtccattactaaatctggctgtagcaaacaaggagagtaaacatcttttctttatagttcatgagctctgaaaagggattttctgttgttccgttcttctcaggaatctagaatcaagtgtgaataaaagtagagaggtggttggtgtttgttcatgtatttattttatttatagttctttcactctacatacatacattcttcagatatgtattgtgttctaacaatggtaacaggggcctgtggtaggctttggggttgaaaagatgtgtaagacttaacccttgtctctcagaattcacagtccgggtgctcgtgcctgaaagaccttttcctcccctgcctagagacctcttatttcccaagacacaggtcagccatcatctccagtacaggcttccttaatgccactctctgtgttactcagcacttcgttcagacagcagtttgctcaaatgtacaggacattataattattctttgactgtccaacttgtttagactgtgactccttaaggacagaaaccatactctggtcatctttgtatctcttgcctatagttcagatcctggcccttagaaggcatttactaaatgaatttgtagtcctttttatcttctttttaaaaatcatcatattttatcatcctttttatctcctaaaattgtagaagggtaaaaatgagacaaaagcagaacttgatgtgtatgtgcaacatttaaaaaatattttataacctctcatgtatatcttcatgtttggaaaacctactcactatatgtgtgtctaattactattatgaagtaataaaaatctatagttttattgtataatgatgcacatccagtggacactcagtaagtgttaatcacactattaaatatgctttgatctcattataactggagtggctgcctggctctacttaggctatttaacaactcattgtgttattagttgatccttatttttcaaggtttgtaggtcatgcttaatggagcgacttgctaaggttgttagcagttacataaatgactctgactttacaaattttatgataaccatttggaatgaattatatattttccaagcttttggttcccccagtggctgatacattaaagaataattggtaagttgcaaaatttgtgacagttttgtttttaaaaaatcagctaaatttggctttttacatattgctagtgatttctgtatcatagatgaaggagatagcatagacttgaggctgggaaacacgtttcttctttcacatagccaggcagaacagcccttggaagacgatccttggaaacacattatcatttcttgttcaaaccaaatatacttaacttctgtatctcttccactttaaaatcattatttttgtgaccgacgtctggaagtgccccagtttttccacatggcccttaacacatagtgttagtgttgcatttcgtagttctcattttgaattatgcctctgtgttcactagcagggttacctcctgttaggcccgactggaccatggagtcctgggctccttttggccttttgcctagagtagggaggcctcagtgactgcaaatgtggcaactcgggcagtcccttggccctttccccttaggtccacactcccatcttgggattctgtcttttccacttcaataaatggctccaaggaagagcttgaaaacgtatttggatctgattgccaaatttctcaccagaactattctttcagggtgggatttttgaggttgggtaggggcagggttaaaaacatgagctttctctagaggccaacattccctgattctaggcagttagtcagaccttgttcctatggtagacgtctctgttttccagcacttagagcactgtattcatggccttcgatgtccttctctcctcattagattgtgaggtcttcaatgtgaaccatgtgttatcaatctctgaagtcccagtgtatggaagtgtattgaattaatgaatgattctctaggaactgacattgttttcatttaaaagttgttaggtaatggttaggattaatataggctgattccatatgtgtcctcagttctttccaccacaccattagggtttgaactcccctggcttcattagctattttgcaactcctttaagctgctgtatagtttggttcatttgaaacagaaaaccagcgaaaaatacaaaggtgattgaatacctattacatgataggaattctgcagaccttggagatatggaagataaatcaatcactgacttccagggattcttgtctcgtgggaaagcatgtattctagcgttgctagcccctgttttagtagagatatgagtggacagcatagggtatgtataacctgtttatttttgtttgtttgttttgttatataacctggttttgtttgtttgtttgttttgagacagagtcttgctctgttgcccaggctgggagtacagtggtgccatctcagctcactgcaacctctgcctctcgggttcaagcaattctgctgcctcagcctcccaagtagctgggattataggtgtgcgccaccacgcccggctaatatttgtatttttagtagagacggggtttcaccatgttggccaggctggtcttgaactcctgacctcaggtgatccttccgcctcggcctcccaaaatcctgggattacaggcgttaggattaatatagcatttaattctaaaatgctgctaaaatcacttgttgaaaaagaagtgtttattgatatgacaaaatgttcaaaatatatcccctaaggggaaatagggtaaaagtagtatacattatttcatcttttgcatacacagaaggtatatagttatagatctatagatggatatgtactgcaaatgtcacatcttcttcatactctagcttgtgtatctcacacatgtagactcaaattttgccccatgtcagtttgtacatagagctcagcatctccttgagtttccctaaagatttcataggcacaaatgtactgctgatcagcatggattttactgaagatattgtaagatggaaaacattcatgccatacctcccttagaaacaacataacaatctccattaatacttagttctcccctccataatcctttcctgggtgcattcccaacttggaacttttttttgtcctatctcccgctttccttaaccctataactttctaattctttgccttctcatatttctaggagccaaacattcttcacccccttctattatgcagaaccatccagttctgccacaactcttgtcttaaatggacatattcagagtagcctgcttcttgagtaagcacacattgtacacacatgcatacagacacttacgtatatatactaaaggaaatttaagccaggcccgatggctcatgcctgtaatcccagcactttggaggccaagttgggtggctcacttgagctcacaagttcgagatcagcctagacaacatagagaaaccccgtctctacaaaaaaagaaatacaaaaaccagccaggcttggtggtgcgtgcctgtaatcccagctactcagaaggctgaggtgggaggatcgtttgagcccaggaggcagaggttgccgtgagctgagatcacgccactgcactccagcctgggcagtagagccagactttgtctcaaaaaataaaataaaaagttgattgcggcctgctaaagtaattttgtgacccactaaagggtcatgacccacagttaaaaaacccttccatcaaaggccctttgacaaccacacagctgctgaataaaattgtgtccctcttgttacatctcgttacacctgcgtgtgcatgctcaggcgtttccatgtgtgtgcacacacagacagacagtaggccacacaccagaaaggaatatagtagtgctctctgggattactggtgtgccttcttccactgcactttctggccatttctaagttttctgcactaagcatgtgttagttgtgtaaaaggaaatgcaaacagtaacaggctcagctggggtttttcgtcttcccctttttgttacctcccctagtaacccttgcaaacagagttagactcctctatctctttctctgtcatacctttttgacttctccctacccttgagatgatctcatctcttttttttttttttttttttttttttgggacagtatctggctctgttacccaagctggagtgcagtggtgcagtcacagcttactgcagcctcgaactcctggcctgtagggatcctcctccctcagctttttgagtagctgagactgttaagtgtgcactatcacacctggctatatatatatgtatatattttagaaatggggtcccactgtgttgcccaggttggttttgaactcctagactcaagtgatcctcctgcctcacccttccaaagtgctgggattataggtgtgaaccaccgtgcccagcctgcaatgagattcttacactgaaatgcatagatgggctgtgaaccttcataaaatttatataaaacttaatgtttacttatttcttttctgagaagcagatccaattattctgtgagggcttctgttgtgccaggcaaggttctaggtctgatcctttagcagcctctcaaaacgttgaagaactgagtgactcttcttactctgttgttttccttctctgaactgtgagtgccacgaggcaaggacttcatccgtcttgttcatcactgatttcctgctgcctagaacagtgcctggaacatagtaggcactcaaaaagtgtagtgttctgaatgattaggcattgtgaagtagaaaatacatttatcttatgactctccttttccggagttgatgagatatcatgatgttattggagggtgcaggaggtgatcaacagtattctaggactttgggaattcagactggggatcacaaaatttggagcaggtttcgcttggcactcaggtgggcatctgtctccatcccaccggctgtactctgcagtggctggtaaattacactcttcttggtgggcttgaggccccagcccaagactgcagggtcaatgcaacataaaagtccaggtctcctgactcggagtacagactatggcagcactcctgagcttgactttccctgggcttcatttaatatggttcattttgtttttgaaggtagtttgtgccatagaaaccagacagggtgttgtttaaatagtaggctgatgtctcaatgtaacatattggcccactgagctctacaagagtgtgaatcacaaacccgcctctgtacatttctgatacagtgtgaatgttctggatgtaagaaaatcctgttaagaatgatcaggttatctcattttgccatcaatcgtattttgaaatgttcggttgatagaataactgctcttcctggctaaatagattctctcaactccagcaaaatatttttaaaatcaggtaattcagccagtaatccaaattttatttggtttattttcttcagactgtatatataataccaggactgagtgtttaaagttcagctcagtgtgtagtattcctgtgataatttcagcacataaaataagatgtttacaaaagccaacctgagacctatattctccagcagtttagcagcaaattcctactctgggtatataacaataattgggatctttctattggctttacataaactcagattagtagtaaaatctaagtaccatcccatttggcaaactcttaacttcaagcagtcacaaatttgcttctgattgtgcttttcattcgcacctagctcagatttttgcctgatgcttttttaaatcctctaatttacatactgtggtaaatttaaaatgagaacagatgaatgctgctaaacttttctatttcactgatgaatatggtattttgctttaactatctagctgttatatattcaatgacctttaaaacatgaaaaagatacttcttttcatatataccgtgcaagatgaattattagtattgtcttcctttgaaactatgaaactgagacacagaggccaagcagagcatctgggaactgatttccacaggcctaaaatcagagtttcctcttcccgggactcataccccttcagccaggcagagaggcctggttcgctcacgtttggttatcttggaactgtgggaggtaatgcatccactcggaatgcacttctttccttaccccacagcccccgtgcaccacagcctacatcactgtacccgtttgggcatgtcggaacaagcacgagtaagggaagaggtcgccgtttttgagtggctaataggaatctgctccagctaagcatatgttatctcacatattgtggttaataataataataaccgtgttctccaaaggagccaaaggagagttggagaagttacattattcaacaactgagatgtctaaagcctgtgctcctgtactatcttctgtttgtccctgttatcttgtttagtgagcagcatagcattttgcaagagtggaccgttcacctggtcaggatttcagtcagcatgacagatgcaccctccactgtggtcggtgtctggggtaaccagagaaaacttcccagatacggtagaaataaacttcccagatacggtgggaataagcttcccagatacggtggaaataaactgcttgacaaaatgaatagatccaccatgacgtaattttctaactgttcatttgttttcaataaccaaaagcaatattaattttgaaattatatacactacttatgattaaaatgctgtaattcataagacaaggaaaatctagggcacattttaaaagaaaagtttaattttgaaaggaggaaatctatttcagaatgaagaaatgaaaacttttgaaagctttaacaaaaaattcctagggaattttgaagttttattttgccctaacatgaaaaagtaggccagttgctaaacgttaattgctttacttccatctatctttatttttgtttttattttttgagatggaatctcgctgtgttgcccaggctagggtgcagtggtgctatgtcagctcactgcaacctccatctcctgggttcaagcaattctcctgcctcagcctcccaagtagctgggattacaggtgtcggctaccatgcccaactaatttttgtatttttaatagagttgggtttcaccatgttggccaggctggtctcgatctcctcaccccaagtgatctgcctgccttggcctcccaaagtgcagggattacaggcgagagccaccgcacctagcctatttccatctatcttgatcacacttgatcatgttgagagactagaggctctgaaatttaataaatgacctaattcaaaatatcttactccaaatccagcttgatagaaagccaaactgttgtcagtatatctcactttaagcaaacccaacatattaaatccatatttacaaaatggattagttaagtagtcattcttcacttagcaacataattcattatagtaagttccccttgtaatgcatataaacgtgatttactttattagaaccctctgtgtgtgccacatttcaagtgcaaagtacatttgataatgttactcaacaaattattttctcatttgtccaaatatttggttgggcatcgctgtggcccctaaggaaacaaacaagtgggtcagaatggcctctggaccgaagggatgcgtgttgcaggagcaaggactgttggcgtgggctgatcgctggtctacaggctgtgggagctcagagcatggacccagtcagttcagtctccatcatcctagttttctggatcttccaactccttattcatcgaatgaaccgggagcatgcagaatttatcttggtggaaagcctttctcctcagttttctctccctgttttggtttactgaacaggaaagcctgacataattaggtctgagaagagtcatcgggttctgctctcatccttgagcctgccctggttggtagggaaattcacttattaattctgtggctggctttgggtcatgcagatgacccagggtcactgggcttttcaggttatcaaaagctaaatgacgtgggacacttctggggattagtttaacgaagctgtacaaatatagtcagatgacaaatttggagatgtagtggcagagtaaatagtatttttaaaaaatgcatgcctctgaatgtaatagtaaacctgtatgagaggctctgcttagagagaaattagagtgagctattagctgtgcctatatgtttattttcatataaatacatcaagaaagctagattttttgcttttatttttataccaatatgcctaggttaaagtgggtcattcccagcatttaaaaagggggtagagggagggcaattggcttggttttggtaaaggggtaggggattattttttattttattgtatttagggggcaatcttccatctttatctcttcgttcttgtgcttttcctggaccatgtattctgatcatatttaactttctattgtagaattgggatggaagacctagagttcagcttgaaaatcttttggtagatgctatatctttaataaatgttaaatacaggcatcacacttttaaagaacatttgtttttaagggtctttgtgcattcatctgaggaaaaagcaaccaaatctgttttattcaaattccaaattctaggggagcagattgtcacagaatatacagtgatgaacttccaaaaaggaaaatgggcggaagactcgtaggtatttatcacgcatgctagaaacattaatgctttctgaggaatcaacagatctttgattctcttttggttgagtgcaccttattttgtaaaaaaataatttattgattatttcatatttttttctttaaggaaaaatcttataaatattcatattcagaatagcatgtgtctattctgttgatcctgaagccataaaagaagtttcattctcagtgtcatgtcaacaatgaaaattatcacaaaaccaaaaataattcatgtaaatgtccgcattgtttaatcatcggttttagatccaaagcatcattctttctgtttaaagtggtcattcagaaccgaatattttaaatgacttataggagccctgtagaaaatgtacagaaagaattcaccgtttaagtaaaaatatatttgctttgcttggcctgtcagtttccatatttgcagtggcttcccattattgactagcatcatgcattgaggattaggttgtcaaatgcggtgtatttacttttgaacttctctgctggtaacagtcggtgcatacgtgacatttgtaatgctgatggttgatttcaaagtatagtatctaagtccaatttttcatgcattttatgaagcttttgtccttaacactttgatttaagtcgctcaaaattcattcttaaaagagagatcatttcgatgtttacataattgcaacctcaagcgtactttgcaaatttcagctggcactctccaatccctctgttaagtggttatcaagggtggttattaccatttacaatatgaggaaaccaggagacagggattttattgacttatactgtgaggcagcattgctgctagtctgttaatatgtgttttcgtctcttttctaaacagattttaaaatttggctataatatgttaggcatcactctctggcagaaatataattgtcaggtgtgctggtatggatagaggtcctgcagaaaccttcaggacccatcccaaaatgacgaagacacaagatacagttctgtcctcatcttgacttttgtgtgggtcagagtgagttactaattttagaagtgttctcgtgaagacatctgactactcagcacacacaatcttaaggtctttgctgtaagaagctcaaccatcctttagcctccctggccagggaccctggcctctgcttttgtgtttcaagaattcttggttctggccctgtccttgattccctaatttccacagtttgacagcaccgaatgttgtgttaagcttcttgctaccatgtaaaaatttcctgacacctcttgcaataataattgttattatataatatataattatgtaagatataataaatatataataatcgtcattgtaattctcatcactgtagtagcagcagctaactttagagcgtgcttgctatgtaccagctcctcttctaagcacttaccttttaaacccactgaattttcataaccaccacatgaagcgagtactagcaatatccccattttaacaatgaggaaactgaggcacagtgaggttgagtaacaggctgaaggtcacacagctactatgtgatagatgccaaacgtgaacctgggcagtgtggctgccaattctgggaagaagggatgctgatttgaagaatcttagcaatattttagctcccataatagtaaaaatttttagaagcgcttcctgtgattccagtcagatatggcattgttttatattcccattgtcagtgatctctaaacggcattcctgccactaaactgccactgttttcctacaagggacgtctgatcagtttctgaattgagtcccaagatacgtgccttaagctattgcatgaatatctctatgtgggaaattcttgtgttctgatagatggagaaaaatgtggtggagatagtaaaatattaccagtttcaaatgtgtttatgttaccttaaatttgaggcagactatggagagtgagaagaaaaagcagaggggcaataatctgaaataaaagagtgacagaaaggacaatttggtaaagcctttccttcccataatgaaaaaagtagtccctagttattgacaattcactcagacattactgtactttacaatagtctttacaatagtctttcaaggtttcttccaatttatgattgaggaagtggaggctcggagggaggaagtgtggccacagctgcacagtcctaggagggaaagctagaatttaaataggtttgcctgactcgaaagcttgtgctctcactgaaagttcatagtatctttctgcctctaaagagaagatggtcctgttgaacctggaaaatcagtggctaacatggggcttttcaagactcaataaggtggaggaggccagaggttcagcacgttctgccagaaacaagtcactgaagaacggaggtgtattacagaaaggcttggggggtggggggtggaaataattgtacctaaaatgaaagaaaacacaaccttttggaagagtgggaatggaaggtgatactaaaatatttagaaagctaataagtttttgttttttaagagacagggtttaactctgttgtgcaggttggagtgcagtggcacaatcatagctcgtggcagccttaactcctgtgctgaagtgatcctcccacgtcagcctcttgagtagctgggactacaggcgtaccaacaccctcagctgatatttttattttttctggtgatgaggtctcactacattgcccaggctggtcttgaactcctggcctcaagtgatcctcctgcccaggcctcgagaagctagtaagtttctaatcagtttgcacgtgcttctgagtatgctaatgcttttttttattaccactcaatggtaataaatggtgacgtggtaattccaagctgtttaggaaaatttgtactaccaaatgtcactgtcactcaagggattattgcatataggtcttattttgtttgttcttttttaaggctttctctgcctttctcccttctgttaccatggcaatattaatgttattgatctgagtggaacatgatgttattcaccagtgtgacatacattagatttgtaaagaatctatttattagaacaatttatcaggtgttaataatgctcatacattatattattttttggtcacccaatatagaagcctctattgagataaagaggcatgattttttttttcacaaaatggatgatttcttattttaaacacaaagtgtgtgtagcgagcactactttctctaggaggatctccgggaggattctggtggcatgttggtcagccttccctgaggcgacccgcaggaatggaattggcgccagcagggaacagtcactcacagtccacccaactcacagtgtgactgatcaccacgccagtcatgtcaaaactggacatttcctgttcacagaaagttgaagcaggtccattttgaagaacatctgattggacatttaaaaatggataaagatgattcagaggaccaaaagcccaattttccattttcacaagctataggtagagcagccctagctgactggaacaaagtgtgactgaagcatgtttattgtgaagaaagagatggaaatactggagatgggcattgacttaactctatttcggtaatgttgtggccacaccaataagtccccagcttccctctcccctgtgtagctttttctcctttttctgtttgttgcacccctgacggcagcgtgttcggcttgttccctttctcaggtggtggaagtctgtggcctcttagcctgtgcctcccagcacacctgaagaaaaccacaattcccagtgaggcactgacgcttgtatcttattgcttaattattatacctatttaatgctacttagaacattgtcagctgttgag[450 bp omitted]gtagcatctgaagtctttgctttaattccgcagcatggttttgaggagttaccagttccttgtaactgtatctgtggcatgactttcagagtctttaagaggcttcagaagtccattttcttcatcttcaaaaaatttgcactgatgagagatgttttctctttcttggcacagtcagacagagctgagctacatgaccattctgctgagttctgacatttatttcattggaacctttgttaccactgaggcagtctgtttcattttcatcccattccttatttctggactattggtgcgtctaaatgtaccatggtacatttttaaaactcaatactatacagagctttagcgtcaagggaggtgttttcttggatgaattcctcttctcaattctaagaagattcacctccacctggcccacagccctcacacacatatttactgcttgttcccatgtgcaaaggtcttttccgagcccaaatgggtcatgacctcttcgaggggaagggctaatacctaatatattttggtagccactgtgatcagagctcataagaggtacttggacttcaggtaagtgaaacacaacatctttggaatgagatcttatcccattggttctttactctaagatttcactttaccttaccctctctccaccacttctcaaccctgcatcagtgtagcacagagggaatgaagggggctgcaggaaaggtttggaggccaggccgaggattgagcccactactttctgcccttccccatttgccagaactcaagtcacctggctcaaccaactgcaggagctgggatgcatgatctagaagaggaggaacctgtggagtggtgagctccagtgttctcgttcctatcatccctgcctctaaaaataaccctccataaacaaatgatagcaaaagtcatctcgtgcatataaagacatgacagaaagcaatatctttttaggtaaggggctgtgtggctgtgaaggtaaggacagtaaccagtgaggtttccctcctaacactgtcatacacacatccttttcacaaatgtcatcttgctaacaactatgcaacctccttggagtgaaatcttggctgtcttgttctccactgtatcccaacgcccagtaaagaagacattgtaggtgctcagaaaatatttgctgagcaaaaatgaatgcatgaatagtagaacaaatttacattgtatttttttcacattatcttaaaactcctaccttttgtacagccagaagacaccagcacctatgtgtgcactgcatttaaacagctttagcaatatcatagtgctgttgggtccccagctgctgccagtgaaattgtttacctagaaagtccccaaggccttttctgcaccaagatatttgccttctctcatcttttggcaaaaaacaaaacaaaacaaaacaaaaaaaaaccctaggctctttggaagacaaaaaaagtatatgactgccacacatgcaaccaactctctgcttccaccaaaggtggaaatggttttgtcagtggttctctgaaagctgtttattttaaaagataaataaatctttccccttaccctgtgacatctgatccagggccaataggagctttcaaaacacagtcaagtccactgatgctgttcttaaaaatgcattctttcattcaacagctgcatgtattggacactgtgctggatgctatgggtaccagcaggattcagtcctgactctcaaggagctaacattttagtgcaggaggcagacagtcatagtgcactgtggtaagagccatgggtagggcacagaagaaggaacaggtaagcatgagaaggccaagaggagctctgtagagtggcaacacttgatggctagggagaggcagtgtatgcagaggagaataaggccctttctcttctaatatttttttggattgcacactttagaaaacaattttagacttaagacccaaaatgagaagaagcacatgacttctggctgacagccctgacatccccaatatgaggacatgattctgtgccttgctggacctcctgactgcccagccagccagggctgctcctgtgtctgtccagccccaagaccagcctgatggaaaccgcttcctgtaatgcctaatatagcacagtccactcacaatatgggtctaaaaccagacttttatcttgggagggaaaaaataatatatgtaacaaaaatgtaatccatggtaatattactcattaaattcaccatatgattaggtttttgagtttttagtaatccactgacatcttctccctgtctttgtgatgagtccagagcctgcacctttgactctgtttgcctgggtggtactccgacatcttcgatagggagggtaatgagaccgttctgccagtagggcacatggccacatagactgtttaaatcatgaaatctcttggaaatacccatccaagggatggatgtgaactctcggtgttcccgtgagagccagcaggggtaggtgccattggctagagagacggctgaaaataacccttcattcagagccttgtgtagaaagttgggttgctgtgctcatgtcctcttgacccaaaattgttaacatggttggatgaaatgctgttcctagaggggaacaaaagtggctatcacaattaacatggccctgtttgacacctgatcctaaaagtgatttttgtaaattagagtttgaagcatgtggtggcattggtggtgctttttctgaatgttgttcacttaggttttccagttacacgaattgttttcggggagcttacacacctgttcccatcctctggggtgggctagttgctatgttatgaaccttaacctttgcatatacctctgttttattcatgggaggtcacaacttggtaattctgtctagtattcaagcagattattacaagtgcttagaagactaatatagttagcatttgatttgaaagggacaaagaccagttaatagttttctgtaactatacttaatatttcatcaggcaagtaaggttgctgccacttagttaactgggatgccaaggaattgctaaaaaaaatcaaattaatacacattattacacatatttacacacattgaactatttcaaaccagtattgctggaataaagacaaaataatactgtgtatttacataacaccataacacctttcatcagaaaaatctcaagccttcgcagactaactaagctgcacaacaccgtgtgaggtgtgtaggaagtaagataggacaataaacaagaagtcgatggagggaaaaggcaggcaggcaggcaagcatgcttgcatagggtgagtgagactccttcctgctggatgacccactggcattcaagtcctggtcaccccatcgtgaggatacctagattgaaagctccagtacatgtcacaggtgattacagacttgagtattcttctgtgtgttgtttttccattctaatgtctgtattttaattgaatcgactggacaaagatacagcattccacctctactggactgtaacagtgactcccagtgtgatcaatcatttgatcattgtttcactttccctagggccaactaaatacagtttcctttatttttccttagctagaatttttttactaaagtgtgacagtttattctctagaaatgcctagagatggctgggtacatgctagtccatggaaaaggcatgggtgagtcatggtctcttttgggagggtcggggctggtgggaacaaattcctgcccaagcctgcttcagtggctgccatgcccaacacctcccatgataggcctggcctggcactgtgagcagagagagctgaccaggccttctgtggagcatctgagacaggcctggagctggaggcagtagcgagccaggagaaccagcgtgaagaacacaggaacagcaacaggccaatgggagtcgtgaatttggcttttcgaattttggaagagcatacattaacatctttaaatcaattttgaatgtactatgttctattggatattcaaaaagtttagtcctgaaacttagtactcattcagttatcccatgcaaaggatttattcacctcatcctttgagaaaaaagaattttctgtatgttagtctttcacacagcctctgtttcggcttaacctttcagattttcagataatttaggtgtcacagatacccatgataggatcgtttttcagacactataatttaaatgtctctgaaatgtaataaacagagctttgtctgggttttggaaatgatgttttcttcccaaacagctgttcatttgtattaacacttttttctgtctctaacagaaaggcagcatttcttttttatgtataatctcatcggccttttcatcatgttaactgtgtccagcgtattgttgtggtattatttttaatatcctggtgtaccacaggcagatgactagcatgacctcagggctttctgaagagaagataccgctcatttttccatagcctattctagggcagactctcactctctatcttagtggggctggctaatttcattacctattcaattcatctgagaccattttggtaaaagcgttgaaatagcaatgcgctatgagctagtctttgctcctgtattcaactggcaaagcaaaggactttggttttcattttgggggccccagttaacacccaaaggatggcaatttatgaggccctgatgaagatggtgagaactggcatttgatatatatcaatatttgatttatttgatatatgtgatcttctaacaaccttgtgatgtatataggagaagtattgttaaaattaaattttactttgaaggaattcaggcctagagaggctaaatgtcacagattcccatggctggtaggctgggcctcataccctttcctacttaatgcctctgagattcactagagagaagagtagttaacagtgcaggttctgaactcagacagtttaagttcaaatcctgtctctactatttctgtgctatgcgattttagggcaagctacttaacatgggagtaaacttcttcatctgtaaaattatgacagtcgtgctacctgtgtcacagtcttctctcaaggattgaatgagttattacacagaaatgttaagaacagtgcagggcacatagtaagtactcaacaaacattagctaggtgaattgtttaaagtgtccagcacaggaagcagcctgtaataggaaatgagcctgtattatgcctgggaggtgatgttacacaggtcctatcgagagtagacaagctgactaaggaaggtgctcaagtccagcagggaaagttcattctgcccgtactgttaccaaagttagaatatgacaatacttctgtttttgcggtacaacccgggactattgcagcctattaaattaatgagaggcagataattgacagtgtctcccactggggaaccaggtctcactctgggtggagcagttaatatgcaggtctccactctggagggataggagtgctgcttcctcatgctgcattccagaatcctttctagatgccttcaagatttatacccttaaagttggaaacctggggggcaccttgtgcccaaacagcgctaaattccaggtaacacatctccattcacaacctattgtgcgtagaccctcctggacactgctattgaccgttgactgattatgtgatcaaagattgatgaatctggaagcactggagggatagcaaaggctttcatttttttgtttgtctttttaaatcctgttccatgttccactttgaactggattgaagtcagcagtgaaatcaggagtgtggaagctgtggtaccagaggagagaaccagtgagagagacttggcttatagcaatcagtccagctccagtcagataaaggagacaccagtgagggagtgaacagaatggtagagaacaacccagctgagattccagcatccttttcttctatcatcagatacaagaggagagttcacaagagaagcccagtggctttattcggagagagttgtctggttaagcacatatgtgcaccgcaaatccacatttgagatccacccgtttacatttcttcatatcagcatctgatcaggaacctccaaatgttctagcatcctttgcaaataattttgatttggaaggcttctctggatagttcatttttactgaaagactattctcttgataagaaatttctgacaattttagttatgttaaatcagattccacatatataatgacagctttgttggtgtgtatttgtgtgtgaagcattgaaacgcatgtcacgtcctgccatcttataaagaacactgccttaatttttaactatgctgtagggagcacccagtgttcatacacatgtatgagtgtatgtcaacatacataggatgattgaaccatgaactctgtaaagtttggtagcatacacagaaatttggtaaggacaaggatttttgtgctacaaaacttccttatcaaatgcccagtagctctacgtgagttccacccaaggaccttgttgtatggacaaaagggcacaggattttccagccgttgctgcaataataggtttagaagacagacctgggattgtgttccagctttaccacttactacccctgtgaacttaggcaagatattgtagcatctcttagcctcagtttccctgtccataaaatgaggatcataatattatcaataataccttcttcaaaggtttttttttttttttgagacggagtcagctgtgtcacccaggctgaagtgcagtggcatgatcttggctcactgcaacctccgcctcccgggttcaagcaattctcttgtctcagtgtcccgagtagctgggactacagacgtccaccatcatgcctggctaatttttgtatttttagtagagatggggtttcaccatattggtcaggctggtctcgaactcctgacctcaggtgatccacccgcctcagcctcccaaagtcctgggattacaggcatgagccaccgtacctggcctgatgttaagattttaaaatgcggccaggtgcaatggctcatacctgtaaactcggtgctttgggagaccaaggtgggaggatcacttgagcccaggagtttgaggctgcagtgagctgtgatcatgccagtgcactccagcctgcatgacagaggaagaccctgtctctaaaagaattaattaataaaaataaaatggctgacaaagcatttagtacagtaactgcacatagaaagagctcaatacatattgtttattgcttttgctatttttattattgaatcacaattacctcattcattagatagaagaaatacttcctacataacagagctgggtttcagagttgactgagctaacgtatgtgaaaagtacttcgtatatgctctgaagcaccctgtgaaaataataatgattgtatgtttatttactgaggatctactaagcaccagtcactttatatactctccaattctcataacaatcttgtgagagacatagtatgattttatagagcaaatgaaaggataggcttacaaggatttgcttaggatcatgctcagatttcgacccagatctattttaaattcagatttatccttctacaaagccacatatcaatgatgataaccttgagaattgctaataatagtttcttgactttattaacggtcgaattggactcatattatctagtttaggctgatttgtcatttttttgagtagtatagcatccatggcatgctttttttgttaaaatgtatgattttgatgaaatgcacttaatacatcctcactcacaaacttgtatatgtagctacctacaaaagatatttgtaccactaagcccttggctatgaaggcagttccaaataaaagaacatgtcagcagagtcctaggcaatggcagtgtggttgaaatatacatgctgtcctcaaggtgaataatttgaagggcatacttttttgagtggataaattctgatttttattataattttcagtgctttttcagtcactcctcatgtttttacatttcagttacatgaattttcattcatattgtggattacaagtaaactgaatttacaatttgatgcccctgcctgcatactaatgataactagcttattgctcaccagctcacagtgatctgctcagattggcatattggaccctgggcatattcatgaggtaatgtatctgcctgcgagtgcatgtgtgcatctggaacctagcgtattgtaaggagataggcatggccttttcagtttggtcccttcctagctacagggctttgcgaaagtgttggtttttttttttttttttttttagtcttctaagcctcagtctcctcatctattaaactggaataataatacctatctctcagagtttcttggcaagtaaaggggtacttcagataacatgccccatactcaaaatatgtaactcccctttccacccttctttgttaccaaaaaaaaaaaagtatagcaacagtagaatatttgctttgttttttcactggatcatagttccacacacaagaaaaaccatgtctggttaacaacacaaggtctaaacagatttacaaggagatcagatgcttcgcctttcacctgactgagatgaagccaccaacgaggctgtcccatgtgtgcagtgccttctgcccagatgtggcgcaagtgctccagctgccccgacggggctggggcctcagaatccccctcactccgccttttgggtttttgctcctaaagcatcctggccgtcatcactcacatgtgctcaccaggtttcgtttctagttcagaggaaacccatacttttcacctgtgtcttttgatccctggcctgatggaatatttttctaatgcccccacttttcccaactgctctaagttacaaatggccagatttcagtcattaggagagtagaatttttttttccttttcctttttttttttttcttttttttgcagcctgtctcactgggggctggattccaaggaagcagcccgtgcactcacaggccaggggagccaggatttcaacggtgtcaacaatctttgctcatcacaccaaaaaagccctgtgtcggtgccgactcattagcatacagccgtgctgtgcttgctaacaaagcaggctctgggtatctgctagtttctcagcttgtctgtcttccttgaccgaaaagaagagaagaaatagattcaggcaagggtgctgtccccctcctgtggcaagacagcatcacaaggattcccagagagagcgagctttgaagtgattttaaagtcaccatccttgggagaaaggagactgtccaccctttgtttttctcatcttcttctatagcatcaacaagcaaaagaaaaatcgctatgttctctagttaaaaatgatcgagccctgaatacttcctggtcatctctttcatagttgttgttgttagagtgcataagaagaaatatctgtataggcagaggtacacaagcatgctctcccctcagtctgtctctcgatccctcttttgttgggggatggagggaagaagaaacgtacaagcagatgtgctgctagatctacaggcttctgccaaccatatggcatcttaaggaaagatggttggagcgtctggattagcagagtcgggatgggaagccatgtgtcgtgttggtacaggcagttgtttgagctctctctaaatggcttcaggagattgtgtaatggaacaaatggtcctgcgagcccaggaacagccttgccgctgctggagaggcaattggccctcgggcgggtactgcttcccttttttcccccagtattatgtattcttcatttaatgttcttcgaactctgagacttgactcggaacttttcaacttattacgctcgtgggttctgtctgcctctgtgtctgcctgaactctactctgtccctaatctggtaattaataatgccccagtcctcttctgtgtcctctccctcggccctccacggggggtccaggctcagcaggccagcttttcgtgcctcttgacaaaggccttttcggaggaggctgccctgctatcaggggttggggggtggagggaggatgatgtatccacccatcagaattcccagaagcctcaggagatggaaaatctttcatttcttaatgagttaactgggagttttacgtcgtcctaggtgttaagcacatgagaaatatgtagcatcactattttggacctcatgtgtggcattaaaaaaaattattctaatttcatactagtgaaagcattggactattaggtcacaggtgccatttactcagcaatttgagacctcaggattctactctctaatacataatttaaatactgtatgaatatactgtaaattggagaactgaaacactgtgaggctggcaacacatgggcagtatttcaactgtggtcaggttctcaggccattcttattttgggaggctggaggcgggagaagcagtgagacctcacaactagaacagatctggtgagtttcttctcataggaaggctctttggacatttcagctgccttttagggcaaacagatcttgttttgttgatgtttcagggtcatggcacatgcagtgcagtgtctttagctgctgatatagttaggtctgcctcctctctggggtagataacaaagcctgaggctccaggtgtgtcatacattgtgcttaatggaagataaaatggctagttgattcagtcaaagaacctgtccatttatctgactaaatcatcaaaccagtttgaattaagtcatcagcttgagtccctgagagtagctggtcagtacctggtgggcatttttgtttgtttgtctgtttctaagtccagggctggagaaagaggtcagtacctggtctgtgctgcacaccatgggggcagagtgcccttcctcctttctcacaggcaatgaccccaaaaacggaagcaagtaagaaatgcagcatccaggttaaaaatgaattcacttatggtcagctgtgtccaggctgaaaatgagtcacctatggtcaactgtgggaaataggaagctgtcatgcctactgcagcttccctcaaaggtacttcgagcaatgaaaatacattctaatttatttgctgtggaacaatgcaaaggcttcctcaaaaaaagaaatgaaacctggagaatgtgtgactgaactccagcaggagaacaggacacaagtctagaaatctcaagtgtcttcaaactgttattatttttatggatttgtgactccagcaaacaacttttactatcttaaacaaggtcatctgaaaatcacttgaagattgttaccaaattccttcataaatattttctacaaacataaatgtccaccagaaatttcagataaagtactatttctcctgtgtcaattctttgtatttaaaatttatctcatatacctaggttttaaaacacgtttttaaattttcagaactcatttcatgctgaacatgttaagtgctaggatattcttactttgtcttccgagtttaggatctctgcgggggtgtggggggtgtgtctgtagaaagcataattttgattgttatccaccaattggaagaaatccctactttaatctcttttaccttccaagtgtacatggtcccaaatttgtcagtcttagaatttcttgaaacaatgcaattaaactgcaacatatttcctaacattcttaattaagacagtgactgaaaaatgtagattaacagaagttactgtttttatcaacatattttctctctctttcccgccaccatcacatccccctccccctaccccttcttgctttaaatgtctgatgtcagtttcatccacatgtacattatgcacatggcactgaagaaacaaagtaaaaaattctcttttaattctgagctgcatgcccagcgccacatgcactgtctgttacatgtcgcttcttatgaggttcatgctgggaagtttctttttaaaggcgaagtgtttctgaaggaaagagttcaggttgggcagattgtgttagaaaaatctcactgtctccgagtggaattaatatactgattattctgtgcaggctcaaactggcagcgtgtgcaaaagttcaagagtgtctgggaattgaaatatggaggagaaagcgggagagtgagcagagacaaagaattggaagtagggctcagaagtgaaactaaacggtaactttgtaaagagaggaagggaattcaagtctgaacaactgtcatgaagcagtacttactgaaaatatttttatggaatcaggaagctccattttccatggcactttttaggaggggtcttacaaatgagtttggttattggaggagagttgccggcgggggggggggggggggccgggggagtacttctttgagttctcaagatccttgccagtttcaattaagtcacatgagaagcttaatcactaacatagaaatgtaaacgggttgcagtatttctttggcctattagccaagattttttttttcctgtttattaaaatttgagtccttcatgatcactgacaaacaatgattcattggtttacaaataaggaattaaaaggtaagaaaagcaaatgcaatcacgcagcacctttcccatcgcggggaaatcaacctttttactcattgcctctcaggggaaagaacttgggacgtgagcatggagttaatgaagctttcacccatctcctcctctcaaccgtcatcccggtttaatcctctccttctgccaaagtccagaggccctgcgagcccccgtggagtcgcctgagccagatgctccgcacccagcctccccaagccccggccggctgccctccaggtgcgggctccaggccctctcgcgcggcttcgggactcggccgagcccgggcctagtatccagagtcgaagcagccgccgggaggtctgggtgggcagggaggccgagaggacggtgcaccgcccggcagcgctgagacctggccgcctaggccaccctgcccggcgagggagaggggtgtctcctgcctggagcgctccgcggtggcccgagagcaggtgctggcgtgcgggaggcgcacgtggagccctgcggtctgttccacctgcagaggcacaattgcccagcgtggggtggaaggcaggctgggagctcccgggacgcggcgtggcagcgcagggctcggctagatgcgctcctcctcggactggttgagtaagggaggaggctcgtcctgaacgtgcacagccgctcctaactccgtcaacggaatttcactcaactccgagactgaagcattttattggcagcatttagaatcggggaaaaatctaccttctgtttagcagttgctcttttctgaagcagaaaattatctctagggatgacttagtaatagggtaccccattgccatgtgggtcagggattgggggaatgtccggatcctgccaatgcacctctgtaaaaggtggcattcagcctgggaggagaggagctggcagggcaggccgcccccagacacgcacaggcccaagctctgtcctgcagcccctcccggacacgcacaggccctgagccctgtcctacagcccctctcctgttgtcatttgctatcagggcagttctaccgccgccactaagctttgcttctcccaacacaaccaagagacggacatatagcagtgaatactgtctggatggtttagcatgtctggggcgggggtctttctattgcctgcaggggtttccgagtctacccagcaggtgctcaccaggagtgggggctgtgactgggacccatggcctgtggtgtgaggggtgaggggccactgtgtactgtaaccgggagcagcctggaagaaggcccctgctcccccttccctccggcgcctcttactcaggaaatcttaatgtgggaaggatgtgtatggggctccataagcaacactgacccagtcctggggagagacaaacccctcgtccgctctcagatcatcctcagagatcctctggggcctctgagttgaatcccaggctctcccctgctttcgcgaggacccaaggcttatgcacacagagggtttctggttggaacacctaaaagttgattgatgacagagagatggtgctaaactggcatattgcaaagcaatcttggtatttgttctttgtcaccttcctcaaggctcaaggtgctttttgggctaaaatggggcattctgtgaacgtgtgctacttttgaaaaatagaggaaggggtgttggaagcctagactggttctcttgccactcctcaaaaagcaaaattttgcagcccaaatattaaaaattgactccgcgtattccttctcccccacagtggcacacaactgggcaggctccatctcgtctgctgctggaacccactagaaaccaaatgagccctccagcaggcctaatcactctgatctgtcatggaccttctagctggaagagttatgccatcatattatcccaacactcatcagtgtgtggaggacccccttttactgaatgatttattgctctttgcagaattcctttggctgcagattttatttctgagtcactctgttcagctcaattggtcgccttcagttaccgtggcaaccagcagatggggttctttgacaagggtcagcggggaggctgccttggtttggacagaagaggagctaaataaaaagctttcagcattgacggttccgtagcggacggccaggagttgttatcaaattacttgcattaaaacctaattaagatgtgtgccaataagtgggctgtagtgattgaatctggttacttagctgctgtgggcccaatcttatgccatcacacctctgtggctagtttgactatcccaagaatggtcaaatatgaaggaaattgaggaagacctcaccacagtgtggaacgtgacatactctgggaccacaccaggagggttttagtctctgggagcaccagaaagtccccattcaaacagaaacttcctgaaaacacagcagtgtgccccccaaacccaagatggcaactgaacaggacctccatgcgtctgatagttccatgtcttccgttaagactattggtaattcagttgcaaatagcattcaacaaaataaaactggcttgtaatcactctgggttaaagaagtctaaatagagacatgccaactaagtatgaaggatcttttctggagtgggaagaaaggaacattattgggccagtcaacaagattagaatccaattcagtaggttagatgaagctattagatcaatatgaaattgactgtagttggtaatatactgtggttctgtaagagaatgcctttatccttaggaaatacacactgtagcatataagataaaagggcaatggtgcatgcagcttactgtcaactggttctgtacacacacacacacacacacacacacacacacacagagagaaaggcaggagagcgtaatcaatcagatggggcaaaattattacagtaggtgaatttgaataaagggtatgttggtattctctgtaatattcttgcaactttttataagtttgacattatttccaaataaacccatttttaaggacggctttagggtgaggtagggtacagtgtgcgtggcagtgtgggttttcctgctggtgcttctgtatggccttgagccacatgcagcatagatactactctgcaaagattctgattttcaacaatttccattcctctgtcccatttcctttgcacagtggggctatcctcaccattagtctgttcttgcttgagacaaagctgattaaggtaactcttacttcaggcagatggtcttctaggttcttcaaagtctaagattcataacgtgtcaactcctgtttcatggtgtcaggatcctttattcatgcccagtcttccaaaggtattacaaactcagccttggttcgatagcacttgtattttaagaaggttacaaggtagtgattcaacagatctaattgccctaagatgaagctgtgcctcctttttggtagaagcactgtttgaagaagttggtctttgaagagcctcggtgatattgtcagaggctttaggttcctgtcagaggcagctgtgctggagcttgaagagctgaaagtgtccccttggccatgggcccattcactgggggccagtgtggcactgtgggcttcccaacatggtcttccaagcttctggcctcttttgcatcctttgtgccaacaccagtctgtggatgagatcaatgtggctcagagtgtggtttccagagtacggtcctcaaactgttactggtctgggatgaggcaagaactgaaattgagtcagaaattttcaaaacaatcaaacactgcttcctcctttttattgtactccacaaaaccattagtctacaatagattggaaattttaaaagaattaaaatcaagtctggttctcctcactgagctcattggggaatccctggcctagggatttccctcttctcccgcccccaggcctcggaaaatgaactggtgtcagctgctgcccagaaggttacccagcgtgttctctctctcagggtccttcccttaaattctcaagtttgacatggaatagaagaatgtcgggcgtttcaaaaaaggattttgagatgctgcaaagctcactggatttagagtcaagagatgtgggctctagcgccagatttactacagacaggctgcctgaccttgggcaagtcacttatactttcttggcttcaccataatgggctgaactgaatgttctctaaggtgcctctcagccctaacataatatgattcttttcatgagaagagcaggacttgatccccccatcacttgggggcatccccaaggagccccctgttcttcctctgcaggcagccaaggctaattaggaatctgagagaatgagccaggaaaggggcagtacaggacatacattctcttcattgaaggtggtaccccctccccactgcacgatcctcaggaagaattcctttattgaaaccattattgaatagggtagatttaggcacgggaaatgtaaacagcaaaccagccactaaaagtgcgttaatgtcacgcctgtaatcccagcactttgggaagctgaggtgggcggatcatgagatcaagagatcgagaccatcctggccaacgtggttaaaccccaactccactgaaaataaaaaaaattagctgagcgtggtggtgtgtgcctgtagtcccagctactcgggaggctgaggcaggagaatcatttgaacccgggaggcggaggttgcagtgggccgaggttgtgccactgcactccagcctggccacagagtgagactctgtctcaaaaaaaaaaaaaaaaaaaaagaaagtgccttaatgttctgagcaaggataatgggctagagcgtgttccggaagcctcagcacactgcttgttctcactgataggacctcgttcacgagatggaattatgtaaaatgccgcagcaatggttaagtgttggaacaaagtaatacagctttacattaacatggtttattcactagaattaatgacctagagcagtaattgcattttcaaaacttcagcttgctgactaggtgtattgctatgtaaatagctagcgatatttgaagataggaacacagtaaaatctgtaaagtaataggattgtagaaatatggagctggaggagaatgtagtcatcttctagccccgaggctggcaaactttaaaaggtcaggtaataaatattgtaggctccatggccatatgttctctgtcgcagctactcggccgttatggtgcaaaagcagccatagacaaaacgtgaatgaatgggcatggctgggtttcaatgaaagtttatttaggggcgctgcaagttgaatttcatgcagtgttcacatattatactccttttgatttttaaaaatcattttaaaatgtaaaaatcactctcaattggcagatcatacagaaacaggcagtggcctgtagtctgaagtttgccgacctcacttctagttttctcctctcatttcacatgtgaggaaactgagattcaaagtgatcacaggatttacttaagttctcatgactgacgccagagtattttaggagcagactaggagagttttcatgtagacagttggttgttttgatgatgaaaattgaagccacacaaaaattattctccagaagaactcatttcgtatgtgtgattaatactgtgaattagaatgtaccagtggttctcatgcttaagaattcatcagagtcatccaggggccttattaaaacacatgctgctgggccccaccctcagagttgatggttcaggtctggagatcttattttctccattttacaaatggagaacctgaggttgagagagatactcagtctcaggcttaaggtaaaatagctagcttgtgatgtcccccatttccaagttcagcactcataggattaggattagagctataagtaatcatcaagcagagaggcagggctgcagttttgtttagagagatccttctagtctagctgttgcggggagtatggattccagggggccgtgtggaagcacacaactctatgagaaggctgtgcaggaacctggatgtgaagtgctggcagctggacttcaagagtgaaggtcatggaatggatgggtggatggatgagtgggatggatggatgggtgggatggatggatggataggtgggatggatgggtgggtgggatggatggatgggtggatggatggatggataggtgggatggatgggtgggtgggatgggtggatgggtggatgggtgggatggatgaatgggggatggatggatggatggatggatggatggatgggtgggatggatggatggataggtgggatgggtgggatggatggatggatgggtggatggatggatggataggtgggatggatgggtgggtgggatggatgggtggatgggtgggatggatggatggatgggtggtatggatggatgggtgtgatggatggatggatgggtgggatggatggatggatgggtgggatggatggatgggtgggatggatggatggatggatgggtgggatggatgaatgggggatggatggatgggggatggatggatggatgggtgggatggatggatgggtgggatggatggatggatggatgggtgggatggatggatggatggatggatgggtggggtggatggatgggtggatggatggatgggtgggatggatggatgggtgggtgggatgggatgggatgggagaggttcagaaggcctagagggctcatctgtggaaccaggagactgagctgtggggatggtgactaggggtggtcccacccactgagagggtcacagagagaggagcattagaaggtgactccagtgtgtcaggtggtgagtttgaggtgggcttggaaatgcaagagagaggcccgaggctgagatcaagtgctcaggatccttggcctctccacttggagtcatgagtgtagattttaaaaatcatgcaggcggaacatttccagtcaggagagcactgagcccagccctgggtcacaccagcatttgaaggtctgatggaggaggaagagggaccaaaggggagtgagagacctgtacagagtctaagaaggagagtgatgagtcgcactgtgggccttgctctgtggccttggtggcttaggtaatcctggctctgccttaccttgtgtgcgcttgggcaaatgatcgcttctctgcaccttgcttctctcatgcataaaatgcagatgataaagtaacgtgtagtattgttatgaggattaaattagggaatgtaaaatgcttacaatgttgggcatttagtaaatgctcagtaaacattagaggaggccactgggaggagtagaaaagtgagtgcatattttacagttcatgtatttgcacctttgaaatccatatgttgtttgaaaaatgttcttcatttccatgaggaagacgccgctcccagggaaatagtgagtctaagcactttgagaacacttatctaagaggaaggacaatcttagctgtagtcagagtgaccacagggaggaggctctggtctgaaaacatttcagaacaaaggattttaccactaccaccaaaaccaaacccaaaacaaaaccccaaaacaacaactaaaaccttccactgtagtccgtaggtagctcccagggggaattgtccagtgaagcaaaaaactctcattgaaaaacatacacgcataaggatataggccccctctggggaaggaaggggctggcctggagaagaaatccattggtagtggccctgtggagctggtgctaggttcacaagtgttcatttggttattatacctcatgacttatgtatacattgcatatattttgtatgtatcacatacaacataaaaaaatttaaatctatgtattcacttgctttcacagtattcatagcaaatgagtgtctgaagcataggaccagagctggcagcttgcaccgcttctgttttgcataagatattttccccagcccactcagctctataaagttgttttgtatttcaccacttgctccatcttatcttgaagccttgcatatttttttaaatgctggttctgatcatgcttgcagggtgtggctcagaggatcgctgttggaccaatggagatctgcctgggcccagcactcttatgagtcccctgtgatttcatcagcatctgcctttagaaacccgggcgtgtttgttcccatggtaactgctgcccctgacacgcctgaaattcctgggatgcccttgcgtggaaggggagcccgtgctgcccattctacccctgcatggggcagctgcttttctccctcagggtccccagtcctacccaggcaggggtggcagttgttcatctgcagatcctgaaggacatggaccctgtgcctgagattaggacggccgcaccagcctgggtgcaggctccctcaagtgtccttcctcatggacccgcggaccctacgctgtgctgtgagggccggggagcacaggggcttcctgggaggaggactggcttcctgcccctgatggggcctggccacagctcccagggctccatgacagcacagtgaagatagcaaccacatcctgggggccctggatgcaatccctgcctgttgcaaagatgagataaaggcgcgggaaagaagggtctgaattaggggttgagctctgaaatcggacgattctgtgtttcctgccgcatggagggcgtgtgtggttcgcaggctgtggggggcttcttgcagcgggggctgctgcctaaacagactccgcgggccccatgatggcaaaccccctcgccccgttcatgacttaatgcctcctagaagaaaaggctaaaaacaagacacacagaacaagaaattgcactctctcaaaacgacagtcgccctgaaacggacgctggaagaggtttccaggcccgtggcgacggtgaggggggtgaaggtcgcaggtggagggcacggggcggcggctgcggagcccggggaggaggcggcgggcgcccgggtcttcctcggagcgcgccccctgggctgggcggcgtgtccctgcctcccgccggcgccctcgtccccgcagcagcgtccccgccgccaccccgctgcctcgtcgcctttctcgcaaacagcggtgccctctacgtgggggatcctggaggctgctgagcacgagcgccctccgcgacccgcccctgctcccgcctccactcttgcctcggggggagggtctcagtcttctgcctaaggcgccctcctcccttgggaagtccgccgtcctctgccgtgaagattgcccctctctcctccagtgcctcctccccagcggcttcggtggctcccaccctccgcaccccgtctcgcgacctccccgccagcccagcccctcaccagaagaggctttctcttccagcccctgaaatctggcttctgccccagccaggaggctccgcagggcgctccgccaccaggtggcatttcccacaaaccggccactccgccctgacccctctcctccctggacctccgtctcccagttttcctccctccaggatcccactctcagtgtcttgccggattccagtccactgccagccattgaaggcggaggttccttaacccctatcctggggcgagcccttccctctcactgcagaagagcttctcagctaggggggtcgtgcgggcccggagagctgcatttttaacaaactccccacactgacaatctttgccaacccttcccaggcaaatcttgcccccacgttcatggtctcgcctcccagcaggtttggcccacccagctagagctccagctcggcccttcctaagccccaagttgcatagctgcctggtgggtgcgtgttccacaggtacctcggactcgccctgaccccagaacgtctcttctacgccaggccgatccctcctgccatcctctgtctgttaaatggcactgccattgcctgcaggacgaagtccatatttgctggtttggctacagagtccagcgtcgccttcctctgagcagcctgcagcctctggtgcagccacactgcacagcttgcagtttccagacacgcattggcctttgcagtgcggccccgaagtgggaaggccccgcccctggccctggccagaaaagcacccactcatcctttcccatcccagcttgcccgctgagtgactttgaatcaatgattcatgttgtctgtgcctcagtttccttaaccttaaagtggcataataattagttcctgcctcatggaattgtgagtgctaaataaacagtaagtctagtgcccgacataaaagtgctcagcatacgacgatcatgagccatgtctaagcaggcgcaagccctcccaggcttctcatctgcaatattggccatttctcttcatgcctcagtgtcctgtttgagttgagcatgttttttttacaagtgagtctctcctccattggccgggaaccgcccgagagccgggagcatttgtcattcttgatggacccccaggtcttaaatcagtacttgacccttaagaggtgttggccgggcgcggtggctcacgcctgtaatcccagcactttgggaggccaaggcgggcagatcacgaggtcaggagttagagaccagcctggccaacatcgtgaaaccccatctctactaaaaatacaaaaattagacaggtgtggtggtgcgcgcctatagtcccagctacctgggaggctgaggcaggagaatttcttgaacccaggaggcagaggttgcagtgagccaagattatgccactgcactccagcctgggcaacagagcaagactccatctcaaaaaaaaaaaaagaagaagaagcagaagaagagaggtgtttagcaaggcttggttcgtttggtgaattaactcagtgagttaaccaccattaacgatggttaaggacacttgggcgctggctcgatttgactccgagctttaccgattacttgtgtgactttgtgcaagttaattaacatctcagcttgttttctcatctgtgaaatggggatgatactagcatgtacctcctaggactatagtgaacttttaattaagataattattgaatttaacaggtagtttattaatgaaatttacataggtaattgtggcgcagtgagcccaggggctcaaggtgttagcagtcatcaacagtgctatttgaaactgtgggtggatgaagaggtgaactcaacaccacaaatatgacagagcagtaaccaccatggaaaagaaaagagagcttatgtgtctaggacaccccaagaaatctcttctgaatgaatgatggcaatgaaatagccattaacagagggtaggctggtttgtgcagggttggaggcttttccaaaaataaataactttcaaaaaatctcagccaggcgcggtggctcatgcctgtaatcccagcactttgggaggctgaggtgggtgaatcatgaggtcaggagttcaagacaagcctggccaagatggtgaaaccctgtctctacgaaaaatataaaaattagctgggcacggtggcaggagcctataatcccagctacggcaggagaatcgcttgaacccaggaggcggaggttgcagtgagctgacatagcaccgctgcaccctagcctgggcaacaaagcaagacttcgtatcaagaaaaaaaaaaaaatcaatctcgggccgggcgtggtggctcacgcctgtaatcccagcactttgggaggctgaggcgagtggatcacttgaggtcaggagtttgagaccagcctgaccaacatggagaaaccccgtctctactaaaaatacaaaattagccgccgttgtggcacatgcctgtaattccagctactctactcgggaggctgagacaggagaattgtttgaacccggaggcggaggttgcggtgagccgagatcgcaccattgtactccagcctgggcaacaagagcaaaactctgcctccaaaaaaaaaaaaaaaaaaaaaaaaaaaatctcttttcccaatatttgtaatactgggagtgttcaagttgatttaaaaattgagtcaattggaatccatcctcagctcttagctgtgaagggagagctgccccttcttagggatctcacttctcacagcaggggtgcttctgtgtgtggacatcctggtcagctggtcccctgctgtcttgtggggctcacacccaggcacttgattcagcggggtctgggtggtgtctccttcctccttcccaccccagtaatcgctatagccttcccaggcccccaggttgcaaagcactctggactaaacctcctccaggttctgagggctccataggaggaaggtctaggccagaaccggccccatcgctgaaggtggagccagggtggccggccgtgaccggtgtttatgctgtgagagcggctttggccctgcccattgccctggatgggctgccatcccttttcaggagttcaaaaccacatactgagcccatcggtccaaaggaccatcatctcatttgatccaagcacagggcaagggaccacatggacaatggctgctcgtggcaccttcttgccatgcagccatgtcatggtgtcacttgtcacgtttcctggcaccttcttgccatgcagcaatgtcatgatgtcatttgtcacgtttctgttccattcttttcgagcaagcaggaagccacggggctacctcagttgctcttagccagtagctctctccacaggtaggccttcatcggaggggaaaagccaccttagggttccagagctcaagggcgaatgatgctttccacccactaatttaaatacggaagcatcagattgtctgcttctcaaggaaaagagctgttaccatctctgtctcttcaatgggacccactcctgggccccacagcagggcaggtgctcagatgaatggtggccgcctgcctgtgtcagagggtcggcctaggcaggttccccagtccgctggcccgggacgtcctcctctctcccggccgctcactgttcaggacagcccgggcccccccctggggccttgcaggagagcttctgtgatccactgggtggctttgagggtagctcccaggaaaggctgcctcagccccagcgtgatggggacgggtaggggccgatgaggcttcccagagcagcgatggccttaggtattgccagaaggaaacctacttttcctccaagatcagagggaaggatgaggtggggtgttggagcatcaccatatatatacatcacacacacagggaaacactcctacttggatggaggatctttgctgttctgttgaggccagcctgatcctggaggcagggcagggcctggctgttgcccaggctccaaagaggcgccagggcgtcccttagtccttacactttctccagaacctgcgggcagcaggaggcccttgtcgggacaggcaaggggggcggtggtgcggaattgtgggcgtggcagtcggaggtgccaagcccggggaggcggggcttcctgggagcatgcgtagtgccggctctgcctgggcggggtcctaggctgctgctcccgcctcccccggcacaggtagggcgccccgcagacccggacaacgctgggtgtggctgaaaacagggagtcatggtgcgttctggggaagggtcagggctgggggctcgggcccctggaccaaagactctagccaaatccatcggaggctgagcagggcgatggggcagggccgggggagccgtggggaaatgggagggtgtgggccgagcagcgccggaggcaggtaccgaccatcgccgggtttcccagagggcagtggtacctgtgcccacatgtgcggccttttttgtaaaggaacctatcccaacccgaaggcccaaacgtgtggccgtgtaagtttagttgtgcccggagtcccaggagagcccggactgagggcagccagaggccggtgtccgcagaacggcccacgaggccttcggctcagtagcctggagtttgaaatgcaccttgagctttaatggccttttccttgtgagaattcgagttaacgtgcctgctggtgcttttgatgggtgaggacggtgaggcaggccacacatctcgcttctttccagaacacttctgggtagtcgttcaattccacatttaatccaaagccaacagttccatgggtgactgtgctgctggctgtaggaagccgactgtggacagatgaggataatggtctgagtgaattagcaagtctggagaggagcgcccatcagcagaatgacaaatttaggatctttaaagacatctggtcagcgatgccggagctcgtgattgactgagtgattaataatggaaaacccttacttcagtgtttccacggccctcacccacttccccagccggggcggccgtctgctcagcctgccagagacctttccagctgaacaatggcggcatttaggcccctcatctttgacctctgcttgggagttcaaagcttccttttccttctacttaccccacttatctgcgtgttttctaattgatagtgtactgagatggctcccagttcccacgcacatttgctagaatgttaccttcacacagtgcgtaccaaggacctagtgccagccagagcctggcacctcagggtcaccctaggcgtcctgctcatggttccctatcaggggcttccctcagatacacacagcccctgggcctgttgaaaggctgacgttatccctctttaattctgcggtggatttttctccaggctaaggcagctggataagcacagccaggccacagcccagcagctggtgcagctcctcagcaagcagaaccagcttctcctggagaggcagagcctgtcggaagaggtggaccggctgcggacccaggtactgtgcagaacgcggcgcaggtgggagtccttgggcgggcgtctacaggtggatcttttatgcacctcaacaggccggctttctcacggatcacatcggttagcagtaagctgggagggaggtcccgaagactgtgctgggcacagtgcaggacccagagaagcggagccatgggcccgtcctggtgagggagttaaagtccgtgcaggtgaacagaccccggcccgcgaatcaacgaaccacaccgagtgccaagttgcgccgtgcaggctgcggagggtgcgagagcagggagaagcgggaggacggccgtgggcggcagaacaggctttttggaggatggtggccttgagctgcctctgaaggtcgtgtatggtttgaattggttgaggaaagaggtgttcccaattagcaaagtcgtcttgaatggaaggcaggcatctcatcctaaattagctgactgattactgggctaatatctggagtgcttgcagagcacccggcagtgttacacacagaacatgcattaattccctttacccttgaacaagcaggcgatgctgactttattgtcttcatggtttagatagggaaactaaggcccagacaagcattacagctggcaagtagggacaccgcaaacggaggctaagcctgactccacagcccaggctttccccattcaggttagatccggggccaccagcagggaaaagggaggaaggaaagtgtcccggtgaatttggaacacagtatgaaacctcgtttgctaaatcgcttctcttcctgtcagagaggctgtgcattttgccccgtcaagcagtttgttaggataatgaggtggtccgtgggctgaccaaggcctccgcctttaattaggattgcacccaggtgctctgtgagtgccctggggacttcaggcagtaagtgcttggaatgattaatatgaaaaatgcatctggaaatgaaaacgaagaggagtctcattctcctcacaaaatgaccctgtgctcaaggaacctgtaagtactgacttttcccactcggtccaaaatccctctgccaaacatgtgttcacagacagtaaatgagcacacccaggcgccacggagctaaggcctggaggtggaaatgcctctactgtccccatgcttctgagactgctcccagggactgtgggggagcgggccgctcaaagtccgagccacagccgcactgccacagctaatctaggaggcgaggcctcacctggcacgctccatggcagggccctggaacctgaattttgccaagctgttgggatgattctggacgacactacattttgaaaacctctgaagtgtttggagctggaaagaacagagaattattccaggttgtgtcactgtgctgaatcccctgcccccgcttcggacaagtaacttaagcctttttccagcctcagtttctcctctgcacagtgggcatggtgcacgcctggcttcacgggctactgggagtgctgagtgcaggcgggatgccccacgggcccttgggcacacaggctgaggacgtgtgagggtgtttcctttctccctcatcttcagagggtcctgggagaggttcagggaaggcagaggcctgcagagcagcagctgtgggaccagtgccactcccctcccctctgctttcaggatgaccccctcatcctccaccagacccagcccagaacccagccctgtgggcaggtccccagggagggccccagcagcacctgctttaggcctggccagccaaagatcaggaccactggagccactaggtctcctggcaggtgactaggctcttgtcacataggagggagggaccgtgactcctggcatgagtgaatcttcagcctctaaagccaagaactctgtcagacctcaggttgtggggagtcttccgtggaagctggagcacacggcagcttcctttgggctctggactagatcaggagaacgtgggctttgccttttaactccccatctgcctgctttacagcacacttagatcttaacatggatcaccgatgcttagaagcttcttccagggctttaaaaatctggctattgccaaatgagttgcaaaattttcacaaaacgcattaaaaaaaccccaaacctcaaaaaatcctcagaaaaactagcaggtctttctttcttcttttgcctgaagcaacagcaatgatttgcccattcctgtgctatctgatactggcccatctggctcatctctaaagcggcctttcagattcaaatattacacttggagttattttaatatgaacatgacaaaagaaatttggtagagggaatgttggctttcagttgcaaatactagtggtcagagaggaggcagggatccaggtttgcaagctctctgctgaatatctaaacccagagcctgctttttctggctaagcctggccttcacctctaggtaggggctgtcagtgggcttcagcctctgcgatgccttcttgtcatggaatcagcttgagttgtgagttaggcttctgctgagccatgatgtgggcgaggctgctgtaggttcgagcaggtattttggatgcggtgccgcctgagggctccggagtgctcagccaccctctctgttttcctggagtggcctgtgggtccagatcttgggcagctgagggttagagctgtcctcatgtccgggttagagatggtttaactaaaggcttccgttttctcagcctggatgagttaagcttaacttaattttgcatgtcaaactctaaacatctctgtccacttaatacccagaagagaatgggtcgggcaatggttccaaagcaaagtccacccctttccttccctccctgtcctgggtcctgagccccgctgcccctggtggtggggctcaggctggcctgtggcctccaacaggaagtgtctagcctgttggcaggcttcattattctaattgtttctgcttgaattctgaaacactcacaacaacatggctggcagagggagcccctggtagtggtagctgccacatggatgcttttggccacgagaacccccatcctccccgctccccggcgctgtctgcggtgggcaggactcagggcactggctcaagctctcggctcgtttcttggcttttttttttttttttttttttttgagacggagtcttgctccgtcacccggactggagtacagtggtgcaatctctgctcactgcaacctccgcctcccggcttcaagtgattctcctgcctcaggctcccaagtagctgggattacaggcacccaccaccacacctagctaatttttttgtatttttaatagaaacggggtttcgccatgttggccaggctggtcttgaactcctgacctcaaatgatccgcccaccttagcctcctaaagtgctgggattacaggcgtgagccactgcgcccagctgtttttttttttttttttttttttgatgagttttgttcttgtcgcccaggctggagtacaatggcatggtcttggcctactgcaacctctgcctcctgggttcaagcaattctcctgcctcagcctcccaagtagctgggattacaggtgcctgccaccacgcctggctaattttgtatttttagtagagactgggtttctccacgtaggccaggctggtctcgaactcctgacctcaggtgatctgcccaccttggcctcccaaagtgctggcattacaggcatgagctttgcccggcctcttggcttgttcttagtttagggtgactacaaataatggcattattgatctcctgcctcacctgggttcggaaacaacttcaagaaaatagcttttaaatgtcatgaaatggctcttacttgtccttgtggagaaacagacactgaagcactagcccagctttgcctagatgcagttccccacactctgtattccgggagggtcagggcctccagacacacaccctggcctgtcttttgtttgagactgggctgggtagtcgcactctcgccctcttgagaggcaggccctggctgggggaggctgaaaccttggtggtgggggtggggggagggggattcggggtgagggtggtgggtctcaggggagtttgggcagggcctgacagcttggagcagggtcaggggtctgcggcccagagcctgggggctctaacatctggctaggaaggttggagccagctggtgaggaaacatgagtcttggggagaatggcatctgggacaggggaaaacagaaattatctgtccacttagaggatggtctcaaccatcaagatgattttctgtgtctgctttcttatttggtaatgaatacggttttggctgacttgcattttctggtagccgtcgtatcctgagcaggctgcttggttctgtctgcagtgttcaatctggggagtgattcccttttagtcccctcatatgaatcacttacagtttagaaaacagagtcggaaactgacttgtcagtggttaatcagttggccctatgacttttaagcattcttggcagtgaatttactttctaatttgatttaaacttgtgcatggatccagcagccatatgtgattatattcaagatcatcgacattatctcattataccaaaggactcatagaagagagccgaaaacaagcaggggacacagagacacagaagatgatgaagggaggaaaggcccattgcaactggaagcaaagggagaagggaggttctagaaaagtgacagctctcagggagcaagactccctgccgagggaggcctggctgcaaggcggagctgctgcaggctgcccatgttaggccttggaggtgtcacctaatttactgtggtccttccaggagccctgggggcctcgcccagctgacttaggagctaccacaaagttagctacctgtaagacagatggcgcttgaatagaacagcaaatacattgaataaaataaattaaaaagcctcctcctgaaccaagattttttggaaagaattctaaatagatgaaaacaaacaatttgatttcaaccaaattgttgtttttttgtttttatcctgattttcacccgaattgtcagtctcaaaaataaacactgatacattcccagaaaatatttttcaaataaaaactgactctgttaaagtttgccctgattctttcaaaactgtgtacaagacactgtcaaccaaagtgacttgcatatttttttaaataaacttgaacatatgcagctaaaatgtcattaactccctgctgcctgagtgtttttaaaaaatgacacaagaccctgggtgctgcatgtctaacataagcatctcgcgaccttcggagaaacttccccaaacacctccaacagcagacagttaaactttttgttttttgactgagcgccccgtgtataattaatattgaaaagcgcatagggcttcattttagccagacttgctcttccgttaacagttcactttgtccaagagtgagtactttcagaataagaatcatgggagaaaagtcaattgaattttatattccttcagatacattcactctacttattgcttcctgagtcagacattacatttcacaatataaattcacaatcaagattttaaagggagctaaatattttaatccaattagacaagtgaacaaaacactgaatattgcatgtagtgtagataagtggttcttgcctttaaaagactgtaattccgtcacattacaaccccaaatgtcagtgttgtctttatttttaacactttcaaacatgaggcagccagaggctccactctctgctgttggtgacactgtctgtcctttgggaattcttaaaatctatttaccatggaaacatggttcatataaaacacagacctgcctgtgtgtagaggaagttctcatgactcaggggacttgagaaagctggaagatgacaaactcagaccccacggttgggaaggaacccttgggcttgggtgcgccctggggaggacaggtggcaccgcagagccagggcctccaccccggcctcatgtgtgctggggcctccctggcctgtgcggggccgcctccctctccccgccaagtccagctcgagatgctgtcttacggaacgtcccacttcatgtctgcaaggcggccttctctgtggatacctttccattcctctggtttctgcggccctgttcctttctcggagcccagaagcagcaaagccaagccctgcggtggaagggaaggagggctttgaactctgactgcggtgtggaggctgttatcaggggcccagccgggcagccaggagggaagaatggccgctgccctgcgatggccttaaccgtgagcccccgcctgctttgcagctggcagagccaggttcctggaaaggcctgacccggaggggacgaggcccctcagtgagaacttcagtcgctgtgctggggacagcagggccgcaggggcctgagggtggctgactgcccctcggctctgtagaggagtgctcccttctgacaggtgggcggtcctgctcgaaggccgcgtttccccgacgttctgcccagcatgctgagggcacctctctcctcagtgcgttggtggcgagccagagctcacgtggcttatttcatccaggttgccttcccaatttggcagcttaattccgtagatatcaaactggctgcccctcatctgccagagcaagcaggagagcctcgcatgggagagtctggactttgaggtcaaactgcctggattcgaatctcagctctgcgttgcttcagagacatgtgttagctttcatgtcacttgatttctggcagagaaaaagaaagaaccagcttccctttaaaaggaagtgcctcatattacccagagcccagcacagatgattatgaaaccaacaggattagtgctgagatcattgtgggcttgaaagggccatttgagataaataaccattttgtacagatagaaaaataaggcccagagaaatgaagtgaatggaattgggaagtggctgggcagggaaatgaacttcttctcaggccacaggatgtgtggatgggggcaggtacccgagcgggtgcgggcggagccgggcctggctggaacagctgccgagccctggccccggtgcccagaacacgaggcggaggcgggaggcgagccaccaagcgaggcaggggctgccctggagctctgtcaactcagggccagctttgaaatgccccagatggaggtagggggaggggcctgccctctccagttacaaatggatgctttattgccagacacacaaggaacaggaccacgttttgacttggccaaacagagacagcgtgccagtgagcagagcggacagcagggggggaaggggttgttaccttcagaagggttggctagagccacccacggagacagtgaagtgcgaagcccgggcaggtctcctgtgagcaggggcgaggggtgccaccatctccccgggctgccacttctggctggtttgggaacaaagcagcagcaaaggctggctggaccccacagtgtggttgcctggggaacagttcaggtcacccagagcaactgatttcttacactcagaacttaacaaactttagaaataaatgaggcagggtttgtggagagatgactccgataggatttaaaatgagaacaaagaaaatgggttagcagctgtgtgcctgcagatgggggcacgtttccaccacctgtggacagcacggcaggggagcagtggccagggcgccctgtcgcccccctctgagctgcaggacagccacaggagggccacagcaagggccatgatgacaaatggaagggcagaaggacgggagacactggctgagggctcatgtcccactggcatacgcacgctctactctcctggacgagaccatgatcactgtggtgttgatgacaggacttcctggaaataagcatcgtggatatccctaatggcagacaagccagatgtgggcagtaactaaggcttctgtctcggtcagagaaatgtgtgttaccaaagagtcagcaaatggaggcgacaaaacggtgacctcctaggacaaattatccagccctccagtgctgactgaacgctcaccatgggtcaggcacggctgtaggcacgggtgggggggggggcgttgagcagtgaacggtaagttcaacagtgtgaaagtggggatggatatggggcttctcacctgaaccgcaggaaatacaaagcccatagagatggccatggctgatctgccgcaggaaggaatcaggctgacttttgattggttcctggtgaggcccgtacatctgtgtcacccccatgcaggcccacggaatcaggaggtcacccgtttctggaacagctccgatagtgataaattgctaggtggcctgggagcccacaggcattatgtagactcatcatgagaaatgcctgtttcctggagcttatcaaaaaattccgcaacacattttacttttacttcaggtctttacgcctattctgtattgtgtgtacgtgggtgtgttctctacccaaaattcatcactgcagccttgaattctgggctacagcaattctcctacatcagccttttgagtcgctgggactacaggggtgcgccaccacacatggctaatttttacaattttttttgtagagatgaggtctcactatgttgcccaggctggtctcgaactcctggactcaagcgatcctattgccccagcctcccaaagcactgggattacaggtgtgagccactgttgggttgtttttcttttgaagtgttatctgttgggatttatgcttatcccttttgtattcagtcatcctagcatttctaaagttaggaagccactgtgtcaagagcgaggccaccaggccacctgccttatgtggccaatccatggagcaggggtggagggccattcaaaccagtcatttagcaggactgtgctgggtcagttcgatcacctggcctggagggcacgtcagcttggtgcaaaccctgcgtttgacaatcagatcgtgttggtggcagtctccgtgctgtcagtatcccactgaggacagaagggagtcccctctgcaatggcagggctctagggcatagtgcatggggtggactcctcatgggccactcagacagggcctggagaacaaagcatcccgtgggcccaggaaattgtccacctggctccacgggcctgggagggctgtgtgcatgggatggcaggtttacgaggaggagtgaggcctcctgccggagccccacctgcattcagcctgaggccaggccccccacctactctaactaccctgctgagaccaccccactactcacagacctgttcaagaaaaagttgtcctcagggtctctcacacactgggaaatctacttgaaatgtaaacattactttttctcatttttcataaaaggcaacaggctgatgttcatatatttctcttgaatgcggattcagtttcactcattgccctgtcttggaaatccccatgttaatgatggcttaaattaggttgatagagtcctcccttggagtccagcttggaaaatcctcactggagaggggcaggcccacttctctttttggaagatggttcctaactaaagaaagagggaccagattgggcccctggccctgcagtgcgtcccaatttatctgacgtagaaaccgggatttggaaaataccatcctggcttttctctggacttcacaatctagagggcgaggactgtggcccagtcaccttcccacacagtgcacagtagaaactccagacatgctttgtggagtggaaacatttccagtggcttctgactctagttcctgatgtggtttaaactaatttgggcagccatggcagcagaggccaggaacagtattcaatactttctgaacttgtgattctcccccaacctgatctgcatgaagctactttggaacatttgtatctgcgtaaaactaagagacctcagtacacccaatcccctcttccaacacatgtgaggtttccatgtgaaagtactttttcataggttacaataaattgcttgcagttacaaatttggaggtgtttcagcttgtattgtttcacgaggaatttcttaggggcacttggcctacaccctgtttttgttctagaattacctgccgttaaggtcagataaattttcagtaaacagattatggcacaaatcaatgtgtcctttcccggacagaagagatggctctctggccatgtcctaacaccagactgtccttatttaagaggcaggcgtgtcttttgtctaggttgtcttcaaatttaacccattaaaccagttaaccttatttcatatgtgaagggctttgatgtggacaagatgaggcacaaacttttcatataatttccacatttttagcaacaggtttttttctccaacaacagttttcatcataaaaggtgactaaaccagcaaatgagaagacaaataacattgaagaacatgagctattgaaacttactttttattattttttccagttacccagcatgccacaatctgattgctgacctggatggaacagagtgaaataaatgatttacaaagagatatttacattcatctggtttagacttaatatgccacaacgcaccacgaccttcccagggtgacaccgcctcagcctgcagtggggctggtcctcatcaacgcgggcgctgtccccgcacgcagtcgggctggagctggagtctgactctagctgagcagagctcctggtgtatgttttcagaaatggcttgaagttatgtgtttaaatctgctcattcgtatgctaggttatacatatgattttcaataaatgaactttttaaagacttgagttgtaatgtttcctttttatcttgtagtgatgaacaaaacacaccaaaaaggcacatattttaactaggccaaagtatattaaggaccaaactttttttcctgccattcatttttcttttcatgatctatatatcaatcatccttcacctttaatcaatgtcccatcagactccattttatttatttatcgtcctactttgtgcacaatcaatcaatcaggagacaccaggaagcactatgcattactctttccattctgttaaacaacgaaaacagacaaaaaagcatctttggctcggtggtgtcagatttttttcttcaatacgcagtatttgagaggagcctaaaaacgtacttagtgaaattagaaaatttacttagagtatatcaaatatctgtacacagataattatttgtctaaaatagtatttctactatacacaattaagccctcaaatgctttaaagtaataaaaacggacactggacataccgtgttgtatctgagaatgacaaacactaaaggcaaggctgcagttagttaggacaggtccctgaccttcggctgccctgcctggccagcgagccatcatcctcatcaccatctcaacacagagctgatgtcaccatatgctcagccttgcctctcagaagtgatgtggattaggctttggaggcggtggcatgatctacacacagagaccatttgaatctcttgagcatgtaaaaggttcaagcctgaaacagtagaacttctattcagattcagaagttttttatttcatcaaatgtgctagacataaaggctgtcacataagatattttaattgtccttaattctgttttagatatactgtgaataaattatacaatattctaaaaatagcacctttaaagaattatagaggtcacttttttttagcctcctggatctgtcaaccccagtggttttgagagaagagcacatgtgagaatgccctcaaatttggccgtgtgacatacacatacatgcttgactcactctggtcccaaaagccattcctctgtctggcttcgtcacaggagcaaagccaagtttctacaatagtagctttatgaggtaaaatcagaaaaaggccccatccagaatgattcaacgtgaagtcagactgcagtccagccatcctacccatctacatcacccacgtctaagtttgttaatttgccatgacatgttgttagaaatacactctaagaaaggaaatatgcagagcagtacattatcaggaagacgttaatgaaaagctacattccttcagattctgggtccaaaccgtgtgttgtatagatgattcgggtctgaatgtccccagggtctgagacctccttcatccctggcttcacagtacatccatcctaaatccagtgctgagaggtcagcgtttcccctcagaagcagccgttcatcaaagtttgcacaaccgcactactgccatttcactgaagtaaaaatgatcccctatgtgtgtgtgtgtgagctacaaggaattatttctatattttcctgtcacattttatacaaggtaggttaataccagctggggctattaaaaatcatgttttcattaaagaagatttaatttggggggattatagaaccacatccaacaacaataaacagagaagtagcagattgacatagtgctttatttaagctgtctgtacgaaggaaaatcatgttcatccctatcatatacgtgtaaaaatactaaggatgtacagtgtacaaaaacagtttctcctagttattccacatccttgtgggtcatatacttcaggaaatagacaggtttagtatgaccaacagtaatagtaatacagtttcttgggtttatagttgcatctgcttaaaatccttaaccagatgactagatcttgcgcagatctaatgaaagaactagcaaggtcaagaaatgtcacaaactataaagctacagggaggtaattcaattaccaatttagaggttttctttttatttaaataaatactttacatttcatgcttgcctgtaatgcactaccaggagcaagataaggaaattctactgtagacagtacaaacagtagcagcaaagtgtgtatgttgaggtgtaatagagagaccctgcagttagtaaggaaggcccttacttttgtactctaggagaagcaagtggcccctgcaagaacagtcagctttaagaagctggaaatcagggatgggaaatggaaaacaatacttgaataatgctatgtaattagtgtagaaagcaaagctgagcgcgaccctgccaaccatctaagcagaaatggccaatttcctccaagatggctgcattatgacaagaagtcaagcttcatgacagttagtatgggctggagtctgcaaagtctgaactgtattctcatagaatgattccaggtttcagggtgttccacctgccagaacccaaaactacaactatgggcgacacaagggaagttttagaaatctccctctacacgcatttctggttttctattattcctccatggcagctgacagatctggaagtgaaaataggggattctcaaaatcaaagccaagaagacaccttgtgtgacaccaatggagtctcagagggtggaatagaagtgactgagccccaggcatggctgggaactgagagccagtgtgaggagtggcccgcctggggcaatgtcagtgccagtcattaatctttaagaagtgtccttggccaaggtcatgggaatcactttaagatttgcgggagaaaaaaccaaaacaacaaaaagctgtgtgcttagtgttcggtgtcatgctttccctctagaggagtaagtgctctgaacatcagccagtctcagctttctgctcttcctctcacctgtttctttcttatataatggatgcaagacaacttaaagaacataccttctagtctacttttttgtcaaaatgaaacattcaacataattccaagtgaaaaaaaaaagattagctatgtgtgtaagtaagaatgaactaccatttactgtaacttcctactcaatactaaggatgaacttcactcaggtagaaatatgaaaaagaaggataacgttgatgtctgaatatgtcttagctgccttagtaaaatgccctttaacccccgtcagtcccagtggcccacccactgccagcagtggtttcatagctataaatccacacttccagcgtcaagaggctaagacatctgcatatgaatatgattcatcctacttagaaagtcacttgctctttcatacaatgcaatcataatactacgtcatgctgtagtcttccgtttgggagctgtcagagtttaactaaaatacatttccatgatcactccgcggagtaggatggccttctgcttgccgcaagagtggcccccagcccctaggacttcacaggctgctttggaaattgtcagctcctagcaccaaagggtttaatctgaagatcatcattaatgaaggagaaagatgaggtttgcatacatgccccctttcagtgagaaatgttggaatctgggggacatgagtatatacagaaaaagaaaagctggaggtgttctctttttttgttgttttttccctgatggcttaattcagtgataaatgtaccatgatcccaagaaacacaccaggttcttagccttcactgcccatttcctaaatactcaagatgtgttcattttgccacgtaaagatcatttcttatcttcactcaggtctcaattttcttcattactttttgttgccaggtcatcataacgtttcaaattcttaaatgagcaaacgtcaacagctatttgtttcattaaccccttggcatgcatagttggggattttctcattttcagtaccaaggggttaaatggcagcatctcttctcccaaagccaaattctaaccaatatattccatttcagagccttatcattttttttaacagaggagaaaaagtgcatgattctcatcagcgtgtacaatccttgcacatgggtcaaaagtaactgcagtaagtctattttatataagttggagctgcgtttgctaacatgacatacaattctcatcactaaaaaataaatactactgcaatataaacaaaatcataaaaggacattcaaagtttcaacatctgagaaaaagctaattcacgtagaactgaaagtaaaaaattaaataaggcaaacacctgtttaccttggtgtagaaattttggtgaaaagcagtatcattatacctgtctacattcttcagccatcagaggtgataaatgtcaagaaggaaaaaaggtttccaagcacaggggaaagatgctctctggctcaaattgtttcataagaccctttaagtgaccttgactgtgcatatgccttcagttcttggtagaacagtgttcacttgctcatgattgcccgtgaagtctcgacatccacatgtgatatgggcttcttctacagtatccaccaggaatttaaaaaaaaaaaattatatatatatatatatatcccaacagttgttcagtccttctaccaaatgcttcctaatcaattccagccacagcttagtgatatatgcctacttcacgcacggatctgatgtgctttacatatgcacgccaccacccttccacaattgcttgttctgaatttataaactaaatcttcttagtctagttagtttttctcttctagaaagttaaaaaatgtacctagaatcagtgtatctcatttagccttcactgagggaaaaactaaaagatcaaaagatgataattggtgcacaaatgaacaatggtgggctcatgacttccaaaggttggaaaattacttcttaaagttgctataatagtaagacagtagcagcaacagcatgagaccttagactgagatacaatttcatgcaaaaacaaaaactggagtgtatttgcgtgtatgtgtgttttcatgagggtgaaaggtggcgaggggtgaggacccttggctggtctgggatgtcggaaggtgcccctgctatgtgtaagagctaggactggtgatgtccaggaatcattttcagtaataaattgaagatgacagtgaagtagcagaatgaaagagacttattctcgtccacttgcagagtaggaaaattgagggaaatgcggccgcctctcattgtccatgcagtccataccatcctcatcatctgtgggcaggaaacatctattttaattttacacattcattttttgcaacattatctctagtctatgttttttaaactctgaacataggaaagatgaacagaggcaatagctcccataaacttgtgttcatcaataagctgtagagtaattatacttcaaaaatcatctgattttcataaatacatagtctatgaagaaataatactatagaatcatctctaagacatcaaaatttcaagactcaatgaaacagtgaaaaaaatggtattgaagaaaacagaagtttttaagaaggagcagtcttcagtaacctttcatttcatgtaaccacatatatcaaaactgcaagtcagtgaaatccacagcatccaaagtctgtatagaattcatcatcgaatgtcttcaagtgcttatattttttctttgtgatgctttaagtgcaactgcaaaataaagcttcttatgaaatttcattcaacatctagcatctggcttaactcacctttcccaatttccctatgataaaactttagcatgaagggactaagtgaaagaaaaagagggaaggatgtcaacatctgagtcctagctcatcaggaaacaatggaagagacttgaaaggcatcaaaacaggccgctgacaatcacagtgttcctcctgtcagctttcctggtttcctgtatttcaaagatcacagatgatcagcaccctgttctcataaatgtcctgtgatgacagtcctgtgctgttggaagctcttcctggtatgtggccacgtggtcagccactcagtcaacatgcgctcccacgcatctgctctgggctgagcacccgtcaggcccaaggaccgcagaactttgaacaaagtcccaagggccccctggcctcacagtctcctgggggaggtgctccattttaaatcccccgtgcttgcctctaagcttgtttaatcatatgctgtcctgcaatggaaatcagtgaatctttccaatactcaacccttttctcttcaagcaaaataattcgatgtcctcaaacccatataggaagtacattaccaatttttttgaatattctaacctctccagggagcatccgctggatgtgggtgtaaacaaagaaagcatacaggccagatcccactgcactgaggctctgactctgtcactccgaagaggagggggctctgcctttgtctgaagaataaacacttccattcttgtatcactgtttttcttttctgtatcccactcttaatgcagaagattctagaaatgggatcaagctggcattagccaaaatttctgacccctaatgtaccagaagatatcctcgtattaggtgagaactgatccatcaagaagcatttgtggctccctgctctgtgtaagacactgaactcggaggccctctcttcttctgcaaatagaccactgtaactgcagtcagcatttctagaaggtattgagatttggggaaatctctacctccttataaagttattggttccaatatttgtaccaagcaagtcacacacatcttttagatcaaataccttcagcagtatttttagctacagtaaaaacggaaggagctgggaatgatggtgtacccgtggttgagccccagagtataaaaactctctagagaatacgggcagctaaaaccttaatgttcagattctgacatgagccaatcacatttcaaataaacaattttcctcaccaacagctttattttactcagtgtttctgcacagcaaacctgcagctggctctggacagcagtggggagcctggtgcttgtcctgctcagccaggaagggcaggagctgcctggactcctggggccatggccaggactcattccagcccggcgaggttcagcacccaggttagccagatgctcaacaggggcaggtgctagacacccttttggaagaggagggactcttgctggtgtcagctaagaattgagagacagccttcattctgtcacttcagtaacacattcatcacaattctgaatctaggaaatttcacagatatccctgagggccccaatccttgatattctttaaagccaatgatctccctccatcattcctgcccctttctgttgtcaggcttggaaacaatgaggcgtgaacatctgatcatggccctaaaagagctgagagcctgggcaggggctgcggtgggaggggagctggaggaagtggcagctgactctgagtcggagcctgtcaatgtacacaagttagttcctgctgtgagaggctgtgcatagggaatagtgatgataatgaacatgaactatgtttttcaaaaacacttatctggaaaaagaagacaatgatcaactctacttgctacatcccttgaatccctgcatccaaggaacatcagttgcctgattttcttagaacatttaacaaatggcattatatggcagtaaaagcgaccagatctcaaagaaaccctctttttctgtaagaggaaggaggaggaccatcaatggcgataacgaaagatgacacattcccaaatctgttccattattaacgccagtgaggacaatctggcatgtcactgcagctgtttgtagaaaatggaacattttgcctttctaactgctgatttgttctaaacaataactgtattctgttttatacaagcaaggtggcaagtgggaagacaattgctaacgaatggtactaccctggacttttatcaacaaaacctctgtgtgttagcacttagggagctgcaacggtttcttaccagttaaactattcaaagctgcaagaaaaaggttatgttgaatgtaatcaccgttcaaggtttcagtgattctcattttatctgctccttaagggaatctaggatgtatccaggaactgtcaaactaaaaatactgccccgttgccctagaagaacccagaagctgcagttaaccaccatcaaggctgctcccctaagacaggaagcccagggccccatggcccccagtgctgagcgctgcgctctgctgagccacacagacagcaggagaggctgctgaacagaggtgcctgcagatgcgtcgatgctagtctttgcctgggcatactctgctgagctcttccgtctgactttccttgctacagaggtcctgaatagggaaaaacacagcaagtccatagcgccctccccacccctcaattgcggtgtgccctgtcagaaacagatgacattgctgggctctcgtttccgtactgtccagggcccaggagcagggcaggaccacaccccatttctgacacccacaaaagccagacttttttttttttttttttttttttttaaaagacagagtcttgctctgtcacccagactggagggcaatgttgtgatctcagctcagtgcagcttctgcctcccgggttcaagcgatcctcctgcctcagcctcccgagtggctggaatcacaggaatgcaccaccacgtctggctaatttttgtatttttttttgtagagagggggtttcaccatgttggccaggctagtctcagactcctcctgacctcaagtgatccacccgccttggcctcccaaagtgctgggattacaggtgtgcaccactgcgcctagacaaaagccagacttttgtggtcctacaattgcaggtggattttgataaccatcttgaaagttactacaatgtacaggcttcctaggtatctctgtctcaatctagaagtgaacctattatcatttaaagacaccaaggttgtagggcttttacagcatgatccatgtctgaaatgacacatgttatttaagaacagaggtgctgtcagtggtaaaatatgacatgccaggaaaaacattcttgatggcttttatattgctgattaatgaagccaaggaactaggttcaaattatgttctagaaactgtgctgggggacttctaacaccttctaacatttcagtctcattttagaagtcctagagattgagcaataaaatgcacactaatgacaaattctcatcaggacaagtgccccgcgggtgtcgagtaaggaataaagcaggtaagatgaatttcgaagagattctggtccttgaaagctagggctttgaaattcaagtcaatcatgaaaaaatgactgactagcctaagagtcatatacaacagtttctaattgaccttatttgtacccaaatccattttgatttgctctggtctttctagtctcacatttctgagcatcgcattagtcagccctgtccgccggccctccactacaccacccctgcagccaggtgcttgctgcgttgggcctatcatccccctaaatggactggcccacagcatacagtaacactatggactagccaatctggtgcttgagcagaattgaaaatagggtgattcaaattggcagaactctcggtgcctctcctaaagagacggcttctcaggcacacgggaggacaaaaacgccactgagagactatcagccctgctccctgcttttccaggggacaaagtgaccggccatcgcccagaactgtaaggggcacaggcaggacacaaggcaggttccccaggtctgagtcctgggctttttcagcctcactccatgtcccaaattgggatttcacttttagctttcttaagtaaaatatctactcctggcttgacattttagagccttcttatttctatgacttccaaaataacatatttacttgctctaaaggtacg

SEQ ID NO: 435 - DNA, 50552 bp, Homo sapiens
ccggctccgctccgggtcccccagtgctcgctggctccccgcttgagccagcccgcccgcccagcgctaggggccaaggagcgaaccgcacctgcgatccgattgtccggggcacgccgtagaggatgggaggacccatgaggcgctagcctgcgaaggtggcggtgctgctgctccggctgctcttggagttgcatgtacacgacgtggcagactttccaatgggaggattgtggattctgatgacataggaaacttcatcttccagacattgccacagaaagcacacagactttggaaaccagcagacctgaagtcaaatgtcgactttcagcttgctcctgtgtcacctttgtaagttaattcacctctctgagactttagtttgctcatttataaaccacctaactcccagggttcttatgatgttaagtgagatttcatatgaaaagcacctagtggattacaggcattccatgtatggcaactactgtttttgccttctgaatgagctggaattaaaagagtctctacatcattggacatttagggaaatgccaattaaaatcacgatgagctaccagtacagcatcagatggctaatatcaaaaaacagataataagtgttagtgacgatgtagagagaccggagccctcttacattgttgatgggaatgtaaagtaatgcagctgccttggaaaacagtttgacagtctctcaacaagttaggtaaggagttaccgtgtgacctggcagttccactccaggtcttggagtggtcttggagtggcatgtacccattctgcttttcttggtatgtacccaagaaattaagacatttgtccatgcgaagatctgtatgcaaatggatgtagcagccttatacataatagccaaaatgcagtatcaacccagatgcccatgagctggagaatggataaacaaaatgtggtgtcttcatagaatattgctcaacactagaaaggaatgaatttctggtatatgcagcaacatacaatccagacataagagactataagttgtatgattttctttaattgaaccatatagcaaaggcaagactatggataaagatacaaagcagatcagtattgcttgcgggctgggataggagttggaattgactgcagaacaacatgagggaactctgtgaagtgaaggaagggttctgaagttggattggggtgttggaggcacagctgtatacatttcctaaaacacatcaaactataccttgaaaatgggtggttttagagtgtataaagtaaactgagctagaacttggatcacctgatccaagtatcataaattgtgatttatattgataattatgtttaaaagataccatggttttcagaatgcttgtgctcagtgggcatgagtaggagctcctgagtgcccgtgtgtgttgggtattgcagttaatccagtcctttgcactcattgaggactcttacgtgtcccttgtctcttgccacaacagcctctatcaccagaaatgaaggcttcagtagagagatattttaaaaagaaatcacaccatccaaatacaacactgtgaatttaggcttatgctgttacattctttctcctatgaatatgtttatttttacgttgttgaaattaaatatacataatgtgttttaaattaactatatgcaataaacattttccaggatgttaaaaaaataaaaatatattgattcttcctatccaagagcatggaatgttctttcatttgtttgtgtcctcttttattttgttgagcagtggtttgtagttctccttgaagaggtctttcacgtcccttgtaagttggattcctaggtattttattctctttgaagcaattgtgaatgggagttcactcatgatttggctctctgtctgttattggtgtataagaatgcttgtgatttttgcacattgattttgtatcctgagactttgctgaagttgtttatcaacctaaggagattttgggctgagacgatggggttttctagatatacaatcatatcatctgcaaacagggacaatttgacttcctcttttcctaattgaatacccttgatttctttctcctgcctgattgccctggccagaacttccaacactatgctgaataggagtggtgaaagagggcattcctgtcttgtgctgattttcaaagggaatgcttccagtttttgcccattcagtatgatattggctgtgggtttgtcatgaatagctcttactatttttagatacgtcctatcaatacctaatttattgagagtttttagcatgaagggttgttgaattttgtcaaaggccttttctgcatctatgagataatcatgtggtttttgtctttggttctgtttatatgatggattacgtttattgatttgcgtatgttgaaccagccttgcatcccagggatgaagcccacttgatcatggtggataagctttttgatgtgctgctggattcggtttgccagtattttattgaggatttttgcatggatgttcatcagggatattggtctaaaattctctttttttgttgtgtctctgccaggctttggtaccaggatgatgcgagcctcaaaaaatgagtgagggaggattccctctttttctattgattggaatagtttcagaaggaatggtaccagctcctccttgtacctctggtagaattcggctgtgaatctgtctggtcctggactttttttggttggtaagctattaattattgcctcaatttcagagcctgttattggcctattaagacactcaatttcttcctggtttagtcttgggagggtgtatgtgtggaggaatttatccatttcttctagattttctagtttatttgcgtagaggtgtttatagtattctctgatggtagtttctatttctgtgggattggtggtgatatcccctttatcattttttattgcatctatttgattcttctctcttttcttctttattagtcttgctagcggtctatcaattttcttgatcttttcaaaaaaccagctcctggattcattgattttttgaagggtttttttgtgtctctatctccttcagttctgctctgatcttagttatttcttgccttctcctagcttttgaatgtgtttgctattgcttctctaattcttttaattgtgatgttagggtgtcaattttagatctttcctgctttctcttgtgggcatttagtgctataaatttccctctccactgctttaaatgtctcccagagattctgctacattgtgtctttgttctcgttggtgtcgaagaacgtctttatttctgccttcatttcattatgtacccagtagtcattcaggagcaggttgttcagtttccatgtagttgagcggttttgagtgagtttcttaatcctgagttctagtttgattgcactgtggtctgagagacagtttgttgtaatttcagttcttttacatttgctgaggagtgctttacttccaactatgtggtcaattttggaataggtgcagtgtggtgctgaggagaatgtatattctgttgattttggccataatgcccaaggtaaattatagattcaatgccatccccatcaagctaccaatgactttcttcacagaattggaaaaaattactttaaagttcacatggaaccaaaaaaaatcccgcatttcctagtcaatcctaagacaaaagaacaaagctggaggcatcacgctacctgactttaaactatactgcaatgctacagtaaccaaaacagcatggtactggtaccaaaacagagatacagaccaatggaacagaacagagtcctcagaaataataccacacatctacaactatctgatctttggcaaacctgacaaaaacaagaaatgggggaaggattccctatttaataaatggtgcttggaaaactggctagccatatgtagaaagctgaaactggatcccttccttacaccttatacaaaaattaattcaagatggattaaagacttaaatgttagacctaaaaaccataaaaaccctagaagaaaacctaggcgataccattcaggacataggcatgggcaaggacttcatgtctaaaacaccaaaagcaatggcaacaaaagccaaaattggcaaatgggatctaattaaactaaagagcttctgcactgcaaaagaaactacaatcagattgaacaggcaacctacagaatgggagaaaatttttgcaatctactcatctgacaaagggctaatatccagaatctacaaagaactcaaacaaatttacaagagaaaaactaccccatcgaaaagtgggcaaaggatatgaacagacacttctcaaaagaagacatttatgcagccaacagacacatgaaaaaatgctcatcttcactagccgtaagagaaatgcaaatcaaaaccacaatgagatatcatctcacaccagttagaatggggatctttaaaaagtcaggaaataacaggtgctggagaggatgtggagaaatagaaacacttttacactgttggtgggactgtaaactagttcaacaattgtggaggacagtgtggtgattcctcagggatctagaactagaaataccatttgacccagccatcccattattgggtatatacccaaaggtgtgaagagggtattattgccaaaatgtggattttttttttttaactacactctgtattttggctaagagaagcagctttggaacttctcaagtctgtacatctgtgagaccccaaggattacttgttttaattttttttttaagtctaagtttgttatgggtcaacttagttctttcaaggcttatttttaagcttttaaaaagctggtttagggaggctagaactgtgtcccagttctagcctctgggtaaaccgcagagatagtttgttcagaatattaagctgcttctgatgtctctactaaatgacctagatgttcaaacgagtctttctactccgattgattccatttaaatgtctccctgtgttgtgtgtgctctgcgaatcctttacctttttgttctctggtagtgttcttcatctgataggtatccttggtccattcttggggagttttactctactctccagagtgtcaatattcatccaaataatctagggagttgttgtggaaatttgtagagccctttcactccatagtttcttcttttctgactctctttcctgcagattctagtgacctcatcttctttgggaacattgagttttgtttcttctactcagcaagtctgccattttctgcttgaattctccttctccgtgcggctgtttggaaattttctcccagcataaagtcactttgatgatggaattcatctcattgtcactttttatctggaattaggtgcttcctgctttccaatgtctgaaaatgttattttcatctatttggttccatttccttatttgtggctggaactctgttttacttgattattcttgcctgagcttttacctttttaaattgtctctactgtttgttttctatttgatttctacttatatttgaatttgtttcaaaatttatactcatgctgtattttgtttgctttctttgttataatttattataaataataatttattttcagttttactcttttcttttatagctatgtaatgataaatttccctctaagcactatttgagtgtcatctcaccaagttttatttaatatgtttttattatcattcaattcaaaatatttgatgtttcctcttccaattttctccttatccatgagttatttataaatgaagctgatttctgggaggcaacctaggaaccaacagtaatttctatcatcagtttacagagacagtaatgtccactctttcaagttaagtactacataatttgaggaatcatcattttggcctttcaagataaataaatctgttactgtctctcatcttctttgaactccacatgtccatttactttgaagcacacagtaagaatggcatttcaaattcttggagccaaaggctatgacaattattttggcagattttctaagatcatcacgggatctcagacactccaattggttaaatgagttttggaattgcctaaaagatctaaaataggcaagattaaaaagtcttaagaaataatactcattgtctattgagttctgacatgctgtagaattccaaatccattagaccaacagatttccaataatttcttagaaataattgtaagagtcttaaataatgccttgttttagaaaatgatggagagtcttgatgtaatgtctttggcaactcagaacttattttctttgacttaagtatctgaatgcttatgattatccaagttttcagttacaaatcactcattattttttatatttgcatattatttacattcttataaaatgttattgaacatatgcttgtctttttcttattctcttcctttttagaaacatgttccaaatcaagtatcgatattgagaatgggtttatttctgaatctcagtatatatatgacttacataaacaagcaaaatatcaatgcaaactaggatatataacagcagatggtgaaacatcaggatcaattacatgtcagaaaaatggatggtcagctcaacccacatgcgttagtaatttattatgtttgtattgattatccagatgatacacaaaagtttactaactttagtctttttatgggggctgatataatttcatttgaaaacataagaaaaaaactttgaggaacaaagcagacatcaatttttttttccttttcacattaattactcaaatattagtgtgcttttccattcaggcttttcccactctaaagcattctgtgttacagagacgagttagggagctttatgtgtattctggtttaaacttatttctttttagctgagacctttataactgttgtatatacctgttttatgtgattagccttctatatcaaagtctttctcctagatataaaagtaatgtttttaatgaagatatggaggcatagtgcataatatcaaaataatttaaactctataatttgtagatttggcactgtaggatatgtccaattctgaatatcttcccccttagaaattttttgcaaatatataggtagtagagagacaaaatatttctagatggtacccatttctgctctattgaaagatttccctaccatactatctaaatatttatgaagattttctaggaacagttggctcagtttgtgctattttttgcaaagccactcggtaatatatgtatatttatatatatatatatcatatatataaagatatatatattatatatttatatttatatatatatgatatatatgatatatatcatatatatatgatatatatatgatatatatcatatatatgatatatatatatgatatatatcatatatatatatatatatagagagagagagagagagagggagagagagagagagagagagagtcttgctctgtcatcgtccaggatggagcacagtggcatgatcttggctcactgcaacttctgccttccatgttcaagcaattctcctgcctcaacctcctgaatagctgggattacaggcacctgccatcttacacccacctaatttttgtatttttagtagagacagggttttgccatgttagccaggctggtcttgaactcctgacctccagtgatctgcctgcctctcagtaatattagtgaagtaatgtttaatatactcacattaagtgaagttaatatttaggatattcatgcatactgttttcatttcttttttaaatgtctatgcttaatatgaggtctagtttacaaaaatgttactcatcataaaaaaatcttagtaaatttttattaattattcttttaagattttcttattatgaaagagaaaatgtcttgtataacaaaggaattcatctttttaatcctttttttccctttttacatatgtctcaactacaatttagcctggacttttaatgtataaaattctgttatgattttctttaaaatgtaatatacacctgtagtgacctgttttattactagcattgtcataaatgctttagtataaatgaattaagaaaaatgctcttaaaatagattttggggcttatcgggggaaaccagcccctggcaattcaatgtaggttcttttctatttccctaagtgtcagctggtctgagaaataaagggaaagagtacaaaagagagaaattttaaagctgggtgtccaggggagacatcacatgttggcagattccgtgatgccccccaagctgcaaaaccagcaagtttttattagtgattttcaaaggggagggaatgtacgaatagggtgtgggtcacagagatcacatgcttcacaagccaataaaatatcacaaggcaaatgggggcagagcaccaggacaaaattaaaattgctaatgaattttcaggcatgcattgtcattgataacatcttatcaggaggcagggtttgagagcaaacaacccgtctgactaaaatttactgggcgggatttcctcgtcctaataagcctgggagcactacccaaaaccagggcttatttcatcccttatctgcaaccgtataagacagacattcccagagcagccatttcagagatctccccctagtaatgcattctctttctcagggctgttccttgctgagagaaagaattcagtgatatttctcctatttgcttttgtaagaagagaaatgtggctctgttcttcccagctctcaggcagccagacctaatggttatctccattgttccttattgtaccttaaaataatacataccccaaaacacaagtttaaaaagattgagatatcaagaatatgctgaaacttttgtactcagtatgatccattgtgagttatcaaaatcagtatgctactctaaacacatgaaaatacagacagtggaatggggtccagacatactggtttgttttcatacgatccttaaataattaagttgggtattgggaagcaaaggacgatagaatattaaagtaacatggaccctgagagatattcatttatgattcatctgcttgtggaagaacttcaaacaattttccagtctttaattttaaaattagtgttctcgttgtaagaagagtatgtgtgtgataggagatagtattatgaccatttgtggaaaaaaaacaacctaccatgctcaaacagcaggattttcagaagtagaatagtgtgccagatgtttattttcaacgtgatgtcaacacggctcctatcttcattttcttctccattgcagaagataagtctgaaactacagtttctgaagcctgtttctccataacttgcttcttccttagattcccccatgagatgtacttaaagaagacttggaagaagagaaagacaaggcattatctgtcagcagctgctggtagcagctgagatcaccaacagtagctttccttgcttctggaagttttcctgagaaacatccactgcagcaccatggataattagtgagggcatcactaagattcctgaacttcagaattttctggaaatagcatttctgacctttgtccctcaatgcttccaatagttgcagaagcctttcattccctgtattaaaactctctttacttaaaaaataagaaataaaaatgaattaatgttttatgttacttttggagttggtccattactgtcactaaataaagctgtacatgtacataccagggaatcaattccagagatgattgtgaaaccactaacaagaatcattgaagcattttgcaaaactctctgaactttgatatttactaagtgaccttaaagccctagctttgtggtagtgcacttaaattcagaatcacacttggtaactaataatgaaagatttcaaaccccaaacagtgcaactgaaacttttgcattactatactactgagaatatctaacatgttgttactaatcaatgtcattctgaccttgtgggtttcctgtgctaatggacaaggtaagttgaaagagatctaaacactcagcttccctcttaaatgtaacttcgtgtaatatctaacttcatatgtctataatttttttataaatctgataggatatattcactatgctagcagaagtagcatattttgtgagagtataacagaaattaattttatgaaaaaatatctcataatttaaagaaaaaatgaataatattttctttgttttacaaattctacagtgtaaaaagcatctaatattcattatggagatatatgaatatactcataaaactttaagtaggaaacatgtcattagatagattctaaccttaaaatgttcagaattttcttattcataatacaagggaaactttgggagtgattgatactttcataatcttacatacagtgattttttattgattcatatatcaaaacagcaaataaaatattttaaattatgccatttcttatatttctattataccttaagaaagctgctacatctaattaacattaatatgaatttaatatttcaacaagattagcaatatgtaaatcacaacatatatgtaatcaaaaagcagaatatatacttaacttacattggaatgacagtaaattttaatttgcatttctgagttcactagcaaatgttcaataaataaatacataaataattttcatagctttatgtcattgttctctgatatgttttctcctcgatagtcatgtattttctatattaactatctctttgaatgcaggccttgcatattaaagaactatattgtatgtaacattagcagtggaaccacatgggtcaaaaatcatggacaatcaaaggtgtgtcaccattaatgaagaaaacaaattttataattatccaaaactttataatattccaacaaatgtaatggaggataatattggaaatcccactatcaattattgagagtatcttttccctcagcctctcctctcaaagctatgccactttatttgattctaagtaaacagctttaggttttacagtattatctatcacatgattcgctagttttaattgctgtgcaaaatcaaccttgatttgtgccaaaatgaaaaaaaaggaatttctcttgttattccctttgttaactaaactgctacaggcacattttttaaaataaggattacatagattaaagtagaatgcaaagcagaaaaatagagaaaaacagtactattttgaaatgactgaaattagattagaataagctctactttcttagttactttctcaaaagcagtataagaaaagaatgctgacaaattctttcttatttgatattccagttgaaaacttttctcctccaatgaactctttgtaagagtaaacttgagaaaaatgtcttgtaaatttgggtcacacctatatttctcaaaggagaaagtaactcatttagtggaataacatcttgggtagtgagaaacatctttgtgaattcagtagcattggctcaactgcatccctccaaaatttatttgtaaaagtccaaattcccaatacctgagaatgtgactgcatttgaagaaggagagcttaaagatgtaattaagttaaaggtcaatgattcaggtgggacctactccaatataactggtgtcaataagaagagaaaataaggacacaccatatagagaaagaccacgtaaggcatagagagaatacaaccatttacaaggcaaaggaagaggcctcagaagaatgcagccctgttgacagccacatctcaaagtattagcctccagaactgtaagaaaataaatttctatgaaatctgtggtactttcttatggtagcactagaagataaatacaatgattttacacaatttattaaaagaatattaacttaaaataattttttactctttactcatggatacgtatatacccaccatacatattttagagggtatttatcagaatttgataattatatcttggctgtattgtcttcgctgagttttgtctagttgaatactttatgtttatatatacctgtattcatatctattcagaatctggcaaagcaaacctgagaaatatttttcatatgattaatgaaggacatactttgtgagttgcctatgctaagaaactttgtttttaatggtagttgatgtttcagttctgaataataattcttttggaagccacgctatttgaaagataaacttgacagaaaattagtaattgtaacctattataatgttcattgaatttgtattgagcattatttcttccatcaacttgtaagttatttacatttaatttaaaataggttgtcaggaaaattattttaattatgaatatccttttaaaattgtataaatatttcattcatctattagagttgccataacaaagtatcaaaggtgacaattagtattttagagcaggattgcttctaaatctctttcaaactagatcattttcaatacccagtgcattacactctgttgccattgtacttctttgggatgctcaaattagtttcaaatctcactaagaagctggtttctgtgtgtatttcacgtgcccccattaagctttcgcataacaaaaggttccaggctttccttgacttttcctactacacacccagttctaataacttctctatgaaactccagtgccttctagtgggagaaacgatttttagaaatgaacctaaactatgaaaacctcacttcaggttcgaaaatgtcgtttattaagaaaaagaatttttggccagtcatggtggctgtaatcccagcaatttggaggccaagtcggggagatcacttgaggccaggagtttgggaccagcctggccaacatggtgaaacactgtctctactaaaaattcaaaaaattagccaggtgtggtggcaaacacgtgtaatttcagctactcaggagcctgaggcaggagaatcacttgaacccgggaggtggaggttgcagtgagccaagatcactctactgaactccagccttggcgacagagcaagactgtctcaataaataaataagtaaataaaatgatttcctttagtttacgtctctttcttccttggactaaatatcctgcaatcataagaaaatgtaagagtatctcaggatgttacacagagcagggatggttagattttccaatacggaggagacactcagcaaaaaactgtgcatccgtgcttgacggactgggtcagagaagctgtcatgcgtcacccaacaagcctctggagccagttctgtaactagcaaacgcctcccagaaagtaaagatgtcacttctctgaacttagtcttctcatctacacactaaagctgttgtgtcactagcctccttccagttctctctgatttatgatgattcaaacttaatttttctttagttatattcttaagatttcataacaaatagaacgtaaatattaatttctctcatgtttcagaattataaagaacttgatataaagaaacttgtttcaaaattataaagaaacataaattatttgctatttaaattgtggtagtgttcaatgttctctttgtatatacatatacatatataaatatacatatagaatgtatgaatatatatgtatattcgtgtgtggacctatatttttatatcaataatatgtctcacctgatacatgaattctaactatggtaagaatgtatgccatctaatacaaacaaaatgccacaaaactcaacaaaatgttttatttctggagataatttgctacatttcagattttttcttatgttatagtaatatttcttttctctattttccaaaaaacaattattgctaatgtgtgcacctgaactgacagctttagcataacttggtatagttttagataagctgagtttaaattaacgctgataaaatttccagaattgccgaagagaccatactacgtaggagaagtggataaagtggaatgaggttcttcttgtcttgttagctgatttgggagccactaaggattttaagtggagcaataaaatgaccagatgaaggatcactaatttatacacaggaaaatagattataaagatgagaggtcaggatcaggaaattagttatggttgctgtaatcccagaagaaaatggttgagagaagatgatatcaaagattattggcagggtttttttgtgcctgttgtgtttgtttgtttctttgttttgatagaaaaattgagtgaaagggaacaccacaaatgcagaagttcagttaattttgagagaggtaatgagaatgattaacatgaatttcccccaaaaaaagttctgtcaataattaccatattatgaataaatagggcatgggttatttttgcagctgactcagagaaaatagctatcacagcaaacctatgtctatattgaaattcatatatacatttaaagaatattattctataccatttatctcaagagaactaatcttcaaaggaaataaaatcagcaacatatttttaattaaaattttaacttctttcaaaaatgcctttattatttatctgttaagaacagataaatcattcatgaagcattcaagtcaaaaagaatttttatttttttgttggcagatttacctagtggaaacaacatgtgtatttagctttaaaaagaaaattccattaatatcagatgaggaaacattcaactaacaatgcagttaagtggaagaaaatgaagagtttcattaataaccctaatattaatggacaatggtggtactgagaggaacatctatctcttttaggcttcataaggaaatggtgtttttcagtgtcaacaaattaatctccactgcgtggttcacccaccaaatagcatatctgtaataatatattgtacttagtctaccacgttttaaaatgattggtttcaaactatcacagcatagaagacaatatatagatagttgaagagttaaagaaattgtagcgtaagaagcatgcaaaaagatagagttatagcgttataatgactgtcttgagatatttcaaaacacttacgaaggggagcaagttagcttttgatgaggactgtcacagtcagtgaagcaggtaacagtattatccaacatcgaatcagaggtcgagtgactttctaaaagggtgacctttacagatattgccatatgttgctgggatgggggttggtggtagaagagttgatctattctgagccttccacattttaagtggtatgattcaaaattacacatacaaactttgttttaattatactctattttaaaaactgcaattatcttttgagttgattttataatttatttttcttttaatttttgacttaagctcacaagcagttccttggaaaatatatttcactacacaattgagcgatcttcacttataagcactgttaagaaaatatgttagaaagaggttaatgaacacaagaaaatgataacccacattagatttatgtttggctgatggtatgtgtaataccattgtttgtcttcagatgtaaaagatttaccaacacaagaagcagatttgcttgttatttgggaataactgtattcccaaatctcagtagcttaataaaccaaagtttatgtcttgttcacactttgttttcaatgtagcttagaagggaattttgtttattacatgaattctaagactcaggtgacacagacctaatctctctatgtgcttccatgataactcttaacagctgggaagataacacaaaaatttctccaatggtttcttaaaattcctccgaagctgaatattaactctcatttacacctattatatattacaacactctcagttaaattgcacctgcttaacttcgctaatatagaaaaactgctctatccccccttttccgttgttaatgtcacagaatttcatctttacacatcatgtgcccaaaacttaataattcacttaaatgcattggtttcctaaattatgtagaaaatgaaatatggagttttaaaccaaagttacaacaataaaagcttttaggttaataattgtttttctaaacttcactggtctcttaaatcatatagaaaaacaaaaaatggagacaaaaaccattgttaccataatgctagcctttttaaattgcccatgtatttacctttattgaggtcattatttcttcctgcaatgtccagttactgtctagtattatttcactttacccttcaggactctattagacatttcttgaaaggcaagtctagtggtctcaaactccctcagcttttgtttatctgggaatgaattaatttctccttcacttttgaaggacacttttgacagatatgggattcttagttgaaagacgttttttttcttttagcgttttgaacatattggcccaatgcctctggcctataaacttctgatgagaaatctgctaataatctgactaagaaatacttacctgtgagaaattgcttctctcttgctgcatacaagactctctctgtgtctttgctatttaaaaatttgattatgaccaagtatagtggctcattcctgtaacgccagcactttggaagactgaatggggagagttgcttgaggccagaagtttgaggtcagcctggcaagcatggcaaaaccctgtctctaaaaacaacaacaacaacaacaaattattcaggtatggtgaaatgcacctgtagtcccagctactcaagaggctgaagtggaaggatcacttgagcccaggaggtcgaggctacagtaaggtgtgatcacatcattgcattctggcctgggtgccagagcatgaccctgtcaaaaaaaattatattaaagaaaaaagttagcctgatatagtagagcatgcctgtagtccttacaattcaagagactgaggcaggaggattgctttagactaggaatttgagattgcagtgagctatgatcacaccactgcactcctccctgggtgacagagcaagaccctatcactacaaattaaaaaacttaattaaattaaagtttgattataatgtatcttgatatctatctctttgagttaatctcattaagttcattaagtttattgagggtctctattaatgccattatttcttcaaacattctctattcatctttctcttctccttccgaaatccactttgtgtgtgttggtctgcttcctggtgtcccatgttccttagattcttttcactttatactttaatttctttttctgttattcagattcaataattttggtttttctaaaattgttaattctttcatctgcctgctctactatgcctctgaatctcttttttgatttttttccttttaattattgtactttcagaatttctttttgtttccttttcaggctttctatccctttattcatatttccattttgatcatacatcattttctttcttcacatctttctttacttctttcagtatctttaatacagttattttaaagtttctaatagacctaccatcagagctttttcagggaaactttcagtttattttttttcttttaataggccatactttcctatttctttgtatgacataatttttttgttgaaaactgaacattttagtctaataatgggtaacaactggaatcagattctcctccttctacatgtttgttgaggggcttcctgcattgttttcatttattgtttttgtctgaatgttgtaggctatgtctgtgtcacaaattagccggtagtatagactttaggttgtctccagtgttttccaagcctgcactttttgctaagtgttcatagtcattttctaattttccccattcatgcagttgctttggaacatcctagtgtttagtgtctggctgccaaaatattctttttgtggaaaactgaactttttaatctaataatgggtaacaatgggaatcagattctcctccttctacatgtttgttgaggggcttcctgcattgttttcatttattgtttttgtctgaatatagtaggctatgtctgtgtcaagaattagcctgtagcatagactttaggttgtctccagtgttttccaagcctgcactttttgctaagtgttcatagtcattttctaattttccccattcatgcggttgctttggaatatcctagtgtatctccccttggacaaattcacatcagccaaggggaggggcttgcaacaatggagaaagccgaaaaacaatggccgcctatctttctgtctgcatctctgtgatcaaagaacccagcaatcagagcacaaatctcaaatatttgaagaatcgagttgttttcgacactctggctccccgctgctatgtgcaggttgctccataaatacacatacagctgcctgccatgtggctaaggagcgtggtatgaacatatgacactgtgctaggagctaaaattgactgaatgtgagtgcaacttacgatccaagtcatccctagaagttgtagggcttcaatagactccaaaaatagtacaatcagacaaattctggccatgcaactgtaaaggtgaggagtcagattccaggtgtttcctcctccgccatcttcccagatttctttttctatatttcttagattgctttcagtaaatagaataacaagctaatgaatttaatcttttttattattattattatactttaagttctagggtacatgtgcacaacgtgcaggtttgttacatatgtataaatacgctgtgttggtttgctgcactcatcatttacattaggtatcaaacataaacactactagctccctccattgagtcgttctgagaagaaaaggcagggctctgaattccgatggaagggaacagaaagaaaaaaagaaaaggactgaactggtgaaagcacctttgtctttcaatcaagatgaaatgggggagttccctgattcccctcgcaggacgtgcgagaggggtgttatctgctttgtcgccccgcagctcaaacccctaggggcagcttgcagacgggcaggtgcagaggccggcatgagtgcttttgagctctggccccacggcagcgtctagggtaggcgtctgtgagtacagacgcccaagtggacgcgtgttacaaaactcagatttgctgtctgcagacggcttgtgtgttaatccgctcaatggaccctctgccttatctcaagagcctggggccagtgtgacagacttctgtatcctgagctcttgcccagtggtcctaaagaattggatcacatgcgggctcaaaggatgactgcaaggttttattgagtgatggcggtggttctcagcaagttggatagggagcccgaagtgggggatggagtgggaaggtggtcttcccctggagttaggccacccagcggccagatttttctccgacctcccctagcggaactcatttccctcggcatccagacattcctgctcttctctctttctctgctgccttgttccgctgtgattgttcagccgcgtatgtgtgcccgctaaggtgttgggtttatatgggggctggatgaggagcatggagggccaaaaggcaacattttggacaggaaaacagacatgcctgtcctcatttagggtcggggtggggcctttgacagggaatcgccctcttctaaccagtatttgcctgtctcctttccgtatcaaagactctcactaaatcaaccagagctaagatatgtgtactcaaggagaaaagctgaaagacttctgtgtggaatacatggatggttaacactgtaagtccttactcaggccttccttatttgcatttttactgtgtttctagcaagaatgtactttattttaatgggtagtgatttctacatagtccacacagccgttttcttttcagaaaaaaaaaaatgtaatcctccttatattcaaaatgatgtctacacacctgaaaagacaaaacacagaattgaagatttaatcatatgtgagtttatagatggcttttatcctacaacccagggaaacagggcaaatgcactagtagtgggtgggtacctacgtgctccaggatgtagcagtaagttccagtccatatactgacttacatttaaaatctgaaattactttctcttaaacacaaaaaaaggggagacaataaatttcaatattttagtatatggagttttgagaagtctttgctttccaaagtagataattctaagtagaatttaaaacaattattgtaaactaaaattctctttaatgtttgctactcagaattatacagatggatgtgtgtatatgaatagatatttctctattcttccaatgtccaaaataatacactgggtgagactagcaccctctaaagcctagtatattagttatgtatggttgtgaaacatattttgctaaaaacatatttgcttaaaacaataaacctttattttctcacagattttgtgggtcaggcatttgggagtgactttactgtttagttctgtgtcagatgctctcctgtgtcgttgccaaggatgttggcctgggctgcagtgacctgacaacttggctgggctgcaggatctgcttccaacatggctcactcacacagattttggtaggaggtcccagtaccttaccacattgtcccctccacaggttgcttgaatggcaactacatttctccagagctaaagattcaagacagagagagtgaggagtaggaggaagccttcatgtcatttatcacctagtcacacactctcacctgagccatatttattcttcagaaatgagtcactaagtccagcacacaacaagtggaggagaattaggctccactattttgaggaaggagtattgaagaatttgtggaatttccacaatcatcaaatgtagcaaaatgtctctcacgtcaatagggtgttttatttctatgatggttcctttgcctttttcaagattttttctgtctctacaaacatattcttttttttttctatcttgcagtgcattgtaaaggtgaaccatacttaaagtggatagtccatgacagaaaaatgttctttcctcttctttttaaaacaaggtcttcctctgttgcccaggctggagtgcagcagcgcagtatacgtcgctgcaatcttgacctccttggctcaaatgatcttcccactgcaacctcctaagcagttgggaatataggcatgtgccaccatgcccagttacttttttatttttattctgtagacacaaggtcttgctgtgatgcttaggctgatctcaaactgggcctcaagcagtcctcccaccttggcctcccaaggtgttcggattatcgtgcccaaacccagatgaattgtcaaaagcatgagttcttaagaaaggtagctattgtaactgtgaaaccaatttcactgtgcataaaaactataaggtaaataaataattattctatagttggcttatgaaaatgctagatcagcccaaatgcttctggaccaactgaatgccagctatatctggttttctgcaaaagtatttcgcaagtgaccttctgaaatttgtgtggaaaagatggagaaattgactggtttgatgatttatcaagtagtttgcagttttattaaatgttttacctgattatcagatacagcattttattctcaggcttcattactcttttgtgtctgcccatagtttaacggtttaggagaaatgcagtataaattcacaaatgaaatgctacagcagatggtgacagtgaatctgcattagtatagattcataattccagaagaatcctacgtgcaaagctaaatctaaaaaaattaaatttagtagtggtaactgtaagatcctggtcttgggtcaaaggaatcagcagtactagtacaaacagattagcaaccactataaaaattagtgagtattttaatcaacgttaaggtcagtttgagttaacattgtgatagaaccatcataactgcttgtgagtctacaattcacatggtagaagactaagaaatagaatgaggctgctctaagttctgctgacttcagtgccaatcagatcataggtggaattttttttttttttttttgctttagagaactaccatatgagaaagataaaaatggtttaaattttctcagtaaaaaagaaaagtcatgaagtggctcaagcttgtggtattaatgataatgatagctacttttaattatacttcctttttgattttttgaaaagaaatctcagcagactatgttatttacattctatgaaacaccatcatgagatagataactatacttgttctgaaatcagaaaactaaagtttaaatctctgctctaccacttaatggaaattttaattgagttttttaaggctcacttcctgcaaatccaaagactcaagcttgtccaaggtggaattagtgttaaatgatctatgttgaagtatcataatgtatcatgatgaaatttgcaaagttcaaaggtaaagagaaaataatacaaatatccaaacagtggtcggggggaaacaacagaatgtaacatagaaggaatgaaactaaatgaggcattttaagctcaactttggaagttcaaaaaatggggggcaaaatctatcaacaatgagagatatggatataggccaagaaactatacaaagacaagttattgttcccaggtctttgttaaagacatttacaacatgcaaggattcaaagttataatcggcataactaatctgtagaaaccggttgaaaaatttttctaatcaaacaaaaagaaatagattgatgaacgccagatgtgttaaagacaaattattcatctgacacttgttaatatgacaagacagattttatttgactattgcaataggggaaagaagtcttgagctaagcttcaaaaacagcacagctgaggatttataccctaaaatcagagtaattaagatgctatttataagcaatgaaactgaatgaatatttgaacttccacattggaagtttcaaaaatgtggcaaaaaaaaaatggtgaagagaaatatggactgtaggccaagaatctatacctagagaagttactcacgtatcttttaaatgaagatacttaagagatgcaagaattcaacatttataatccacaaaacaagactgtagaaactgcctgaaaatctcgctaatgaaaaaataagaaagaaagacaataaaccagtggactaaagaataatggagataataaacaatattgtgcgtgtgtgtgtggtgcatatgttggaattttttataatgtgtagtataaggtttcttgaacaatgatcatatttcatagaaaaaatgaatattcttctggtattacaagtagtaaattatctccgaatcatcccatggaaatggaaactttttttggaaatatcaagtataagccttataataacatagtgcttaaacatatatgtcaaatattcaatatacacaaattcctcaataaactgtaaatatactgtaaaaaatattgtatataaaacattaaaaacatcttattttctaatcaaaattaaaaattaataaaaatgcttattacactcttagatatttagatattaagaaatattcctagttcattttcctggttaaataaaggatagaaatcttgtcttaataactggtttgagacatgaattagcaatattattttgttgtgtgatgtgatcaatgagaaattcctgtttctctgtagtttttacattccttccagtcaattttttaaaatcctcaaaaaactactatctcccactctagagttggtctgagaagaacaggcagggctctgatttctgatgggatggaacagaaagaaaaagaagacagatgagctgaatggtaaaataagcgccttcatctctcaaccaggaagctcactaatcaaccagggctacgatatatgtactcatggagggtacattaaataggtctgcacagttttcttcaatcttcattagcaaacagctcttcacatatctaggtcattggatttctgtaacttttcttgccctaaaacccctaattcattacactaagaagagaatataatttattgatcaaaaatgtcatatatgattatctgttatagaaaaacattatttatactgttttttgttttttattacaagaagtgaaaccttgtgattttccagaaattcaacatggaggtctatattataagagtttgcgtagactatactttccagcagctgcaggacaatcttattcctattactgtgatcaaaattttgtgactccttcaggaagttactgggattacattcattgcacacaagatggttggtcaccaacggtcccatgcctcagtaagtaaacctctttacaagaatatgtgcataaaacttgaaaagagtgagagaacagcaaataaatgattatattgtcttatataacagaaataggaccaaaggaagagttgttcaagcaaaaagaccaaaatggatcttttttgttatgagatcttcgtgaaaattacatgagaaataaatgtggcaactttatgagaataccgatataatttaaacatattttatcataaaaactaaggttaagtaacattgaatactgacttttttgtaaaaacatttagtagtagctttagtttttcttgagtcatacatcattttcagtattgatgcagtcttatttaaatgttccaaaaattattttaatatactattttgatcaaattcatgtctctaatttacctttaaatcattttatggtccttaggacaatgtattttcaattatttggagaatggatataataaaaaatatggaagaacgtatttacagctggtctcctcctcccagatgcattcgtgtcagttagtgcactcatttgagatcccagtatgtccgtaactgtctaagatctagatatttaactggaaaattttgtacatcaactctgaagccgaatttatgtctttttattttaaaacagaagcctatctagtttccagttccaaatgtgtctgaatacatttaaaatttctggataattagtggattctgtcacttaatagggccaagcagcaatagaaatataagtcaggggccaggcgcagtggctcagtcctgtaatcccaggactgtgggagaccgagacgggcagatcactttaggtgaggagttcaagaccagcctggtcaacatggtgaaaccctgtctctactaaaaatacaaaaattagccgtgtgcagtggcacatgcctgtaatcccagctacccaggaggctgaggctggagaatggcttgaaccagggaggcggaggttgcagtgagctgagattagaccactgcactccagactcggtgatagagcaagactctgtctcaagaaaagaaaaaaacacatatatatatatatgtatatatatacacacacacacatatgtcatgaagatcacaaaatacactaaatacacattaaagtaacactgcttcagtatttatatcaaagtgaatgcattgatttaagtagattataaaattatagcattaattaacaatgcttgcccaaaggtcacttgtacatctctcacaattatatgacatctattcttatagctaatgctcatgctctgtcgctttaaatgaagacacattcagttatagctgactttcactttttaggtaaaggggtctctgaaagttgtttgtgtgtattgtttgcaatttacaaaacattccattatagaaactatatgataattaggatacaatagagataaaggacaatggtaatcttcttacacattcatagaagcactgccctcaacaacagcctaagcctctggaagggaagtcccttttgctcctgccataggcaccaactctgtcattaatccacttaacaaatattgttgtgtgtcaagtgcctttataggtatcgaaaataaaattgtttacgagagaaactgaatactgtagtttagagactggaggagattaatcgaaaagttgacaagaatagatcagaaaactcatgattatgacaaatgctttattataaacatgtatcatctttaacatgatttattttcctttcagatagtaaaattggtccatttacatttttttctaattactaaccaaaaaagaacatacacattattaataagttagaacatacgcattactaaaataattactaccttatacatatacccattagtaatgtatagaacacatacattgataatatataaagaacatatacattactaatatattagaacttatttttgctatcttgtttgttttttcctgcttacatttccacatttctctcaaacaccatggctatatgggtttaagcatccacttaagatgacaactattttaaattcctggagacaaaagatttacaaatttatttccttgcctgtggtagcagtgtgtactgtatctttgcctgggaaatggcatttgactaaatgaagtctaagacctcttaatagcaccagaaaggttcaggttattgcaaagtagccagaaactcttccaaataattatagggaattgagagtctgctagatctgcattcctcaaggcctgccagagctctgttgacagtctcaaagattctttgcttttattctgcccttccctgtgttttcactattttctttcaaaattcacagatgtctaggaaacttccagttttgctgttttcaattcattaacagatgtttcattgtttcaccatactgccatgtttttacttgttcccttctataaaagaagtattcaacaaatatttacttttttctctactttttctattttaggaacatgctcaaaatcagatgtagaaattgaaaatggattcatttctgaatcttcctctatttatattttaaatgaagaaacacaatataattgtaaaccaggatatgcaacagcagagggaaattcttcaggatcaattacatgtttgcaaaatggatggtcaacacaaccaatttgcattagtaagttatttacatattcccactcagtttctgtcaacttctttcctctctttgaggtgatagtgttttacagaaaaagatagaaaacacttttaggagtaaagagatataaatacttctaacatcatctaacattctgtgccaaactaagtcttttttgcctttttagagtaatggctacttgggaagatgatcattccatctctctcaattcaatttgcctttacgtaaaagcaatcccatcaggtacagactagttagggagctgcatgggaatatcagcacaatgtattacttgtcaataaaaactttgttcttttccctttctttgtatttcaaaattatcaactgcttgtattgtattccttgctcacactcttaagatgtacatgttagggaagggatgagtgcttaattctgagtttctgctagcatcaggaaaatgagacttcaataatttgtatcaatgatgcaactgaggagaaccaactcaaaaaattatttccagcttattgtctagtacagagaaaacaagtaaagaaaaagagtaagtgggtgggctgaatgtttacaaacctcatacttggcaatggattccttacaactaaagttctctaaaacattcccaacttgtaattatttattaataaagagattgcataatgaacaatggaaaccttgcagtggcaaaagtttatcttttttgtctttcctctttaggcattcaccaagatttgtaaagataaatcatttaatgtatttttaacacacatattgatatataatttacatactgcaaaatccacttcattttcaagggtacaattcaactatttttagccatgagacgaaatggaaaggactactgatatgtaattgaacatggatgaatctcaaaaatattaatctaagtgagaaaaaagaaaatgctacacttagaaagtgattatctcaaagttactctgaggtttgggagctataaaatatcaattcgtacatttctagaatactgttttcaatttctatgcttatcacgggctctgcaaaagacaaagctgtacacttcaatctgatttgaccagctttgataaatgatctaagatttgtaaaataaaagatgctttaaaatttttatagaacgtatatccaatgaatataattttaatccaacttataaaccctgtcagtaaactgagtacataaatatgtacattaacttttaaattcacaaaattttatcttctttaaaataatacattatagtgataaaggtagactgtaataacagtcaatgaggtgttcacaaataaaaatagatctgactaaatagtcttaatatgtttttcatagggtttgaataatgagaaggatcattatagggaaatgtatttttctcttgtaattaactgttatagcacaaaaaaaacactgattgtcggactatttttaatagtactcaatttattagcacacactgattggtaaattttattcctacaatgggactttcttagtcgagttgtacatcatatggcatagaaaagcaatcctcaattttattttgtttcagaattttgtgatatgcctgtttttgagaattccagagccaagagtaatggcatgtggtttaagctccatgacacattggactatgaatgctatgatggatatgaaagcagttatggaaacaccacagattccatagtgtgtggtgaagatggctggtcccatttgccaacatgctatagtaagtattttattcaagtatttctttttactagaattaaacaaatagaaacatacatatgtatatgtacacatatgtgtatgaatacatatgtgtacatatacatgtagtcctcatttgagtgtgaattaccttgaaacttaaaaaaaaaggttgaaaatacaaatgtcttcctaagaaatcaaataagatacatttaagagtatataaaaagctttattcagaaagtttccaataaaactgttgatttttccccaatgtaaagtattttttttcagattcttcagaaaactgtgggcctcctccacctattagcaatggagataccacgtccttcccgcaaaaagtgtatctgccatggtcaagagtcgagtaccagtgccagtcctactatgaacttcagggttctaaatatgtaacatgtagtaatggagactggtcagaaccaccaagatgcatatgtaagttcttaatattctggatctgagaaaattagagtaataactttgatccttgtttatttatactaaaatttttatgggttattaccctagaactgtgttcacaaacagctattctgctgaatatttgcctttcagatcttaatatataagtgtataagcttggaaaattttatgtaaacaatgacaaagtttccttttaaaaacaggaatgttcagagacctcaatttgttaatggacacaatgagtcttcaagaatgatatccatttattgcacacatatgaaatacagcatctcaccttaacatcaataaccattttcacattattaatacttaggtaaacagttttcaaagagttttgaaaacactgttttaaaaaccatggatgtggaaccaacccaaatgtccagacccaaatgacagactagataaagaaaatgtggcacatgtacaccatggaatactatgcagccataaaaatggatacgttcatgtccatgtcaaaagtgacatggaggaagctggaaaccatccttctcagcaaactatcacaagaacagaaaacctagcaccacatgttctcactcagatgtgggaactgaacaaggagaacaggtggactcagggaggggaacatcacacaccagggtctgtcacaggatggggagctaggggagggatagcattaagagaaacacctaatgtaggtgatgggttgatgggtgcagcaaaccaccatggcacatgtattcctatgtaaaaaaactgcatgtcctgcacatgtaccccgaacttaaagtataataaaaaccatgcactattaactaaaatcctacttgaaaacctgaaatgcttcctgatagagcacatagctagttaacactgagaagttctttctctgattattgtttttttcttacactttaccagtatttctagcaagaaagaaagaaattaacagaaagctcagccatttccaaatgccaatgctttctgttttcaccttcatctcctctcccctcgtcccagaatgaaaatgaatacactaaaaagccctcaagtctgtaatacaggtatactcttagaattttgtcccacaaatcctatgaacttgaagaaacacaattcaaaaaatatgagccaaaataattatggcagcaaaaagaaaacctaaaagaaaatttgccacaaatttctactagcctatgaggtagagaactgagatacccatcaggccttgcatatcagataacttattcctgtcacagctcttaaactgtaaactcacgagttttccaaatgctcaagttcctaagtacaggatgatacaagcagttcttttctgtgatatgactcatttcttttattttgatgctatgctaccttttaccttttatattgactgatgatgctgatattttggctgatcctatgatgggctaaaccttaattattgtccctatttatgtatccacttctgtagatgatcatgtgtaagtccgggctccaaaccatgcaagtggcaagactgcagaggaaaattcgtatcctcaaatcaaaatagtttacaagtatctttgaacatgatttcataggaaaaatttagtattaggtttcagagataaattctgagtcttaaatttgattgactgaggagatggacactcctaagatggatttcacagcaaaatcattacctcttctcataatcaagaacaggaaaggattataattatctgaggacataagatcagttccatgatacaagcaagactttcagtcttaaaatctaaagaagcaaagagcattcaagcagggaattctagggaaaaaggcaaccttatgaaaaatattacatatacatatggcatattaaagtaataaggaaaacattccagaacagcagaaaactttagaaacttttgaaaaatatgtttggagaagtatgtagtgctcaaataatatttatttttgaattgtaaacagcccctgaatgtattgaagagatcttaaaaatttttggatttcaaaagtgatatgtactatgttaagaaatttatttaagtgcttgaaagatggattaaaatatgatttggggaaatttctaaagaaatactaatgttaataagggctagacttgagtgcagaatacttgcatcaaaaggagagaagaggagtgaatgatatcatcaaaaatgaaaagtttaccatggaagaactgggcttaatacctagcgtatgggttgataggtggagctaaccaccatggcacacatttacctatgtaacaaaccttcacatcctacacatgtatccagggaacttaaaaaataattataaaatttaaaaaaaaatctaaaagaaaaccagccaggcgcggtggctcacacctgtaatcccaggactttgggaagccaaagcaggtcgatcacctgaggtcaggagttcgagaccagcctgaccaatatggtaaaactctgtgtctactaaaattacaaaaattagatgggcgtggtggtgtgtgcccatagtgccggccactcaggagactgaggcaggagaatcacttgaacctgggagacggaggtcacagtgagcagtgatcgcaccactgcactccagcctgggagacagagcgaaatttcatctaaaaaaaaaaaaaaagtaaagaaaaaaaaaaacattatttggaaggtaacataatcaaaacagtcatctcttatatcattgtctgttacagtgaaacattatttatactatttttgttttttgttacaagcaatgaaaccttgtgagtttccagaaattcaacatggacatctatattatgagaatacgcgtagaccatactttccagtagctacaggacaatcttactcctattactgtgaccaaaattttgtgactccttcaggaagttactgggattacattcactgcacacaagatgggtggttgccaacagtcccatgcctcagtaagcaaacctctttacaacaatatgtgcataaaacttgcaaagaatggagagagaagagcaaacaaatgattacattgtcttatatgacagagatggtaccaaaggaagagttgttcatgcaaaaacaccaaactagatcttttctgttatgagaccttcatgaaaatcacatgagaaataaatataggaaccttatgagaatacctatataatttaaacatattttatcataaaaactaaagataagtaacattgaatactgacctttttgtacaaacatttagtagtagctttagttttccttcagtgatacgtcatttttgtgtactgatgcagtcttatttaaatattcaaaaaattattttaatatactattttgatcaaattcatgttcctaatctaccttttaatcattttatggtctttaggacaatgtattctcagttatttggagaatggatataacacaaaatatgaaggaatatctttacagagtcaatctgtaaaagttgaggatatcctggctacagtctttcaaatgtgcagaccacagttccatgtacagaggatgaatggtctcctcctcccagatgcattcgtgtcagttagtccacttgtttgagaccccagtatgtccttaactgtctaagatctacacctttaactggaaaattttgtatatcaactctcaagctgaatatatgtcttttttatttttaaatagaagcctagctagctttcagttccaaatgtgtctgaatacatttataatttctggataatgagtggattctgtcacttagtagtcaagtaacaatagaaatataaatcatgaatagcacaaaataaatagactacggattaaagtaacattgcttcagtatttatattgaaatcatgctaaatgcattgatttaagtagattataaaattatagcattaatttaaaaataaatataatgcttgcccaaaggtcactgctacatctctcacaactatgtcatatctatttttatagttaatgctctgttgctttaaattaaggctgatcttcagttatagctgactttcactttttaggtaaaggggtctctgaaagttgtttgtgtgtattgcttgcaatttaccaaacattccattatagaaaccatatgaatattatgatataattgagatgaaagacaatgggaatcttcttacccctttgtaagagcaactgtcctcaacaataggcctaagccactgaaagaaaagtccctttttctcctgccataggcaccaactctatcattaatccacctaataaatattgttgtgtgtcaagcactttataggtattgaaaataaaactgtttacaatagaaactgaacactgtagtttagaggctggaggagattaataggaaagtaggcaagaatagatcagaaaactcatgattatgacaaatgctatattataaatatgcatcatctttaacatgatttttctttcagatagtaaaattagtccatttacatttgttttctaattactaattagaaaagaacatatacattactaatatcttaaaacatatacattactaaaataattactaccttatacatatacccattagtaatgtatagaacacatacattactaatatataaagaacaaatacattgctaatatattagaacttatttttgctatcttatttgctttcttttttctgcttacatttccacatgcctctcaaacaccacgtctatatgggtttaagcacccacttaagatgacgaccactttaaattcttggagacaacggatttacaaaattactttcttgcctatggtagcagtgtgtaccgtatctttgcctgggaaatggcatttgacttaaggaggtttaagaccccttaatagtaccaaaaatactcaggttgttgcaaagtagccagaaagtcttccaaaatatcattagggacttgagagtctgctagatgtgcattccttaaggcccgccagagctctgttgacagtctcaaggattctttgcttttattctgcccttccctgtgtcttcaacatttccttcagaaattcgtggtttcctttaagaacacggatgtctaggaaacttccagttttgctgttttcaattcattaacaaatgtttcattgttttgccatattgccatgtttttacttgttccctcctataaaagaagtattcaacaaatatttacttttttctctactttttctattttaggaacatgctcaaaatcagatatagaaattgaaaatggattcatttctgaatcttcctctatttatattttaaataaagaaatacaatataaatgtaaaccaggatatgcaacagcagatggaaattcttcaggttcaattacatgtttgcaaaatggatggtcagcacaaccaatttgcattagtaagtgatttacatattcccattcagtttctgtcaacttcgttcctctctttgagatgatagtgttttacttaaaaatatagaaaacacttttaggagtaaagagatacaaatacttctaaaaccattcaacattctgtgccaaattaagtcttttgcatgtttagagtaatggctacttgggaagatgatcatttcatctcttacaactcaatctgcctttacataaaagcaatcttatcatgtacagactagttagggagctgcatgagaataacagcaaaatgtgttagttgccattaaaaacttcgttgttttccctttctttgtatttcaaaattatcaactgcttgtattgcattccttgctcacactcagaaaagttgtacatgtcgggggagaaatgagtgcttaattctgaatttctgctagcatcaggagaatcagaccgtaataatttgtatcaatgatgctactgaggatatccaatcaaaaaattatctctaccctattgtttactacagagaaaacaagtaaaggaaaagggtaggtgggtgggctgaatgtttacaaacctcctacctgccaatggattctttacatgtaaagttctctgaacatgctcgacctttacttattatgataaagagattgcataatgaacaaaggaaatctttcagtggcaaaagttgattttttttctttcctctttatatattcacaaagatttttaaagataaattgcctaatgtatttttaacccagatactgttgtataatttacatactcccaaatccacttcattatcaagggtacaattcaactatttttagccatgagataatatggaaccttgatacataatacaacatggatgactctcaaaaatactaggctaagtgagaaaaaagaaagacacatttacaaagtgattatctcaatgttaccatgagttttgggggctatatcaattcctacatttctagaatactgttttcaatttctatgcttatcatgggctctgtgtaaagaaaaaggtgtatacttcaattttactcagctttgataaatgatctactttaaaacttgtaaaataaaagacaggatgcttcataaatttttatagaacttatatccaattaatataatttttatctaatatatacacccttactgttagtaaatcgttacataactacataaatggtttcgttaacttttaaattcacaaaattttatcatctttaaaataatagattgtagtatcatagtagtagactttaataacagccaatgagatttttcacaaataaaaataggtctgaccaaatgtttctaatatattttcacaggatttgaatgataagaaagaatatacagagagaaatatatttaactattgtaattaactattatagcacaaaaagcactgattgtcagactatttttaatagtactcaatttattagcacacactgattggtaaattttatccctacaatgggactttcttagttgagttgtgcatcgtatggcatagaaaagcaatcctcaattttattttgtttcagaattttgtgatatgcctgtttttgagaattccagagccaagagtaatggcatgcggtttaagctccatgacacattggactacgaatgctacgatggatatgaaatcagttatggaaacaccacaggttccatagtgtgtggtgaagatgggtggtcccatttcccaacatgttatagtaagtattttattcaagtattttttattagaattaaataaaataatagacacctacatatgtatatgtacacatatgtgtgtacatatatgtacatatatatgtagtcctcctatgagtgtgaattatcttgagacttaaaaaaaaaaaaaacaacgttgaaaatgcagatgtcttcctaagaaatcaaataagatacagttaagagtatataaaaagctttatttagaaagtttccaataagactattgatttttccccacatataaagtattttttttcagattcttcagaaaagtgtgggcctcctccacctattagcaatggtgataccacctcctttctactaaaagtgtatgtgccacagtcaagagtcgagtaccaatgccagtcctactatgaacttcagggttctaattatgtaacatgtagtaatggagagtggtcggaaccaccaagatgcatacgtaagttcttaaaattctagatcctgagaaaatcagagtaataagtttgatatttgcttttttatactagaatttttatgggttattaccctagaactgtgttcacaaacagctattctgctgaatgtttgcctttcagatcttaatatataagtgtataagcttggaaaattccatgtaaacaatgaccaagtttcttttttaaaacaggaatgtcggcctggggtggtggctcacgcctgtagtcccagcactttggaaggccgaggcaggcagatcacgaggtcaggagttcgagatcagcctgaccaacatggtgaaccctgtctctacaaaaaatacaaaaattagccaggcatgctggcatatgcctgtaatcctagctactcaggagggtgaggcaggagaatcatctgaacccgggaggcagaggttgcagtgagcggagattgcaccattgccctccagcctgggcgacagagggagactccgtctccaaaaataaaaaaataaaaaataaaaaataaataaataaaacagaagaagaagaaaagaaaaagagaaaaagaaaaaaccaagaatgttcagagtcttcaatttgttaatggatacaatgagtcttcaagaatgacatccatttattgcgcacatatgaaatatggcatctcagcttaacaccagtaatcattttcacattattaacactgaggtagagttttcaaacagttatgaaaacactgtttcaaaaaaccacgaactattaaatcctccttgaaaacatgaaatttttccggatagaatacatagctggttaacactgagaagttctttctctgattattattcttacttatattttatcagtattcctagcaagcaacaaagaaattaacgaaacttcagccatttccacaacccattgcttttccatttttaccttattctcctcttcccttataccataatcaaaatgaatacactaaaaacccctcaagccagtaatataggtatacttctagaattttgtcccccaagtactatgaacttgaagcaacacaattcaaaaaaatataagccacaataattatggcaacaacaagaaaacctaaaagaaaacttgccacaagtttctactagcctatgaggtagagccctgggatacccatcagtccttgcatgtcagataacctattcctatcacagctcttaaactataagttcatgagtttttcaagtgctcaagttcctaagtaaaggatgatacaagccgttcttttctgtgatgtgactcatttcctttattttgatgctatgctaccttttacctttcatattgactgatgacgctgatattttggctgatcttacaatgggctaaaccttaattattgtcccctacttaggtatccacttctgtagatgatcatgtccaagtttgagctccaaactatgcaagtggcaagactgaagaagaaattagtatcctcaaatcaaaatagtttacaagtatcttcaaacttgatttcatagaaaagtgttaggtttcagagataaattctgagtctcaaatttgattgaatggggagatggacactcctaagatgggtttcacagcaaaagcattacctcttctcacaatcaagaacaggaaaggattataattatctgaagatacaagatcagttccatgatacaagcaagactttcagtcttcaaaactaaagaagcaaagagcattcaagcacagaattctagggaaaaaggcaaccttatggaaaagattacatatacatatggcatattaaagcaatgaggaaaactttcccaggcagcaggaaactttagaaagttttggaaaatatgtttggagaagtatttagagttcaaataatatttatttttgaattgtaaacagcctctgaatgtattgaagagctcttaaaattttttggatctcaaaagtgatatgtactatgttaagaaatttatttaagtaagtacttgaaagatgtattaaaatatgattggggaaatttctaaagaaatgctaatgctaataagggctaaactagaatgcagaatacttgagtcaaaagaagagataggtgagtgaatgatatcatcaaaaatgaaaagcttgctatgtaagaactgacatttttatcatgtaagaattaggcttaatacctagggtatgggttgataggtacagcaaaccaccatggcacacatttacctatggaacaaacctgcacatcctgcacatgtaccctggaacttaaaaaaaaattataaatttttttacaaaagaattttataaaagaaaacccatatgtggaagtaacattatcttactgattttacagatgaaggcatagtgagatagagtaatttgtccataatcatgtagggattcacattaactcctgtgtgcttatccttgcctctttaaaatagaaaatgaagatgacagggatagatgatggtgatagagagagagataattgacagatattgaggtgtatgtatgtatgtatgtatgtatgtatatatagagagttttattttaatagatgactattagaaagattatacctttctacagttctttttctacactgtgggcataagagaaaaatataaacatagaattaaattagcaaaatgtgagtacatttggagtgcttgtagtcacggcttgtcaaatgggggaaaggaggataagtaaccatgactccagtggaacatgttagcataatcctttttgatatgaagtcactagggtggacacaacatgttttagggaagaagagttcaggctctagagaaagactgccagggttcacgtttatcacctcacctgatgatctctgctgtgacgttggggaagtgcaactgaacttattatatttttgaaatgctaaagtcagtatgtagcacaaattaataactattaactatttggattattttataattttattttatcctaaactactcattaggatgcattttatttgctcatgaaaggcaagattatgattgttaattgtttctttttctgctttcagatccatgtataataactgaagaaaacatgaataaaaataacatacagttaaaaggaaaaagtgacataaaatattatgcaaaaacaggggataccattgaatttatgtgtaaattgggatataatgcgaatacatcagttctatcatttcaagcagtgtgtagggaaggcatagtggaataccccagatgcgaataaggcagcattgttaccctaaatgtatgtccaacttccacttctcactcttatggtctcaaagcttgcaaagatagcttctgatattgttgtaatttctactttatttcaaagaaaattaatataatagtttcaatttgcaacttaatatgttctcaaaaatatgttaaaacaaactaaattattgcttatgcttgtactaaaataataaaaactacccttatattggacttcctatcaatgaattagtaagtatagaaacagataactgaatggctttctgcatattgtacagtatacctagacatagaaacaaaatgactttagactttatttggggaagtaataataacataaaattagatgttaaaattgtaagtgaaaataaacacactatagtattcccttattgcagccatggtcctctagatgcagttaaccaaatagggtcatttttattaaaagtagtgtttcctgccaaacactgacattacatcattatcatgatttaaaggaaaaagtactaaagaaggtgaattatcatcattttcctgtgaaaaaagaaaagaggttttgctaaccctttcagagcactgggaacacagccagaagtgcattaaatgtatatattaacttgggcaatgctgacactttaggatgctgaagccaggtgcagtggcacacgcctgtaatcccagcactttgagaggccaagctgggaatcatctgaggtcaaaagttcgagaccagcctggccaacatggtgaaaccctgtctctactaaaaatagaaaaactagctgggcatcatggcgtgcacccatagtcccaagctactcaggaggctgaggtgggagaatcactttaaccagtggggcagaggttgaactgagccgagatagtgccactgcactccagcctgggcaatagagtgagactctgtcttaaaaataaataaataggattctgaaaattcctatttaaggaaataattctttttctgatttatttaaggctacatttgtattttcttaatacaaatattttgaaagtttcttcacatatggtttttgcatttcttattaagttttgcttccgatttttttttgtcttttctcctgttaattgccttcactctctttctgttctgtacttttttttgtatataagaattttttgaaaagattgtatatccctgttaacaaattgaaatctctattcactttaatagatttttagccccagttagcatatggttagtgagaaattgcagggtaagaagaaaacaatgctccctttcccaacacttttcctgattatagagaaaaaagcatgaacttgtataataatctagtcctgtacagaataagaaatattaattgctagactgagaatgtttttgtgactaaagctaggaataactttttaagactgaagaatgatataagctatcaaatctaactcagttttcaaataacaggtttgcagagactggagaataaaaagtaaaaaattgttttattaattccagtgactaattctacttcatcaacatatatcataaataaaatttcaaaaataattgctgatatggtttggctgtgtccccacccaattctcaccttgaattatataatccccatgcatcaaaggtggggccaggtggagataatggaatcatgcaagcagtttcccccataccctactcatggtagtaaatacgtctcatgagatctaatggttttataaatgagagttcccctggacaagttctcttgcctgccaccatgtaagatgtacctttgctactcattcaccttctgtcatgatggtgaggccttcccagcaacgtggaactgtgagtccattaaacctctttcctttataaattacctagtctcaagtatgtttttattagcagtgtgagaatcaactaatacagtaaattggtattacacagtagagtggggtgctgctgtaaagataaccaaaaatgtagcagtgactttggaactgggaaacagacagaggttggaacagtttggaggactcagaagaaggcaggaagatgtgaggaagtttggaacttcttagagacttgttaaatggctttgaccaaaatgctgatagtgatttggaaaatacaatctaggctgaggtggtctcagctagagatgagaaacttgttgggaacaggagcaaaggtgattgttgctatgttatagctcaaagactggtggcattttgccactgccctagagatgtggaactttgaacttgaaagagatgattcaaggcatctggtggaaaaaatttctaagcagcaaagcgttcaagagatgacttgggtgctgttaaaagcattcaattttatatattcacaaatatatggtttggaattggaaattatgttaaaagggaagcagagcataaaagttcagaaaatttgcagcctgatgatttgatagaaaagaaaaacccattttctggggagcaatttaagctggctgcagaaatttgcacaagtaatgagaaaccaaatgttaatcaccaagacaatggggaaaatgtctccagggcatgtcagaggtctccagggcatgtcagaggtcttcaggacaacccctcccatcacaggcccagaggcctaggagaaaaaaatggttttgtgagcagggcccaggaccatgctgctttttgcagtttcaggagttggtgccctgcatcccagcaggggctaaaaggggccaacatagagctcagaccattgctttggatggtgcaagccccaagccttggtagcttccatgtgatgttgagattttggttcacagaagtcaagaattaaggtttgggaacctctgcttagatttcaaaggatgtatggaaatgcctggatgtccagcaaatgtttgctgcaggggtggggccctcatggagaacctctgctatggcagtgcagaaggaaaatgtggggtgggagcccccacacagagtccccactggggcactgcttagtggagctgtgagaagaggcccactgtactccagaccccagaatggtagttccaccgacagttagcatcgtgcacctggaaaagatgcagacactcaatgccatcccatggaagcagtcaggagggaagctgtaccctgcaaagccacaggggtggagttgcctaagaccatgggaacccacctgttgcatcagcgtgacctggatgtgagacatggagtcaaatgagatcatttttgagctttaagatttgactgccctgctggattttgtacttgcatgagacctgtagcccctttgttttggccaatttctcccatttggaacaggtttacttacccattgtctgcaccattgtctgtaccattgtatctaggaaataactaatttgcttttgattttacaaagggacttgccttgtctcagatgagacttgggactgtggacttttgagttaatgctgtaatgagttaagactttgagaggcttttgggaaggtattattggttctgaaatgtgaggacatgagatttgggagggaccagggtggaatgatatagtttgactctgtgtctctgctcaaatcttactacatgttaagggcagggccatgtggagataattgaatcatggggactatttccccatattgttctcatggtagtgagtaagtctcacaagatctgatggttttataaatgggagttcccctgaacaagccctcttgcatgtcaccatgtaagatgtgactttgctcctcatttaccttccaccatgattgtgaggcctccccagcagtgtggaactgtgagtcaattaaacctcttgttttaataaattacctagtctcaggtatgtctttattagcagcatgagaacagactaatatgattgccttagtttcctaaaatggtacaaaaataaatggcaggaaaccacaactgtaggagcaacaagcaatatcatcaggaagatgaaaataaaatgtgatataaaagcatcagtggggttattaaagagtagagtatgcacctaacaaagtgaattggtgtgatagataagaaatttggtgtagtggattttcaaagggaaaccataaagaaatgaatgattatagagattattaatctggagaataaacaataaaaatctaagtctagggaagaaaccagaacaattgcaataagtacaatcatcaaaatattcttacattcctttctaaacaattattcctagtgtatagcttaatgtggttccaggcaaagtgagagataaaatctctagaataaatcactagataaaatcactagaaacataatctagccaattgtttcttaattataagactaatgaacaaatattacaaatctttaggcaggaaaataaaaatgactgaaaatgaaatcttagggaaaacagaatggttgttatattaaaatgtaaatatactggtgtgatatttatcaagcaaaatacctatttatgggccagacatagtggatcatcctgtaatcccagcactttgggatgctgaggtgaaagggttgcttgaggtcaggagtttgtgatcagcctgggaatcatagcaagatcctgtttataaaaacaaagaaaacgaattagctgggcatggtggtgcacgcctgtagtcccagctactagaggaggatgaggtgggacaattgtgacactgcactccaacccagccacagagccagtccctgtctcaaaacgaaaataaaacaacccccctatttattagttcattaatttgtgcctagaaataaactgttttaacacacccattaagaatcattatatgccaagccttttatctagatagaaagcacattttgaatttgaaaatactattgcttgatatgaagttaattataacttctttgaagatacaatgcaaacacaaaattcagaatacaaaagtatgtagacagtatgttgttaacaataagggaagaaaatatagcggggagattggcaggaaaaacaagacattttgattttatcactttgaggtttcttctactttacagttattttatttatttatttatttttcattttgtgggtacacagtaggtatatatatttatggggtgtatgagatattttgatacaggcatgcaacgtgagataagcacatcgtggagaatagggtatccatcccctcaagcatttatcctttgagttacaaacaacccaattacactatttaagttatattgaaggtatactattaaattattgttgactatagtcgccttattgtgctatcaattagtaggtcttattcattcttctaattatttatttgtacctattgaaaataggtacccacctcctccctgacacccccaaccactgcctcccaccactagccccttgcgtctggtaaccattcatctactgtctatgtccatgagttcaattgttcttatttgtagatcccacaaataagtgagaaaatgtgatgtttgtctttctgtgcctggcttatttcacttaacataatgatctccagttccatccatgttgttataaataactagatctcattcttttttatggcagaatactactccattgtatatacgtaccacattttcttgatccattcatctgttgatggacacttaggctgcttacaaaccttagctattgtaaacagtgcagcaacaaacatagggatgcagatgtctcttccatatactgatttcctttcttttgggtatatgccctgcagtgggattgctggatcatatggtagctcaatgtttagttttctgaggaacctccaaactgttctccatagtggttatgctaacttgcgtgtccaccaacagtgtgcaagtgttcctttttctccacatcctcccaagcatttattactgatttttggatataagccatattaattggagttagatgacatcacattgtagttttgatttgcatttctctgataatcaatgatgttgagtaccttctcatatgcttgtttgccatttacatgtctttctttaagaaatgtctattcaaatcttttgcacgtttttaattggattattagaatctttcctatagagttgtttgagctccttatatattgcggtttattcatgtcctgtcagatgggtacttcacaaatattttctcccgttctgtgggttgtcgcttctctttgttgtttcttttactgtgcagaagaagatttttaactttatgtaatcccattggttcatttgtgtttaggtttcctgtgcttatgggatattgcccccaaaatttttgaacagacctatatcctggagattctctgcaatgttttcttatagtagtttcatagtttgaggtcttagatttaagtctgtaatccactttgatttttttttatatggtgagacataagggtctagttacattcttctgcatatgaacatcctgttttcccagcaccatttattgaaagacagtcttttccccagtgtacattcttggcactcttgtcagaaatgagttcactgtaggtgtgtggatttacttctgtgttctctattctgttccattggtctatgtgtctgtttttatgccactattatgctgttttgattactatagttgtgtagtataatttgaagtcaggtaatatgattccctagttttgttcttattgcttaggatagctttggctattctgggtcttttgtggttccatataaattttagaattgttttttcctatgtctgtaaagaatgttattggtattttgacagtgattgcactgaatctgtagattgctttaggtagtatggacattttaacaatgttgattcttccaatccataaacataaaatatctttccatctttttgtatccttttcaatttctttcatcaggcttttatagttttcattaaagagctctttaacttctttatttaattcctaggtatttaactttatgtgaggctactgtaaatgggactactttcttgatttctttttcacattgttcactgttgatgtatagaaatgctactgatttctgtatgtttatttcatacccagcaaatttatcaaatttatcagttctaatagttttctggttgagtctttaggtttttccgaatataagatcatatcatctgcaaacaaggataacttggtttcttccttcccaacttggatggcctttgtatccttctcttgtctgattgctgtagctaggacttcctgtattatgttgaataactatgtaacagtgggcatccttgtcatgttccagtcctttgaggaaaggatttcagtttttctccattcagtatgatactaactgtgtatctgttgaatacagcttttgttactttgaggtgtgttccttccatccccagtatttgagggttttcatcatgaaggatattgaattttatcgaatactttttcagcatcaactgaaatgatcgtatggtttttatccttcattctgttaatatgatgtatcacattgattgacttgtgtatattgcaccatccttgcatcccacaggtaaaccccatttggtcatgatgaatgatctttctaatgtattgctgtattcagtttgctagtattttgttgaggatttttgtatcgatatttattagagattttaacctgtaactttctctctttctggggtgtgtctttgtctaattttggcatcagggtaatactggctccatatattcccccagcatctgccatacctcagtaccatatcagaaagaaggagcctagagtattattctgtttctctgggatgttctctcacatacatgcattccctcatcattggtcacactttttgccattttctgtttactatctaccttaaccaagcttagcatctgtggatggaagtccataggtgagctataatacccacccatagagtgcagcaatagccccttgcatcaatagcctttccagaacttccctctatgaacattcccaataagaaaaagtacagtcacaaatataaaacatggcaggcgtatctctaccactagtcagggggcagcatctaggcagtcttagtttagtgagagaaataatcattcctcagcccattgtccctttagtaatgtacacttaaattcagaggacttgaagtaatgttttcagctgcaatgacttcttgtggtaaaatctacagctgtaattctaaattggtaaaaatggatctggcaaaacagaaacagtttacggggttggaaatatgtacgatctgaccattgatagcatttgccataatccatgtgtctgtacatatctaagcattgcctttgatataacctctcaattctttcagaacttccagacatattgccttcaatgttatttaccacgaatcttgccttgtaatctagattttattatctacaaggtgattgcttcactcaaattgggacgtgctatcagaaaaatgggcagattgctttgcacaaggaggaaaagaatcacagagtttagatcatttcaaaaaaggagccagaagttcttttgtggattatatcattggtcaaaaatgctggctgcaaactgcttatgaatgtaacatacaccaagagcaaccaccagtggagggctgctgcatgtgtcatttccatattattagtttttctaaactgttccatgctaattggaatgtttgtctgatattacctatgaaataacaggcattttgagttttagagttattatccacaatggtgagggctatcttcatcaaagctcagtaatgaacaaggaagtgtcttttaatccccctttaaaaattcacaaataataaccatacatatttatggggtgcatagtaatgtgtgtgtgtgtgtgtgtgagtgtatatatatatacacacatatatatacacacatctatatacacacacatatatatacatatatatacacacatatatatataatgtatagtagtcagagtaattagcatctccattatctcaaacatttatcatttctctttctgttgggaacactgaatattctgcttccagctatttggtactatctagtatattcttggtaactgaagaaaaattatatctaagtgttaaccccaggtatcttgaaatgccaactcctaacagtcacagcctgggagttcatgttagccttcttgcaactatgcatatccacataattaatcaaaatcatttgtgttttggtgagaattagcatctgcaatggtgagttttatgtgtcagcttagctaggctgtcaatccaagttatttaatcaaatattaatctaagtgttgctgtgaacaaggtattttatagatggagttaataacatctacaataagttgcctttaagtaaagattacccttgataatatgggtgggtcacattcaatcaattgaagcaataagagtcaaaacttcggcttcccaaagaagaaattctacctcaagactgtaacatcaacccttgtctgagtttctactctattaacctgccctgtgaattttggacttgcttatactcacaaatcaagtaaaccaattgcataaaacaaatctctctctatctcatctatctatatacacctcacactatacattctgtttctctggaaaacactaatacatcgtcataccacttaacatttttaagcaattaaaatctctcactatcttcccaagatttggtattacttaatattcactagagaggctggtttgaccaattataaaattcccatttaacaagaaccactaagaccaggtgaagagagcccttttccaaagtctgactataagccggtaattgaattcactaccaaattacaaaccatttatttcaaggaatctgtggaaagattaatctggcaggcaccaatacttttctgttttgcaaaacagaccacatatttaatgttatttctctagtattgatggtcatctggtctttaaatcctggcgcttggaaggtaggatctgttgatgaagggtcagagtgaaggagtgccatgatttaacctgtatctccccaagtctccatcaaaacctttgtcacacatgaagccaattatatttggttcagatatttatctcaatattgctgcggttgattgttcatttgctttactttccaccatgagatgttttaatatcaccaaacttgctagcagc

SEQ ID NO: 436 - DNA, 185235 bp, Homo sapiens
caagtagctggaactacaggcacacaccaccacacccagctagtttttgtatttttggtagatacagggtttcaccatgttggccaggctggttgaattcctggcctcaagtgatctgcccatcttggccttccaaagtgctgggattacaagcgtgagccactgcatccggctgatcacagctattttaaagtccaagtagtttgataacttcaatatctaaatcacctgtaaatctgtttttattgtctatttttttctgtctcttattatgcttggtaatttttttccttttctttttttctctttttttttttttttttttttttttttttttgagaaggagtctcattctgtcatccagtcgggaatgcggtggcgtgatcttggctcactgcaacctctgtctcccaggatcaagtgattctcctgcctcagcctcccgagtagctgggactacaggcatgcaccaccatgcctggctaatttttgtatttttagtagagacagcgtttcactatgttgcttaggttggttttgaactcctgacctcaggtgatccgccagcctcggcctcccaaagtgctgggattacagatgtgagccaccatgcccagccaatggttggtaattttttattgaatgacagacattgtgtatgacaaactacagcagcttggatgaaggtattttcttctggaaaagatttctttaagctggtaattacaatatagttgtttcactttagggattgagctaatttgaagctggatttagtctttgtaaaactagtctatattggtctacccttactcctagagtgtagtccttcagaagttccagcctaaaggcaagtcctttaccagagccttgtcattttggttggtcctgcactccaatttgtatttccccagcaccctgagactgccaatagctctgcttagcttcttggtctctagccagccaatttctgttctgcttctccacctgtgtcacttacaaattggtaaatgcttcaaggacaaagcagctcagactgttcgtattactttttgtactttcccctctgggatcttaatccctggagtcctgcttatcttggtactttccaatgccttccagcagatgtggttttttttttccttttttcatattcatcctgcttttctagttgttcgtggcaggtaggttggtctgctactgcaagcccgttcaccaatccaccagaaccagaagggaagtgcatgacctggttttagcgagcccatgctgatgactgaggagcacctcttcccatcactaaaccatatgcatgaatgtgtcctataacattgagaggttattgacagactttttagtgagaacaagttagcatggtagcaagaacaaagactttggagtcagattcgcatttaaatccaggttccagacagctccggtggctcacacctgcaatcacaacactttaggaggccgaggtgggaggatcacttgaggccaggaggttgagaccatcccgggcaacaaagtgagaccccccccatctctacaaaaaaaaaattagctgggcatgggtagcatctgtagtcccagctatttggtttgtttttattttcgttttttgagtcatgattttactctgttgcctaggctggggtgcagaggtataatcatggctcactgcagcttagaccttccaggatcaagcgatcctcctacctcagcctcctgagtaactacaactacaggcacataccaccacaaccagctaatttatttttccccctggggggagaaacagagtctcactatgttgcccaggctggtcttaaactcctaggctcaagcaatactcccaccttggcctcccaaagtgctaggattacagacatgagccaccgtgcctggcctcagtttgacaaattttgacctatgtatacatccataaaaccattacagtcaagaaagtgaacatatccatcattcccaagtttatcaattttaatgctcatcccaaggaaccatctttgtttcagtgattttcactattagttttgttttctaccctttgtttctactcagatctttattatttcttttaatctgcttactttgagtataattttatcttttcctagtttcttaaggtagaagctgtggttattgacttgaggtcttcttttctaatataagcatttggtgctataagtctctccctaagaactacttagtgacatcccacatattttgatgggttgtgtttcattttcattcatttcaaaatactttctaatttcctttctgatttcttctttgatccatgggttaattaagaatatgttactcagtttctaaatatttggggattctctagatatctttctggtattttttatttaattcaattgtggtcagagaatatattttgtataacttgaatccttctaaacttactgagccttgttttatagaccagaatgtggtctatcttgcaaatgttccgtgtacatttgaaaaaaattatgtgttttgctgttgttggatggagtgttctataaatgacaactaggtcaagttgggttttttttttttttttgagatgaagtctaggtttgtcgcccaggttggagtgcagtggcactatctccgctcactgcaagctccgcctcccaggttcaagccattctcctgcctcagcctcccaagtagctgggattacaggtgcacaacaccacacccagctaatttttctatttttagcagagacggggtttcaccatgttggtcaggctggtctcaaactcctggcctcaatctacccgccttggcctcccaaagtgctgggattacaggcgtgagccaccatgtctgacccaagttggttgttattcaagtcttttatatctttgctgattttatgtctgcttgttctaccaatcattgagaaagggatattgaaatctctgtaattgtggatctatttctccttgtagttctatcagtcttcatatattttgaagctctgtaatttgatacataagcatttagtatcgctatctcttttatcattatgaaatgtattttatctctggtgatacccttggctctgaaatttgtttcttttttttactaacttattgtctgtttctctcagaagtataagcaccatgaagccaggcactgtgtcttgttttgtatccctaacacctagcagagtagctggcacttagtgaatatttaacaaatctttactaaaggaaggacagaagggagggaaggattgtaatgcatatgctgatagaggtaggcactaggaataagtgataagaaggggacagcacctgttttgaagacaatatatcataatgagtaaaataaacacagaggcaatttcaagagtgtgacatgagccaggaaaaggataagcataagattctttggaagactaaggtgatgagagacacctttcttttttttttttgagacggagtctcgctctgtcacccaggctggagtgcagtggcaccatctcggctcactgcaagctccgcctcccgtgttcacgccattctcctgcctcagcctcctgagtagctgggactacagccacctgccaccatgccttgctaattttttgtatttttagtagagacggggtttcgccatattggccaggctggtctcgaactcccgaccttgtgatccgcccgcctaggcttcccaaagtgctgggattacaggcgtgagccaccgtgcccggccctgtgtgcttattaagagtctcttggccgggcacggtggctcacgcctgtaatcctagcactttgggaggccgaggcaggtggatcacctgaggtcaggagttcgagagcagcctggccaaggtggcaaaaccctgtctctactaaaaattcaaaaattagccaggcgtggtggcacacgcctataactccagctacttgggatgctgaggcaggacaatcacttgaatccagggtgggggaagggggagggggttgcagaggttgcaatgagccgagttggcgccacttcactccacctgggcaaaagagcaaaactctgtctcaaaaaaaaaaaaaaaaaagtctctgaagttgttcctaacctgtttctgccagtagttcttgttattgcagtttgattagatattaacccagagataataaaattgaaatgcaaaagacagctgttatttctatgaggaccaagttgaatgcttttgaaagattagacagaagagccaaaaaacaaacaaaaaaaaactgttctcaaagtacatatgagagagataactataaaaattaaggccagccaggaacggtgactcacagctgtaatcccagcactttgggaggccgaggcaggcggatcacaaggtcaggagttcgagaccagcctggccaatatggtgaaaccccgtctccactaaaaatacaaaaattagccaggcatggtggcgcgtgcctgtggtcccagcttctcgggaggctgaggcagaggagtcgcttgaacccgggaggcagaggttgcagtgagctgagattgcaccattgcactccatcctgggcgacagagcgagactctgtctcaaaaaaaaaaaaaaaattaaggccaagcacagtggctcatgcctgtaatcccaacactttcggaggccaaggcaggaggattacttgagtgcaggagttcaagaccagcctgggcaacatagcaagaccccatctctacaaagaaatttttaaaaattagccagctgtggtggtacatgtctgtagtcctagctactcaggaggctgaggtgggaggactgcttgagcccaggaggttgaggctatagtaagccatgatcattccaccacattccagcctcggtgacagagcaagaccctgtctttaaaaaaaaaaaattagaaggtacattgtcaaattagaaaacttctttaaaatgatatggccaataagaacggaaagggcagtgggacgcggtggctcacgcctgtaatcccagcactttgggaggccaaggcaggcggatcacgaagtcaggagtttgagagcatcctggctaatatgatgaaaccccgtctctactaaaaacacaaaaaaaaattagccaggcatagtcacgggcacctgtggtcccagctactccggaggctgaggcaggagaatggcgtgaacccaggaggcagagcttgcagtgagccaagatcgtgccactgcattccagcctgggtgacagagcaagactctgtctcaaaaaaataaaaaagaatggaaagggcagtggaaagaaatgtgatggatgtggtgaggagggtcttcagggctttgtatgcccctctaaggtatctggattttatcctgaggtgaatggtgaacattcaaaggtgccgagcaagacggtgacagaaacagattcacattttagaaagatggctctgactacagaatacagtgaatgagcaagactgaatgcaaaaagacctgtcaggaagctgttgctgtaaacaagagataatctggacctaattaagagtgttttcactattctttttttttttttttttttttttgagatggagtctcgccctgtggcccaggctggagtgcaatggtgcagtctcggctcactgcaaactctgcctcccgggttcaaacaattgtcctgcctcagcctcccaagtagctgggattacaggcacctgccaccatgcccagctattttttgtatgtttagtagagctgggggtttaccacgttggccaggctggtcttgaactcctgacctcgtgatccacttgcgttggcctcccaaagtgctgggattacaggtgtaagccaccgcgcctggcctgtttataattttttttttttttttttttgagacggagtctcgctctgtcacccaggctggagtgcagtggtgcgatctcggctcactgcaagctccacctcccgggttcgcgccattctcctgcctcagcctcccgagtagctgggactacaggcgcccactaccgcgcccagctaatcttttgtattttcagtagagacggggtttcaccgtgttagccaggatggtttcgatttcctgacctcgtgatccgcccacttcggcctcccaaagtgctgggattacaggtatgagccactgcacccggcctgtttttactattcttaagagctaattttaaataaaaattagctgggcatggtggtgcacacttgtggtccctactaaggaggctcaagtaggaggatcgcttgagcccaggaggtcaaggctgcagtgaaccgtgattgtgtcactgcactctagcctgggtgacagaataagaccctgccaaaaaaaaaaaaaaaagctaattttatgggttaagtaagtttttctgggctttctaaggaaacaacattactgccgtagttttcatgggaaatcatattccaaacaacaaattacatgctaattagcatacaacctatttgcggactaaggactgtttgcaacttatttgcctttacaaatggtaacttctacagaagcctcatctgcttccccagttacaatcttaatctggatcatttccattgcaattgcaaaacctctttcttatgcagaggacatctaaaaacgggctgtttctaaatatgatcgtcaagaatacatctttttaaatgtttgtacaaaacagaggttaggctttggtatctgtgactgtaaactactcttggtacccagaaaagaaaataagaacacttacttcatgaaatactgctccagaatacggagatactcccaagtccaacagtgaaaggccttcaaccactgaaaaattagatatacaagttcactcagactaagcaggcagctacagaccaaattgttagatacccccacaaccaaaaagggccttagcgtttatctaaccccctttacctcatccccagcaagtggctttaagtcttgaacatttctgatgacgggaaactctctttcatggacagcatcctttttcattgtgggcagcactcattataagacagttttatgttaaactatctgcttccttttagttccttgtaactcttaccaactctcaaaaatgtctcatttatgcctaatcttccccattccaaagcacaataagataacaaattagaagctggtgagaaatgttgccatagtgtgaggaaatgggcagtcactctcatatgctgctcatttgagtgacatttgtattaacttttcgacagggcaatatgtgctttctaagtgtgtgccttctgacccagatatgatacttcttagggcagtttatcctatggaaataacctgacaagtacccaaagaggtatgttccttacactgttcagagtactgaacaattagaaataatctgaatgtccattaatgaaaatttatttcaatgaattatgacataatatatatctctatataatggaatgctttatacttaaaattatactgtgttataaataataaataacctctccctctccctctccctcaccctctccctctctctctctccacggtctccctctccctctctttccacggtctccctctccctctctttccacggtctccctctgatgccgagccgaagctggactgtactgctgccatctcggctcactgcaacctccctgcctgattctcctgcctcagcctgcccagtgcctgcgattgcaggcgcgcgccgccacgcctgactggttttcgtatttttttggtggagacggggtttcgctgtgttggccgggccggtctccagctcctaaccgcgagtgatccgccaacctcggcctcccgaggtgccgggattgcagacggagtctcgttcactcagtgctcagtggtgcccaggctggagtgcagtggcgtgatctcggctcgctacaacctccacctcccagccacctgccttggcctcccaaagtgccgagattgcagcctctgcccggccgccaccccgtctgggaagtgaggagcatctctgcctggccgcccatcatctgggatgtgaggagcccctctgcctggctgcccagtctggaaagtgaggagcctctctgcccagccgccatcccatctaggaagtgaggagcgtctctgcccggccgcccatcgtctgagatgtgggcagtgcctctgccccaccgccccgtctgggatgtgaggagcgcctctgcccagccgcgaccccatctgggaggtgaggagcgtctctgcccagccgccccgtctgagaagtgaggagaccctctgcctgacaaccgccccgtctgagaagtgaggagcccctccgcccggcagccgccccgtctgagaagtgaggagcccctccgcctggcagccgccccgtctgagaagcgaggagcccctccgcccggcagccaccccgtctgggaagtgaggagcatctccgcccggcagccaccccgtccaggagggaggtgggggtcaacccccgccaggccagccgccccgtccgggagggaggcggaggggtcagccccccgcccagccagccgccccgtccgggaggtgaggggcgcctctgcccggccaccccctactgggaagtgaggagcccctctgcccggccagctgccccgtccgggagggaggtgggggggtcagccccccacccggccagccgccccgtccgggaggtgaggggcgcctctgcccggctgcccctactgggaagtgaggagcccctctgcccggccagccgccccgtccaggagggaggtgggggggtcagccccccgcccggccagccgccccgtccgggagggaggtgggggggtcagccccccgcccggccagccaccccgtccgggagggaggtgggggggtcagccccccgcccggccagccgccccgtccgggaggtgaggggcgcctctgcccggccgcccctactgggaagtgaggagcccctctgcccggccagccgcccggtccgggagggaggtgggggggtcagcccccggcccggccagccgccccgtccgggaggtgaggggcgcctctgcccggctgcccctactgggaagtgaggagcccctctgcccagccaccacccagtcttggaggtgtacccaacagctcattgagaacgggccaggatgacaatggcggttttgtggaatagaaaggggggaaaggtggggaaaagattgagaaatcggatggtggccgtgtctgtatagaaagaagtagacatgggagacttttcattttgttctgtactaagaaaaattattctgccttgggatcctgttgatctgtgaccttacccccaaccccatgctctctgaaacatgtgctgtgtccactcagggttaaatggattaagggcggtgcaagatgtgctttgttaaacagatgcttgaaggcagcatgcttgttaagagtcatcaccactccctaatctcaagtacccagggacacaaacactgcggaaggctgcagggtcctctgcctaggaaaaccagagacctttgttcacttgtttatctgctgaccttccctccactattgtcctatgaccctgccaaatccccctctgcgagaaacacccaagaatgatcaataaaaaaaaaaaaaaaaaaaagaacagctttaaaaaataaataaataataaataaataagtggaagagaaaggagagcttttccctacagagaattctaaggatcaaatgtagaaggaacaaagaaatagaaaatcaccacttggcgtactccatccatagtaataatcacaaaaggcaagaatcatcaatggatgctaaaattagtgggcaaaaatatgagaaacagaatatttgcaaggggaaaaataaaattttacatgggcggtggttcatgcctgtaatcccagcactttgggaggccaaggcaggtggatcacctgaggtcaggcgttcaagaccagcctggccaacatggcaaaaccctgtctccattaaaaatacaaaaattagccaggcatggtggcgcgcacctgtaatcccagctacttgggagagtgaggcaggagaatcgcttgaacctgggaggcggaggttgcaatgagccaagattgtgccactgcactccagcctgggcaacagagtgaaactccttctcaaaaagcaaacaaacaaaaaagcataacctcagtctaactgtgagaagacatcaggcagacccaaatggagacataaaataactggcaagtactcttaaaaatattaagcctatgtacaactactaggtatccataaaaattaaatttaaaaaattgtaaatgttaagtctgaggaagtatcccagattataagagactaaggcgacaaaacaactaagtgcaaagtggaatcacaggttggatattggactagaaatggacattagtggggcaaattgataaaattctaataaggcctgtaattagttaatagcattgtatcaatgttaattttctggtttaggtcattgcactatggtgatgtagaatgttaacattagaaaaaggtgaatgaaaggtaaacaggaactcttgtaacttttttgaaaatctaaaattattttaaaattaagagttaaaattaaaaagtacactagagatctatatttaatgaagaaaagcagcccataaaatattcttaaatgaaaagtaggtcaaaagacagcatataaaatataataggtttttttggtgatttttttaaatgactattttagcaatttctcttggcttttacttattttcctttgcaaattttctgggggttgagggggtacatgtccaggtttgttacatgggtaaattgcatgtcatagaggtttggagtgcagataatctcatcacccaggtaataagcacagtacccgacaggtagcttttccatcttcaccctcctcccaccctccaccctcaagtaggcccaggtatctactgctactttctttgtgtccatgtgtactcagtgtttagcttccacttataagtgagaatatgctgtatttggttttctgttcttgcattaatttgcttaggataatgtctccagctccatccatgttggtgcaaaggacatgagctcattctttttttttttttaatgctgcatagtgttccatggtgtatatgtacattttctttatccagtccaccactgatgggcattcaggttaattccatgtctttgctattgtgaatactgctgtgatgaacatacacatgcatgcatctttagggcagaacaatttctattcctttaggtatatacctagtaatgggattgatgggtcgaatggcagttctgttttaggatctttgagaaatcttcaaactgctttccacggtggctgaattaatttatattcccaccagtcgtgtataagtgtttccttttctccacaaccttgccagcatctattattttttgactttttaataatggtcattctgactggtatgagatagtatctcattgtggttttgagatagtatctcattgtggttttgatttgcatttctctaatgactaattatgttgagcattttttcatatgcttgttggccacatgcatgtcttcttttgagatgtgtctgttcatgtcctgtgcccccccgccaactgtttttccaagacaggttctcgctctattgcccaggttgaagtacagtggcatgatcagggctcactgcagccttgacctctcaggctcaatcgatcctcccacctcagcctctcgagcagttgggacttcaggtgtgcatcaccatgcctggctaatttttgtattttttgtagagatggggtttcaccatgttactcaggctggtctcaaactcctgggctcaagcaatcttcctgcctcagcctcccaaagtgctggaattacagtggtgctggaattacaggtatgagccaccatgcccagccctttgcctttttttttttttttttgagacagagtctcggtctgtcacccaggctggaatgcagtggcttgatcttggctcactgcaacctctgcctcctgggttcaagcaattctcctgcctcagccacccagtagctaggattacaggtgcctgccaccagaccacctaatttttgtatttttagtggagtcggggttttactatgttggccaggctagtcttgaactcctgacctcaagggatctgcctgcctcagcttttcaaaattgcacatttttaaataggtttgtttgtagagttttatcttaaacttttataagcattcatttaattatttgaaagagagagaatgaacatgtactcaatgagaaatgcctggaaaaataaatatttaaatgttcacaatgaccatttctaggtgataagattacagaagatgcttgatttttttcatcttcattttatgaatctttagcaatgaggatgtattattttacaattattcaaaagaagtagtttttgtttttgttttggagacagggtctcgctctgtcatccagactggagtacaggaattacaaacgtggctcactgcagcctcaacctcctgggcacaagcgatcatcccacctcagcctcccaagtagctgagaacacaggccaatgccactacacccagctaaatttttttttggtagagacagtgtcttgccatgttgcgcaggctggtcttgaactcctgggctcaagccatcttcccaccttgacctcccaaagtggtgggattacaggcgtgagccactgcacctagctactttttatttttgaatcatgtgactgagttacctattaaaaaataggtaggcagggattcaaggagttcaagatcagcctgggcaacataaggagaccctgtctctataaaaaaacaaaaattagctggggcatggtgatgtgtgcctgtggtcccagctacttgggaggctgaagtgggaagatcaattgagcccaggaggtcaaagctgcagcgagtcatgatcatgctactgcactccagcctgggtgacagagggaaaccctgtatcaaataaacaaaaacagaaagaaaagaaaagaaaaaagaccactacatatttgtaaggagtgggctataattatgactttaaactttataagactaccctaaagaaggtagggtagtcctataatcaattttataattcatggtggccataaaataaaacaaagcatattgctcaagaccgttgtaactggtccttatactgcaaccaaaaggaaatctcaaggagctgcataaagaggttgctgcgtaatagctattaaatccttcactaacagctttactggagacccaaggagataattcatcaggtcaaatcacaaggcatttctcaatcttagccaatggcatcctaccacagagcagtaaaaaagcaactctacagggcaccagtatgcggccgtccaggcacatcactctccacttgtctggtttaatccagatggaaatttttgagacacagcttgaggacagactgcacaacttttaggcaattgcctaaaatgtaattcatctcagatatgcttttgctagatactgtatatcagtggatttgttagtgtattctctggcaaatgcctggagtgtggctctgctatattgatgattaaatatggcatcatattacttaattgataactgatctgggcaaagggtcagactatgtaaaacatgtaaaacatttttttgtctttcttttttgagactcactctgttgcccgggccggagtgtaatggcttgatcatagctcatcgcagcctcaaccttccaggctcaagtgatcctcccaccccagcctcccaagtagctgggactataggtgcatgccaccacacccagctaatttttaaattttttttgtagaaacgggctcttgctatattgcccaggctggtaaaaacatttttaaaaaccctaccatttactacaatattaaacagttgaccgggcacagtggctcacgcctgtaatcccagcactttgggaggcccaggcgggtggatcacctgaggtcaagcactcaagaccagcctggccaacatggtgaaaccctgtctttactaaaaatacaaaaattagcctatttgggaggctaaggtagaagaatcgcttgaacctgggaggtggaggttgcagtgagacaagattgtgccattgcattccagcctgggcaacaaaagtaaaactccgtctcaaagcataaaaaataaaaaaccaacaaaaaaaagtatatggctgggcatggtggctcacgcctgtaatcccagcactttgagaggccaaggagggtatatcgcttgagctcaggaattcgagactggcctggaaacatggtgaaaccctgtctctaccaaaaatacaaaaaattagccaggcatggtggagagtgcagctactcagcaggctgaggtgggaggattacctgagcccaagagttcaaggctgcagtaagctgtgattgtgccactgcactccagcctgggcgacagagccagaccccgtctcaaaaaaagaaaaaaaaagtataggaagaacataaactcagaatattttttgtttgtttgtttttgagacagtctcacactctgtcgcccacgctagagtgcagtggcatgatcttggctcactgcaaccttcacctcccgggttcaagcaattctcctgcctcagcctcctgagtagctgggattacagatgcacaccaccatgtatggccaatttttttttttttttttttttttttttttgagactgagtctcgctctgtcgcccaggctggagtgcagtggcgcgatctcggctcactgcaagctccgcctcccgggttcacgccattctcctgcctcagcctcccgagtagctgggactacaggcgcccgctaccacgcccggctaattttttgtatttttagtagagacggggtttcaccttgttagccaggatggtctcgatctcctgacctcgtgatccgcccgcctcggcctcccaaagtgctgggattacaggcgtgagccaccgcgcccggcccaattttttttgtatttttagtagaggcggggttttaccatgttggccaggctgatctcacactcctgacttcatgatctgcccgcctcagcctcccaaagtgctgggattacaggcgggagccaccacgcctggcccagaatatttttaatggaatacatttagttttaatgataaacttattactatccttacttttctaattttggtgcacacgattaaaaactgtgacctggtctgcagtgcatttggaaacatctaaggtacatagatgtttcatctatgtacatctaaggcacataaaacatactggtacaagagtaccaacatcctctttaaaatagtgaatctactctccatagaaaagaataatcagggctgtcaaattctaatatatataaaaatgttccaataggctgagcattgtaatctcaatacgttgggaggccgaagtgggtggatcacctgaggtcaggagttcaagaccagcctgaccaatatggtgaaaccccgtctctactaagaatataaaaattagccaggcatggtggcatgcacttgtagtctcagctcctcgggaagctgagacaggagaactgcttgaacccagaatgcggaggttgtagtgagccaagatcgtgccactgtactccagcccgggcgatagaacaagactccatctcaaaaaaaaaagttccagtaatatcatgctgaaaacactttaaagtcagtttcacaaagtgcctattagggggaaaaaacaaaaagacaataaagatacccatagaactcaactttatgcctttctttttcctggagtatcctccaaaaataaaacctgtgaaaatacaccagagcatccaagtaacatttctcacttcatgggactattatctaacaactaatataagagctaaataattatggccaactattgtaaaatgtaagtttttttttttttgataaagactctcaactcttaactgataactaacccatgaagcaagcttatttaattaattaatttatttatttatttatttttagagacaggggccttaatcttttgcccaggctggaatgcagtggcacaatcagctcactgcagccttaacctcccgggctcaagctcagcctcccacgtagctgggactactggagtgcaccactgcacctgactaattctttttttttttttttttttttttttttgagacagagtctcgctctgtcacccaggctggagtgcagtggcgcgatctcggctcactgcaaactccacctcccgggttgacgccattctcctgcctcagcctcccgagtagctgggactccaggcgcctgccaccacgccaggctaattttttttgtatttttagtagagacgaggtttcaccgtattagccaggatggtctcgatctcctgacctcgtgatccacccgcctcggcctcccaaagtgctgggattacaggcgtgagccaccgcgcccagccagcacctgactaattcttattttttgtagagatggggtcctgctatgttgctcaggctggtctcaaactcccggcctcaagcgatctacccaccctggcctcccaaagtgctaagattacaggcatgagccactatgcctggccaataattcttagttaccttggtatacttttcctatgggtgataataaaagcatatcatcctgtataagacaaatattatttttcagtttcccgtatcaataaggacaaaagcttgttcaaaagcagtagtgtccctatacttctagctgagggcctaagaagcagcatcactccagctgcaatgaacacacctagcattcagaactttgtttctaaataacattctctaataaaaggagccagggcccttgaagaagtggtcaattccagggctgaactaagcaagataaacctggatcatcttatagttctagaatgtaataaagtgcttttaaaaaaaaaaagtgagatagaggtatggcaaaaggacaaaggggtcaagatgaaagcggtcccaatggccaaaactagaataatccaaacaacagaatgaatatagtatacagagtccagagtataaaatatccaaatctatactgacataaatagttaaataaatgcaaagaaatgacaactcttccttacagaagaattttaattattaaataaaaatgaatgagagaaacagaaaagtcaccattgaaacacctgagtaatgactgttacaggcaagattaacctatgaatgcaaaaattagtaggcaaaaatttaaaaacaggatatttgcagagctccaaagaatagcccctaaaatgctgattaattacaaagggaaacagtcactttatggtggagaaatctggcagacactacattaaccaagggattatggctgacatcaccagtattagggcatttcaatatgcacccctgatccaatgcactgagaggaccatatcatctcaggggtattcttccccaaaatccattacctccgtcaaaccacaagaaaacattagacaaaaccaaattgagggacattctacaaaatacctgaccagagctcttcaaagtgtcaaggtcataaaagatgaggaaatgctaaggaactatcacagataaacgactaaggagatataacaactaaacgcaatatgtggccaggcgcggtggctcatgcctgtaatcacagcattttgggaggtcgaggcaggtggatcacctgaggtcaggaattcgataccagcctggccagcatggtgaaaccccgtatccactaaaaatacaaagattagctggcatggtggcagggacctataatcccagctactcgggaggctaaggcaggagaatctcctgaatctgggaggtggaggttgcagtgagccgagatctcgccactgcactccagcctgggtgacagagcgagactccgtctcaaaaaaaaaaaaaaaaaaaaaaggggggggcgggcgtgctggctcacacccgtaatcccagcactttggaggctgaagtgggcaaatcatgaggtcaggagatcgaaaccatcctggctaacatggtgaaatcccatctctactaaaaatataagaaattagccaggcgaggtggcgggcacctgtagtcccagctactcgggaggctgaggcaggagaatggcatgaaaccggaaggcggagcttgcagtgaaccaagatcgtgtcactgcactccagcctgggtgacagagcgagactctgactcaaaaaaataaataaataaataaataaaataaaaataaaaatgcaatatggaatattagatcatagaacagaaaaaaaattagtgaaaaaatggtaaaactttttttttttttttttttttttttttttttttacacagggtcttgctctggtgccaggctacatacagtgcagtggcatgatcatagctcaatgcagcttcctcatcccaggctcaagcaatcctcccacttcagcttcccaagtagctgggaccacaggtgtgcgccaccaaaccagctaactcttttttaattttatgtagagagggagtctccctatgttgcccagactggtcataaattccagagctcaaggcatcccctcgcctcagcctcccaaagtgctgagattataggcatagccactgtgcccagcaaaaatggtaaaatcttaacaactatggtttagttaatagtattgtaccaatgctatcatcttagttttgatcactgtactatgactatgtaggatattaacattgggggaagctgggtgaagggtatacagatctctctgcaatatttttgcaagtattctgtaagtttaaaatgatttcaagtaaaaagctaaaaaacaggctggtgcagtgactcatgcctgtaatcccagcactttgggaggcagaggcaggtagatcacttgaggtcaggaattcaagaccagcctgaccaacatggtgaaaccctatctctaccaaaaatacaaaaattagctgggtgtggtggcacacacctgtaatcccagctactcaggaggctgaggcaagagaattgcttgaacccaggaggtggaggttgcagtaggccaagatcacaccactgcactccagcctgggcaacagagtgagactctggctgaaaaaaaaaaaaaaaagtaaaaaacaaaaaacagtggtatctagtctctggatccagctgcctatttgcaggaaatagagatgatagaggaacatgttaaattgtatcatgatatataatcaggaaaattcaaactatgggagatctgtctggattcttcaatagataaacactatggaagagaaagggaacctgggaccctaaaaattaagagagattgaaaacacaaacaaaaacttttttcttaggggcaagactaagcctaacggcaaatgaactagggatgttcatttgagtaataaaacttttaaaaatacaaagatgtcattacatataaaagtcaggataatagttacttatgaaaagagtgaggggattgtgacgaaggggggcttctgaagtgagtggcaaagttctgattcttgacttggatgacagttacaaaaatgttcaccttacaataattcaccatagaatacattgttatgtgtgtcttacaaattctgtttaattttgtaataacggctttttttttttttttgagacaaagtcttgctctattgcccaggctggagtgcagtggcatgatctcagctcactgcaacctccacctcctgagttcaagtgattctcctgcctcagcctcctgagtagctgggactacaggctcctgccaccacacccagctaatttttgtatttttagtagagacaaggtttcaccatgttgcctaggccggtctcgaactcaagctcaagcaatctacccacctcccaccttagcctcccaaagtgctgggattacaggtgtgagccacctcgcctggccataaaggcttttttaagtagtggtatcagaagtgctcttcctgaccctgattcttttatttttgagacaaggtcttgttctgtcgcccaggctggagtgcagtggtgcaatcttggctcactgcagcctccacctcctgggctcaagccaccctcccacctcagtctcccaggtagctgggactacaggcacacgccaccatacccacctaatttttgtatttcttttttgtagaggtggggtttcaccatgttatccaggctggtctcaaactcctaagctcaagtgatctgcccacctcagcctgccaaagtgctgggattacaggcttgagccaccatgcccagcaaccctgattctcatagctgtagtaggggtgggtttctagataagtactaatagcttgggctctaccctgaactcaaaaagctaagcctatacgaactgtcaatctttgggtgaaagcctcaggaaagactaaaacatggcagaaagtttctaacattattcctgacagatatctaaacaagatgatactggtggaacagccatacctaaagattgctagctcttcatacaaaatattattagcgaggtcaccttgggcaaatgacttaatctctccatgcctcaattttctcatttataaaatggggttgataacagtttgccattttagagatcaaattagtgcattaacacacctaaagtgcttagaacaataccaggcatgtaaaaagcatcatatcattgttaatttctttcttttcttcttcctttttttttgagacggagttttgctcgttgcccaggctggagtgcaatggcgcgatctcggctcaccgcaacctctgccccccgggttcaagtgattctcctgcctcaacctcccaagtagctgggattacagtcatgcaccaccacgtccggctaattttgtatttttttagtagagacagggtttctccatgtcggtcaggctagtcccgaactcctgacctcaggtgatccacccacctcggcctcccaagtgctgggattacaggcgttagccaccgtgcccagcctgttaatttcttattaattttttagaagctcctgcttttgtcaaacaggaaattcattccttaaaaatttatttcttggccgggcgcagtggctcacacctgtaatccaccactttgggaggccaaggcaggtggatcacctgagatcaggagtttgagaccagactgactaacatggtgaaaccccatctctactaaaaacacaaaattagccaggtgtggtggctcatgcctgtaatctcagctactcaggaggctaagacaggagaatgaatcgtttgaacctgagaggcagaggtttcagtgagctgagattgtgccattgcactccagccagggcaacaagagtgaaactccttctcaaaaaaaaaaaaattttctttttttataaggcagagtctcactctgtcacctaggatggaatgcagtggcacgatctcggctcactgcaccctccacctctgcctcccgggcccatgcaatcctcctgccttagcgtcccgagtagctgagactacaggtatgggccaaacatgtccagctaatttttgtatttttttgtagagacagagttttgccatgttgcccaggctggtctcaaactcctgggctcaagtgatcctcccgcctcggcctcccaaagtgctgggattacaggcatgagccacaaaacccggcctggaaatttatatgtattttagttacactatcaaataaaccgatggatttgtagaaataggtaacagaaaagatatttttcctgttgaaatggatatgttatttgtgcctgcccaacatcaatcttcccttcttttggtaacagcaccctaatttttcctatgggataccccccttgtgtacattttgggtgagactgcctcctttccaaagaggtagatacatgacccaggcagactacagtaattgaccgaagaattggtatatgacccaaatcagttcaatgtgacttaattccagagctttcgttgcacttattcaaaaaaaaagaggtcaggcatggtggctcatgcctataatcccagcactttgggaggccaaggcagaaggatcgcttgaggccaggagcttaagaccagcctaggcaatatattgagaccccatctctacaaaaaacaataaaaaacaattagcaaagtgtgggagcatgcaccaatcccagctgtttgggaggctgagtcaagaggatctcttgagcccagaaggatgaggctgcagagaattatgatcatgccgctgcactccagcctgggagacagagtgggaccctgtctctcaaaaaaaaaaaaaaaaaaaaaaaatcagtccatactatagccaatcaaaatctatttggatttggatccagggcccctttacccaaagaactgatcattcaaaaatttaaaatgtcagcccggcgtggtggctcacgcctgtcatcccagcactttggaaggccgaggcgggtggatcacgaggtcaggagatcgagaccatcctggctaacatggtgaaaccccgtctctactaaaaatacaaaaaattaaccgggtgtggtggcgggtgcctgtagtcccagctactcgggaggctgaggcaggagaatggcgtaaacccgggaggcggagcttgcagtgagctgagattgcaccactgcactccagcctgggtgacagagtgagactccgtctcaaaaaaaaaaaaaaaaaaaatgtaaaatgtcatgtgaaaccagaaggagtcctactttactatttttaaattcctgccttttagggtttatataatcagctgctttaaaaaatatcccatttaaggtaccctttgaagaaaagtaatgcttacagatgttgtaccttccctcccaaatgatacaaataatcatgctgatttagtcagatccagatgatgggtggttaacaaatctctctctctttctagtcctgacactggcctcaagctccagacctaaacctgtcagtattgtactatcacattatacacacatgaaacactactatgtcctttctgattcatctatttcagcccatgtcagcactatttttcctaatatctcaactcaaaaccttagaattcacctttttggctttcattattgtgttgagcttcaacatggattatctcgttgaacaggatacataatttcctattttacagatggaaacactgacgttagaattcatacagcttggccgggcgtggtggctcacgcctgtaatcccagcactttgggaggccaaggcgggcggatcacgaggtcaggagatcaagaccagcctggctaatatggtgaaacctcgtgtctactaaaaatacaaaaattagccaggcatggtggcatgtgcctgtagtcccagctacttgggaggctgaggcagaagaatcgcttgaacctgggaggcagaggttgcagtgagccaagatcatgccactacactccagcctgggcaacagactgagactccatctcaaaaacaacaacaacaaaaaaagcttggcgcagtggctcatgcctgtaatcccagcactttcacaggtcaaggcgggcggctcacctgaggtcaggagtttaagaccagactagccaacatggtgaaacttatctctactaaaaatacaaaaattagctgggcatggtggcgggcacctgtaatcccagctacccaagaggctgagacgagataacagcctgaacctgggaggcggaggttgcagtgagccgagatcgcgccattgcactccagcctgggcaacaagagcaaaattctgtctcaaaaaaaaaaagaattcatacagcttataagttgcagaactagagaaagagtcaaaccttttctgagattccagaccctgcactcttaattaccaaacaacactgtctcatctttggatccttcacctgtccatcctgtaagtaacctcctgtaagtaaccagatcctatgctttcttctcttccacatttattcaacagtaactacacacctactgtatgccagacataaaagaattcaggaatgaataaaacagaatccttcaaggagctcataatatagtggaaaaggccaggtgtggtagcttatgcctgtaatcccagcactttgagagacccagatgggcggatcacttgagcccaggagtttgagaccagcctaagcaacatggtgaaaccccatctctacaaaaaatacaaaaaaataataataataacaagtagggttggtggtacatgcctgtagtcccagctaccaactacttgggaggctgaggagggaggatgtcctgagcccgagaggtcaaggctgcagtgacccattatcactgcactccagcctgagtgtcagagtgagaccctgtctcttgaagaaaaaaaaaaaaaaaaagaggccaggcatggcggctcacacctgtaatcccagcactttgggaggccgaggaaggcagatcacctgaggtcgggagttcaagaccagcctgaccaacatggagaacccctgtctctactaaaaatacaaaattagccaggcatggtggtgcatgcctgtaatcccagctgcccaggaggctgaggcagaagaattgcttgaacccagggggcggaggttatggtgagccgagatcgcaccattgcactccagctagggcaatgagagtgaaactccatctcaaaaaaaaaaaaaaaaaaaaagagagagagagaaaatgtggaaaaaccggatataaacaggtaattatgagataagaaatgctcttagtagggtgtagaggaagaagggcctaatactgcctcaggttttcagttatccagaagaaaacaggaaccaaatggcttcgattcatttcaacagaaaaataatacgcagaggtaacaaatccaagctcttacaatctcagacatgaattattactatctttattaccattccccaactaggaaacctgggcaaattaacttctctaaatttcagttccctcatctgtaaaagggggaaaataacaccatctatcacatagaaataaatgtgaggactaaatgagaaaaggtatatgttaccatttttagaaaccttaactctattcataaaacacccattcattatgccgttccccataccaacattctatgggataacatcaaaacgttagccttggccaggtgccatggctcacgcctgaaatcccagcactttgggaggccaagtgagactgcttgagtccaggagttccagaccagcctgggcaacatagaaagaccctgtctctaaacaaaaaacaaaaacaaaaacaaaaaaactttagcatttaaaggacacaaaggggacttctggggtgctgatactgtttcttgaactaggtgctggctacatgagtgaatacagtttttaaaaattcattgaactctacacttacttaatatgcattgtatgtatactgtacttcagtaaaaaaaaaaaaaaaaaagttgtttgtttttttttaatcatcaaactctggcctaaacctagcttccaccccattactcccctgctttggacatttcacatccttgaacgtttcttcatcctatttactttctgctacctggaactctccttttctctaatctccctttcaaaaccctacatccttcaagagtcagctcaaatcccacattctggaaaactggaaaggtaggggatagtttattcagggtcagaatactaaggaaggaactgggtggacacataaagtatacttttcatgaattattataacgatttgtctccctcactagcctgtgcagctacttcaggccaacttcgctttctcgctgtaggcgttagtataaaacaatgttcggtgaagaacttagtaaggaacagtaacaaaaattgccctgcaagtcccagactgagaagagacgtctaaagcacacgcacactctcctcgcttaagcaaaattggtcccctcatcccggaccccctcacacataaccttttatcccagggagcacccctggcgatcccgccccaaatcccaaactcctctgcaagccgcgctccacaagcacctcctcctcttattccaacccttcccacagaccacactcctcggctcaggacactgaatgggacacgccccctcagatccccaccactaggtggtccggcccccagggcccaaacctcacgacactgtccccacgccccggtccccacgccccctcccctcaccagccccgccctcaggccccgccctctccaagaaccccacgagacagtcagttagttctctaggaaccgcgcgctggcggtcactgcccccgcctcccattcacagaggccgcgggagggcaggtggggcctgacagtctgctcgagccagtggcctcacctctcttccaagagctcagtggggacaccacctccacccgctcggaaatgaactcggccagactggagcggaacaaggccgcccgcactgtcacagccaccaccagcaccaggaccaagggagccgccatgataactggggcgggcgcgcgggcggggagggaaggcgaggcggaggagcctcgcgcgctgtgcgccacgctctgtagttccgcgggtgggcgcgcgctgccgctggcgccggagaggccagacgtggggactacggctcccagaaagccttgcggcgaggcgggccggagcgacggaaagcgggcgcctcaagctgcgtatgcagaaggtggggcgaaaccttctacgatcgcaggtgttttgtgaagccgcgccgctatagcggggctgaaacgctgctgaaagtagaagcggaagtagtcgccttcctgggattgtgagagacttttaaacagatgttaaattcactcttgcgtgtatgttttcaatgccaaaatgtttatttttatttttatttttattttttttgagacggagtctcgctctgtcgtccggctggagtgcagtggcgcgatcttggctcactgcaacttccgcctcctgggtagctgggatgacaggcgcccaccaccacgcgcggctattttttttttttttttttttttgtatttttagtagagatggggtttcaccatgttggccaggttggtctcgaactcctgacctcaggtgatccgcccgcctcggcttcccaaaatgctgggattacaggcgtgagccaccgcaccctgcccaaaatgtttatgttttttgtttttgagacagggtctcagtgccgtcgcccaggctggagtgcagtggcgcaatctcagctcactgcagcctggacctcccgggctccagagtagctgggaccacaggtgcgcgccaccacacccggctaagtttttgtacttttagtagagacggggtttcgccatgttgcccaggctggtaccttttatgtttttaaagagtgttaaatgtgtattttttaaaaaatttattctggcagttgtttgttaaacgccaactattttccaggcactatgttaggttctacagatgcgttttggagtagtagactgatttattagctagttcaacaagtcgcttaacccttgtgtgctgaaaaatgtgctgattataggctaactagggacagttgaggaaggcttagaaattttttttttgttttggaaacggagtttcgctcttattgcccgggttggagtgcaatggcgcgatctcagctcactgcaacctccgactcccaggttcaagcgattctcctgcctcagcctcccgagtagctgggattacatgcatgcgccatcacgcccggctaattttttgtaattttagtagagacagggtttctctatgttggtcaggctggtctcgaactccagacttcaggcgatccacctgcctgcctcggcctcccaaagtgctgggattacaggcttgtgtcatcgtgcctggccggaaggcttagaaattttgccagtcgcttttaaacacaggcatttttgaaaattaagacatataaacctacagttaaataacttatattgaaaacaacggaatacatattcaacacgtcactttctaattattttactacacttttttttatatgtgcttttgagattatttaccaccgctgtatcagtacagcaaatactatctctttctcttcccaaatggtggtgttcagtttcctcaggttgatagattgaaaatccctcccaatgcgagtgtttacaccacaggaatcagcaaacactacaaatcaggggtttggggtttggagagcccattgataagcattaagcagcacacttcattaattaatgtatagtaagtgcttaaatattagcaataataatattaaatgtgcaaggaaatttcatatttgtgaagaaaaggaaacaggctggacgcagtggctcacgcctgtaatcccagcactttggaaggccgaagcagccggatcacttgaggtcaggagtttgaaaccagcctgcccaacatggtgaaacctcgtctctattaaaattacaaaaattagccaggcatggtggcctgtgcctgcagtcccagctactcaggaggctgaggcaagagaatcacttgaacctgggaggcggaggctacagcgagccaagatagcgccattgcactccagcctgggcgacagagccagactctgtctcaaaaaaagaaagagagagaagaaagaaaacgaaacagtgtatgactgagaataactgctggtgtaataataagggtggtaacactagacaaggtgatcagggaagactctagaaagaggtgatatttgagctgagacctaaaggatgagaaattaatcagagcctccaagcagaaggaacggactgagtggggaaagagcaaggtatgtttgaggatcagaaagaaaacaagtatggctcaagtggagagaatagaagaagctgtggatggagagacggggggcaatcaggtagggacctattggccatgcttgagaatttgggctttattcaaagtgcaatccatatgccattggagaattttaaaccagaaatgatgtgaacaggtgtacatttttcaaacatctctatattcccacaagccctctattgggtgttggggaatattgcagtgacaaaatggcaccatctgcctttgcccttatgtaacttggaaagcagttgaagagataaaatagttaaagaataacataagtaaaatcacaaaccataactccagcctgggcgacagagcaagactccgtctcaaaaaaaaaaaaaaaaaatcacaaaccttaatgagagaaagaaaagggggagtgggccaggcgcagtggctcacgcctgtaatctcagcactttgagaggccatggcgggaggattgcttgagcccaggagtttgagaccagcctgggcaacatggtgaaacctgtctctacagaaaacataagaattacccaggcatggtggcgcatgcctgtagtctcagctactgggaaggctgaggtgggagaatcacttgagcctgggaggttgaagctgcagcgagccaagatcacgccgctgctctcaggcctgtacgacaaagcaagaccttgcctcaaaaaaaaaaaaaaagaaaaaagaaaaaaaatggccgggcgcagtggctcacacctgtaatctcagcactttgggaggccgaggcaggcagatcacttgaggtcaggagttcgagaccagcctggccaacatggtgaaaccccgtctctactaaaaatacaaaaaatttagctgggcaaggtggcgggcacctgtaatcccagctacttgggaggctgagacaggagagtcacttcgacccgaggatcggcggttgcagtgagccgagattgcaccactgcactccagcctgggcgacagagcaagactgtctcaaaaaaaaagaaaaaagaaaaagaaaaaaatgggagtgggattctaaaagaatgcaaaaataaaccctggggctgatagctttctggaccagtgaaaggggtagggtctcctttgggggaggggatcatgaagaaattagaggggcactcatcctttgagcccctgctgtgtgccaagtagtgtaccatatgcttaacacacatgagcttatttagtctgcacagccttccttcttaaagatgtgggtttttgtatccccttttacataaaaggagatatatgtgttgcatcatcttacagtgaagtgtattacatcataaaaagtggaagtaattgtaacactaacctcatagtgaatattgagcaaggttatacaatgtaaaatgcttagcacatacccagtgctcagtaaaggttacttagctgttatattatttacatcattctaacagatgacttaaaaatttatcttagggtgaggattgtctttgggaaaaacagtgattagccattgtagacagatgtgacccaaaccagtggttctcaaaatgagtgtgcatgaagtatgaatacaactagtggttctcaataaaaaaacacaagacccaaatacagaagctagaattataaaactcataaaagaaaacataggagtaaacttttatgacctttaattaggcaatggtttcttagataacaacaccaaaagcacaggcaacaaaaggagaaataagtaaattgagctttgtcaaaattaaaaacttctgtgttccaaaggacaccatcaagaaatgaaaactgctgggcacggtggctcatgtctgtaatcccagcactttgggaggccgaggtgggcagatcacttgaggtcaggagtttgagaccatcctggccaacacggtgaaaccccgcctctactaaaaatataaaagttagccaggaatggtggcgggcacctgcaatcccagctatcgggaggctgagacgggagaattgcttgaacccaggagctaatgttgcattgagccgagatggtgccactgcactccagtctgggcaccagagcaggactctgtctcaaaaaaaaaaaaaaaatttaaagactgggcgcggtggctcacgcctgtaatcccagcactttggaaggccgaggccggtggatcacaaggtcaggagttcaagaccagcctggccaagatggtgaaacccccatctctattaaaaatacaaaagttagccagtcgcagtggcaggcacccgtaatcccagctacttgggaggctgaggtgggagaatcgcttcaacctggggggtggaggttgcggtgagctgagatcatgccactgtactctagcctgggcaacagagtgagactccatctcaaagaaaaaaaaatttaaaaaagagaaatgaaaactggctcaggcctgtagtcccagcactttgggaggctgaggtgggaggattacttgagcccaggagttcaagtccagcctgagcaacatgataagacccccatctctacaaaaaattaaaaaaaaaaaagccaggcacagtggttcacacctgtaatcccaacactttgagagaccaaggtgggtggattgcttgagctcaggatttggagaccaacctgggcaacatggcgaaactccatctctatttaaaaaaaagaaaaaataaatacaaaaatgagccaggcatgatggcatgcacctgtagtcccagctactcgggaggctgaggtgggaggactgcttgagcctaggaggcggaggttgcagtgagccaagattgtgccactgtactccagcctgagcaacagagtgagaccccttcaaaaaagaaaaaagaaaacccacagaatgggagaaaattatctgcaaattatatatttgagtagggacttatccagaatgtttaaagaactgttacaactcagtaataaaaagacagtaataaaagacaaatacccaaatggagaaaggaattgaatagacatatcaccaaagaagatacacaaatggccaataagcatgtaaaaagatgctcgacattattagttattagggaaatgcatatcaaaaccacaatgcgataccatttcaaactcaataggatagctataataaaagactgacagtagaccaggcgcgatggctcatgcctgtaatcctagcacttttgggaggccaaggcgggcagttcatttgaggtcaggagttcaagaccagcctggccaacatgttgaaaccccgtctctacaaaaaatacaaaaattagctaggcatggtagcacacgcctgtaagcccagctactaaggaggctgaggcaggagaattgcttgaacccagggggcagaggtttcagtgagccgagatcacaccactgcactccagcctgggtgacagagcaagactccatctcaaaaaataaaataaaaataaaactgacagtaacaagtgttgacaaggaagtggagaaattagagcttttatacatggcaggtgggaacataaaatattgtatccactttggaaaacaggttggtatttcatcaagatgttaaacagaattgccttatgacccaccaactcaacacctagctatatatctgagagaaatgtaaacgtatgtccacaaaaaaaattatgcacaaatgttcatagctcattcataaaaccaagaagtggaaataacccaaatgaatggataagcaagatgtggtatacctacaatggaatataactggacaataaaaaaaaatgaagtagttatccatgctgcaacatagatgaaccttgaagacattatgctaaatgaaataagccagtcacaaaagaccacatgctatgtaattccatttatattaaatgtccatgggtgggcgtggtggcgcatgcctgtaatcccagcactttgagaaactgaggcgggaggattgcttgagccccaaagtttgataccagcctgagcaatataggggagactccgtctctataaaaaagtaaaacatggccaggtgcggtggctcacccctataatcccagcactttgggaggccaaggtgggtgcgtcacctgaggtcaggagttcgagaccagcctgaccaacatggcaaagcctcatctctactaaaaatacaaaaattagccgggtgtggtggcatgtgcctgtaatcccagctactcaggagactgaggcgggagaatcactttgaacccaggagacagaggttgcagtgagcgagactacgccactgcactccagcctgggcaacagagcaagaatccacctcaaaaaaaaaaaaaaaaaaaaaaaagtaaaacattagccaggaatggtggcaggcacctgtggtcctagctactcaggaggctgagacaggaggatcacttgagcctaggaggtagaggctgcagtgagccgtgtttgtggccactgccctctagcctgggtgacagtgagactcttcctcaaaaaatattaaaaaagagagaaatgtccagaagagtcaaatttatagaggcagaaagtagattagtgcttgcctagggctgggggtggtgactgggggagtagggaatgggaaatgactgccaataggtacggagtttcagctgggtgcggtggctcatgcctgtaatcccagcactttgggaggctgagggcgggggtggatcacctgaggtcaggagttcaagaccagcctgaccaacatggagaaacgctatctctactaaaaatacaaaattatctgggtgtggtggcgcatgcctgtaatcccagctacttgggaagctgaggcaggagaattgcttcaacccgggaggcagaagttgcggtgagctgagatcacgccatttgtactgcagcctggacaacaagagtgaaacctcatcttaaaaaaaaaaattagtaagcatcagaatcacgggggagatgtattttttattttatttatttttatttttcataaatagagatgggatcttgctatgttgcccaggctggtcttgaacgcctgggctcaagcgatcctcctgcctcagtctcccaaagtgctgggattactggcatgaccagcctagatttttgaagtgtaaattttctagttctgacctagagactaggcctggtgtggagcccaggaatctacattcttaatctctccaggtaattctaatgtttgtgattcagaagccataccttgggaaacaaaaaaataaccctgaaggcgtaggtgtccagtagcttacacaaaaaaagatgaatatagtaatgataactagcaaatattgagtgcttactaggtgctaagtactgttttaagtgctttacacatattatctcatttagtacatgtaccgttacaagtgctatctattatttctccatcaccaatgaggaaacagaggcacaaagaggtttagtaacttgcctaaggtcacatggctagtaagtggcagaaccaggatctgtctgttagctctagatactgtggtcaagctgctctgcctgagaaaatgagaagaatttgggttgtgttggattgggttgtgttgggttgggttgcgttgggttgggttgggttgtgttgggttggattggggtgctttcttgttgtagctgagaaggaagggtagggaatagaaaggaaggagataataaaggagcaatcatggtgttttgttttgtttttttcctgtgacaccagagattcctgtgatatgtgggttacctagagaggaagaaattgaggtgctaagatactaagtaaccactggaatgagtgaattgcaatcagtttttaatgaccttgcatctttccattcaagaatcagcattcttggaaaaagcgcaagattgattaagattaggtcttgtgcccaatcttaatcagccagaaaagtgtatctgtgagaagtcagatgatgaatttaccatattcgcctgaggacagcacaccctaaaggcaattggatgaagtcagttcgaggaaggcgaaagggtacagtcctgtgctgcataaagacattttggtcaacgttggactgcatataccacagtggtcccctacgattatagtggagctgaaaaattcctcttgcctactgatgttgtagccatcataacatcgtggcttaatttgttatcttttctatgtttccatatgtttagatacacaaatacttaccactgtgttacaattgcctgtagtatccagtatagtaacatgctgtacaggtttgtggcctgcaagcaataggctataccatatagcttaggtgcgtagtaggctttaccatctaggtttgtgaacctgctaataataatagtgatgacaaagacagacccaggcctccctgtactgtggtttatagtctagcagggagtcatacaaaatagaagtaagcaaacaaaataattagggactgtgaccacaccaaaataagtagggattgtgagggcaaaagaccaggaagaatgataatgaataatggaggacctactgtatattggatggtcaagaaaagcctttctgaagaggtgatatttcagctgacacccaaaggatgggaaggagccattgatgtaaagagttggcagtggtatgtattggaaggaggggatggaggttacaaacagcttgtaatgagggaggccaatgtagtcggagtgatacgagcaagatgtgagactggagaagcaggcaagggccagatggccttggtggactatggtgctaagttggatttttattctaagagaaatgggaagtgcacggaagggtttcaagttgagttggaacataatcatcatttaaagtttaaaaatatgcctctggccaggcacggtggctcacgcctgtaatcccagcactttgggaggcccaggtgggtagatcacgaggtcaggagttcaagaccagcctggccaacatggtgaaacaccatctctactaaaaatacaaaaattagccgggcatggtggcaggcgcctgcaatcccagctacttgggaggctgaggcaggagaatcgcttgaaactggaaggtggaggttgcagtgagccaaaatcacgccactgcactctagcctgggtaaacagtgtgaaactctgtctcaaaaaaaaaaaaaaaaagaaaagaaaagaaaagaaaatatgcctctaaggctgggcatggtgattcatgcctgtagtcacagcactttgggaggctgaggcaggaggattgcttcagcccaggagtttgagaccagcctggccaacatttcaaaaccacatctctaccaaaaaaaaaaaaacaaaacaaaaaaaaaaaactagccaggtgtggtggtgcacacctgtggtcccagctacttgggaggcttaagtgggaggatcacttgagcctggagggtcgaggctgcagtgagccatgatcgtgccacactgtactccagcctgggcgacagagtgagaccctgtctcaaaaaaaatttttaaaaagacacagcaaaggcctgatctgtgtgactgcggattttttaccagaagacaataaactacataaaaatttaaaaacaaacagtaacaaccacgtgggtgggtgtggaagtcagtagcatgtacgaaaaggtcattaaaggcttctttgaggtcgcaaaagtaaaaagggcctgatccagttcattgtacagattgggaaaaataaagcccagaggagcagtgccaggcccaggatcacacagcaagtcaatagtggcacttggcccagaaaccagggttctcactatcggccttttatactaacggcctcctggtcctgggctggagtctcccgtgaggcccactgggagacccatataccagctccctcctcaatctgagacccaagtattgtaagggcccaaaagaaggatttggatttacataacgccctgaggacagatttctgaaacccttccttcctgtcccctactcacaaatacccactattgtaaaagctatcctgtagcaacaagaccaaaatgtaaacttggcctaaaactggaaagctgtagataggctcttgcacctccaactttctttctctgaatccctctcactccccaggagccacactccctacaactgtgcatccaggcctctcatccccatcccccaaatatacacacatttctctgctctgagaaaggagataggtttgcttgttgcttcctggtatccattccccctttccctgacatccattagaaactcaaagatggctgggcacagtggctcatgcctgtaatcccagcactttgggaggccgaggtgggcggatcatgaggtcaagagatggagaccatcctgccaacatggtgaaaccctgtctctactaaaaatacaaaaattagctgggcgtggtggcatgcgcctgtagtcccagctactcgggaggctgaggcaggaaaatttcttgaatccgggaggtggaggttgcagtgggccgagattgtgccactgcactccagcctggcgacagagcgagactccgcctcaaacaaaaaaaaaaaggggaactcaaagatttgctgaatgaatgaatgaatgtgcaaatgaatgaatgaatgaatatctctaattcctttcttaaaactcttcattggctttccattgcacttaatttaagaaccataattctgaggccgggcacggtggctcacgcctgtaatcccagcactttgggaggctgaggcgggtggatcgcttgaggtcaggagttcaagatcaggctcagggcttagacatcccaatgataactgagactttgagctttgactcagagggaagcacaagggcgagttccagatgacaccctaaggctcatcttagggtggaagtctaaagtggtacagcactttgggagagtaacttgacagcatctgttaaatttgaaatgtacatacctatcaatcttgcagttgacttctctgaaaactattctgtatatccaaggatagtcactgtagcattcattgtggcagctaacatggtgaagccctgtctctactgaaaatacaaaaattagctgggcctggtggcatgcttgcaatcctagctactcgggaggctgaggcatgagaatcacttgaacccaggaggcacaggttgcagtgagctgagatcgtgccactgtactccagcctgggtgacagagcgagactctgtctcaaaagaaacaaaaagaaagcatatactccaagcattatctattacagttgccttagtcatttacttcacactcctacgggcctcagaatactttgcaacaatctttactatctccgacggagtgtacagctcaacattctttatagccacagggttttatagacttcacatcatcattggctcaactttcctgctgccttctacgccaactaccatttcactttattcaccgttttggatttgaagctgctgcttgatactgacattttgtagatgtagtatggctatgccggtacgtttctgcctattgaagaagatcatgttcttttagtattaaacagtacagttgacttccaatcaattagtttatatataggaatcttgtgtagcctgcagtggggttgtggggagcaaggcagaagcagccactccagagaggatttacatttatttcttccaggcatctgagagatcatttcagagtgggtcgctttttatattaatttctcagcttcgagattcccagccatgcaggtgatgcaaatgtgaacgccagactcatggagggtaggcatgtggtttcaaattctcaggagattattttccctcttacccaaagaccaggtcaagatggacacatcctttttgtctcccttcgctagtaggtgttggtttttcccctagtttgttctttcactgtgggtgtagcccttcaagggtcctagatttatcaagggtctcagttgcaacctctaatttcatataagcccaaagcttcaactccccaaatgtttctttaaaaacacaagctattgcagattcagttgtgccttttaaaggatgtttgttgtttttatttccagcatctccttgggttgtgtagcaggaagttcctgatattgtcagaaaaggaagtccaactcagtatttagtacaactgtctgtttacttgtctattttctccatgagtgtcaagctctgggaggtcaggaactaaggctgactcatctctgggacaaaacaccaggcccaagatctggcacaaagtaaatgctcagtgcgtttgttgatactgaacctccacttggtcacttctaatgatggggagctcactttctcccaaggtggcctctttcctttagagagggtgtgtgacctgagtgaccaccgggctaatgggggacagcctgcccctcatttatgtacaaccttcccaatacttagcttgtccatccagattctgcagaagggggctcaaggcctagacatcccagtaataactgagactttgagctttgactcagagggaagcacacgggccagttccagatgacaccctaaggctcatcttagggtggaagtctaaagtggtacagcattttgggagagtaatttgacagcatctgttaaatttgaaatgtacatacctatcaatcttgcagttcacttctctgaaactattctgtatatccaaggatagtcactgtagcattatttgtggcagcaaacaattgaaaaccacccaaatgtctgtcaataagaataactaaataaattctctaaagtcaagtcatacagtggaaaactgtgagccttttatttttgtttttttgagacagggtctcactctgttgcccagactagactgcagtggcgccatcacggcttactgcagcttcaaccttctgggctcaaaggatcttcccaccttagcctcccaagtagctgggactacaggtgcacactaccacacttggctaattactttttatttttgtagagatgaggtctcactatattgcccaggctggtctcaaactcctgggctcaagagatcctccaacctaggcctcccaaagtgttgggattacatgcgtgagccaccacacctggcctatgtttttttttggtttttttttttgagatggagtctcgctcttgtcacccaggctggagtgctgtggcgcgattccggctcattgcaatctctgcctcccgggttcaagtgattctcctgcctcagcctcctgagtagctgggattgcaggcgcctgccaccacgcccagctaatttttttacttttagtagagatggggtttcgctatgttggccagtcttgtctcaaactcctgacttcaggtgatccagctgcctcagcctcccaaagtgctgggattacaggtgtgagccactatgcccggcatgttttttttttttaataaggtagatctatgtatattgacataagtggaattccaagacatgttgctgtgagtctgtaagacagagtgtataatatcaagaaaacagacaaacctataagcagtgtaaattggtacatcatggaggctatttggtaatatcagtcaccttttttttttttttttttgagatggagtcttgctctgtcacccaggctggagtgcagtggcgtgatcttggctcactttaacctccactcccgggttcaagcaattctcctgcctcagcctcccgagtagctgggaatataggtgtgtgccaccacggccagctaatttttgtatttttaatagagaaggggtttcgccatgttggccaggctggtcatgaactcctgacctcaggtgatccatctgccttggcctcccaaagtgctgggattataggtgtgagtcaccgtgcccagcctaagtcaacttttaaaatgctatttaaacttttaaaataacctcaactgactaatccccactaatagatatttatattacaaataaatatgcaaaataatgggtaaaaatattaattgccacattgtaataacaaaatattggaaacaaactttttctccttatgagactggatatatagagtgcatctatttgatgggatactatgcaggtttgaaatagaatgaggctgctctccatatcgatatggaaaggtctgcaagatagagtatgaagtgatgaaaaaacaaggtgcagaatagtgtctctatgtttatgaaaaatacatgtattatatgttggattttattattttattattaattttttgagacagcatctcacatctcactctgtcacccaggctggagtgcagtggtgcaatcatggctcactgcagcctcaacctcctgggctcaagcaatcctcccacctgagcctcctgagtagctgggaccacagggctacaccaccacgcccagctaatttttgtatgttttgtaacaacagggtttcaccatgttgcccaggctggtcttgaactcctgggctcaagtgatgctctcgcttcagcctcccaaagtgctaggattacaggcatgagccaacatgctcactctgcattggatttgaaatgcatagaattcctctggaaggaatcacagggaactggaattggttacctccaggaaggagaccaataattgggaactgggaagggaaggacacctgcaaacgctgtactccctattgaagctttgtaattttgaactatttccttacaattaagtaaggaagtaaaaaatgttaaaccataattgtaaaactggaagcaaaacaagctgtacaaaacactttctatatgtacatacacatgttgtgtagaaaaagaaaagaaggatacacttcagactggtggcagtggcagaagttttctgggactggataacaaagggtggtcaagggtgaccttgactttatctttttgttgttgttggggttttttgtttgtttgtccgttttgagacggggtcttgctctgtctccaggctggagtgcagtggcagaatctcggctcactgcaacctccgcttcccaggttcaagcgattcccctacctcagcctcccaagtagctgggactacaggcgtgtgccactaagcccggctaaattttttcattttagtagagatagagtttcaccatgttggccaggatggtcttgatctcctgacctcctgatccacccgcctcagcctcccaaagtgctgggattacaggcgtgagccaccgcgcccggcctgttgttgttgttgttgttgttgttgttttttaacatacagggtcttgctttgctttttttgtttgtttgctttggggttttgtgtttgtttgttttggagttttttgtttatttgttttgagatgtcatccaggctgcagtacagtggtgcaatcatggctcactgcagcctgaaccttccaggctccagcaatcctcctacctcagcctctggaatagctgggactacaaatgcatgtcatcacatgtcgcttttatttttatttttattttttgtagagacaggggtctcatcatgttgctcaggctggtcttgaattcctgggctcaagcagtcttcctgcctcagcctcccatagagctgggatcacaggtatgaaccaccatgcctagccttgcttagatttttatataatctttctgttaattgttactttttttttttgagatggcgtctagctctgttgcccaggctggagtgcagtggcacgatctcggctcgttgcaacctctgcctcctgggttcaagtgattctcctgcctcagcctcccgagtagctgagatcacaggcacctgccactacacccagctaatatttgtatttttagtagagatggggttttgccatgttggccaggcagctggctggtttcaaactcctgacctcaagtgatttgcccacctcggcctcccaaactgctgggattacaggcgtgagccacagtgcccagcctgttacatcatttaaaatccattttaatctttaaaagtaggcttcaggtggatggaacacaaccacagcctggcaaaggaatgaggctgactctcctccttctgagggaagtattcatgttgtgctctttgtcccactgccttccccaaggacagcctggctcagtggaggcaccggggctactcctggcatcattccagagagcctctcttgtcacctcttacccacttggctccctgtcaccagtgttctgggctgggctgagaagcagcacagattaactattgggttgtatctccagaagccccatcgatgtcaggttgggcagagccagcccaggaaacatggaacatctgcctctggcctctcacctctttgttctcctacgaagcccggcttttttttctttttttgagacggagtctgctctgtcacccaggctggagtgcagtggcgcggtctcagctcactgcaagctccgcctcccaggttcaccccattctcctgcttcagcctcccgagtagctgggactacaggcgcccgccaccatgcccagctaattttttgtatttttagtagagatggggtttcactgtgttagccaggctggtctcgatctcctgacctcgtgatccacccgcctcagcctcccaaagtgctgggattacaggtgtgagccaccgtgcccggcttgccctttttttttttttttatagattttggcagttacttggaatattctttccctttgatactccactacctttttcctcataccccaatttatatttctgtctcatctcattcagtggagaggaggcatctgaaaaacccatcaactagatgtgcagggatttaatgttcctacattaattgtattttaggaggcatctaaaaaggacgatgcttaactatgaggaaacacacaataatgatggaattcctagcaccggtggagaagagatcctgaggcagaaaggccttgctatcactcttcagtcatgttgataggcaatgctacaaagggcttaagaacgtggcactgaggctgggcactgtggctcatgcctgtaatcctaacactttgggaggcccaggcaggaggattgcttgagcccaggagctcaagaccaacataggcaatatagggagaccccgtctctatacacaacaacagcaacaaaaattagacaggcatggtggtgcatgcatgtagtcccagctaatggggaggcagaggtggaaggattgcttgagcccaggaggttgaggcttcagtgagctgtgattgcaccaccgcactccagcctgggcaacagagtgagacctcatcttaaaaaaaaaaaaaaaaggccaggcccagtggctcacgcctgtaatcccagcactttgggaggccaatgtgggcagatcacaaggtcaggagattgagaccatcctggctaacatggtgaaaccccgtctctactaaaaatacaaaaaaattagctgggtgtggcggcgtgcacctgtagtcccagctgctgcagaggctgagacaggagaatggcatgaacccagggccaagaccgcaccactgcactccagcctgggtgacagagcaggactccgtctcaaaaaaaaaaaaaaaaaaaagaatgtgggcactggagccaggctgcaggctgacagattcgtatctgtcacttagcagctgttgaacctttgacaaataacctgtctgtgcctcagtttccaaatctgcaagatggagataagagtagctcctttataggactgttgtgaggctgtaatgagatattacatgaaaagcctgtagtcccagctactcaagaggctgaggctggagtaccacttgagcccaggagttcaagtccagcctgggcaacatagtgagaccctcatctctaattaaagaaaaaaaaagagatttaatctctctgtaatccccatcactttgggagtctgagacaattggatctctggagcctgggagtttgagaccagcctgggcaacatggtgaaaccccatctctactaaaaatacaaaaattagccgggcatggtggcttatgcccatagtcccatatactcagcaggctgaggaacaaagaattgctcgggcccaggaggcagaggttgcagtgagccgagattgcacttgggtaacacagcaagactctttctcaaaaaaaaaaaaaaaaaaaaaaaaaaaaatcggccgggcgcggtggctcacacctgtaatcccagcactttgggaggccgaggcaggcggatcacgaggtcaggagattgagaccatcctggctaacatggtgaaaccccgtttctactaaaaatgccaaaaaaaattagcaggtcgtggtggcggccggcgcctgcagtcccagctactccggaggctgaggcagaatggcgtgaacccgagaggcggagcttgcagtgagccgagatcgcgccactgcactccagcctgggcgacagagcgagactccgtctcaaaaaaaaaaaaaaaaaaaatcaaagggcctccgatctatgccaaccactccttaagatccctttggttctcaccaatctctcatatcccaccactgcctttcagtggccttcactcaccaaacctgttactcttcatcaaaaactgtacccctaggccctttccctcaggcctcgctttttttctttttttcctctcacctctccatcctgtccctgttaccctgttatctcagttccatatctcaaaagcctagaaaggcagacaagacagagctctccttaaaaagtgatgggcaggccagctgtggtggcttacgcctataatcctagcactttgggagatcaaggcaggaagatcacttgagaccaggaattgggcaacatagtgagacgcggtctgtacacaaaattttaaaaattagctgggcatggaggtgtgtgctgtagtcccagctactcaggaggctgaggcaggaagattgcttgagcccaggagttcgaggctgcagtgagccacgattacaccactgcactctagcctgggtgtcagagaccccatctctaaaaaataaaaaaagtgaaggccaggtgcagtggctcacacccgtaatcccagcacttcaggaggccaaagtgggaggactgcttgagcccaggaattcaagaccagcctgagcaacaaagagagagagagagagagagagagagagagagagagagagagagagagaaaggaagggagggagggggagagagagagagagagaaagaaaaataaattagccaggcatggtggcacaggcttggataattttttaaaaactatttgtatagaaggggtcccactatgttgtccaggctggtcttgaattcctggcctcaaacaatcctcctaccttgacttcccaaagttctgggattacaggcgtgaagcctgcgtgtatcgattttctattgctgtgtaacaaacaaaacctccacagacctaggggctcatgacagcacctgtttattagctcacaattctctaagtcagaagtctaggcacatctgggttctctgcttgggatcccacaagtctgaaatcaaggtgttggccaggtgtgtcctcatatggaggcttgactagagaaagatcaacttccaagctccctctggatgttggaagaattcattttcttgtgaccatattagcaaggccctgttttctcactttctgttggcaggggaccactctcaactctcagcttgtagaggtccctcttgggtcctcctcttgtggccctctccacacatagcatttggtccttcatgggagcaccagctgctggaaaaaatgattctgttaggtaaaaatactatacatttttgaaacatgcaccaattatttagctctgtgattgtgggcaatttcttcaagcagcctgagcctcaatttccttatttgtaaagctgggaaaacaacgatgcccatcttggagggttacaggcacatagaaaaacaatcaataaatataagctgctgtttacatttgttctttttttaaaaatttttaaattttatttatttatttattttgagacagagtcttgctctgtcatccaggctggagtgcagtggcgtgatctcggctcactacaacctctgcctcccaggttcaagtgattgtcctgcctcagcctcccaagtagctgggattacaggtgcacaccaccacgcccagctaatttttgtgtttttagtagagacgggttttcaccatgttggccaggctagtctcgaactcctgaccccagggcatccactgcctcccaaagtgctgggattccaggtttgagccaccacaccaagcctacattagttctaacgaatagacagggtctagacacagtgagattagatgagtgagggacagggttccctacatggagaaaactgcaagagccaaatcttggaagcaggaaagctggtggtttatttgtgaagggtgtgtgtgtgcgtgtgtacagagaacgctgaaagagtaggtgaacacagttttgcttatccctccagtcagaatttactggatgcttactgtgtacccagtaccatgaaagggtgcccggccagcagtgtgaattcagcctggaagtgggagggagccaaggaagagctctgagttggagagggaagtggtctaagcttcgggaaatttatctgctcctagtagagtggttgactcagcaggagagaacccccttctcttctgcaccctctcctccctagcctcaaagcctgctaaggacccagttcccaagcagagacccaggagggagttgcagaatctggccctgtctggacaagacagacagggtgcgactccagatgccagttcctttctttctgctcctgaatggccccaaagctatcccttctcaccacaatggtcaaggagggatacagcaatttctcttttaaatgttacacatagggctgggcacggtggcctctaatcccagcacttcaggaggccgaggtaggaggattgcttgagcccaggagttggagaccagcctgggcaacataggaagacccctgtctctaaaaaaaaaattagaaaaataaagttctaaatgtgggaaatcatgctgggcactcaactacagcagctcacttgggtacttgtccacactcacaaatatagccctgggaccccaaagtcactgtcccaccctcacaccatgggcagatggactcaaactaagccaggcttttggctttctgccacttgcctcttctctctgaagtgaatcctgtcctgatcatcacctccttgctgacagggccattaagcgcagttcacacaaacaaaccacgatgccttgaggttgagactgggaggtatgttaagggagcatggagccagccattctgcagatggggaaactgaggcaaagaaaaaggaagtgacttgcccaggctcaggcagtgagcccaggacagaccaagactgaaatctgacaatcagcccagggtttatacacacacacacacacacacacacacacacacaccccacaatttgagttacgctcaaattcagacatcgtgggttgaacaacaaagctttttttttttttttttttttttttttttgccagagtcttgctctgttgcccaggctggagtgcagtggtgcgatctcagcttactgcaacctccacctcttgggttcaagtgattcgcctgcctcagcctcccgagtagctgggattaaaagcacctgccatcactcctggctaatttttgtatttttagtttcaccatgttggccaagctggtcttgaactcctgagctcaagttgtgtgccggccttagcctcccaaagtgctggcattacaggtgtaagccaccacacctgggccacaacaaagctttttgaatagaagttcttggaatatggcctcttgttaatgtgtaggcccatctgttgggggaatttggggattatgcctgctctagctggctttaccaattaaatgttttcccctctctgtctcagttttttcaccggtaagataggaagaatttattatctatgtcagagggattcctctcagcctcactctctatctcaggtcggggggcaggggagggtggggaaggaaaggagtggtgggccagtcctccagctaagcacacagactggcccatacctgcaagtacacacaaggtcccttgagcgacacacccaggctgacacatcactttaagggggcacggaggggggcaggcagtgggagtggcaagccagtggggagcccccaggtgagggcaagcccgaggaatagaagggtggcctctttttttttatttttgtttttgagatggagtcttgctctgttgcacaggctggagttcagtggcgtgatctctgctcactggcaacctctgccgcccggattcaagcaattctcctgcctcagcctcccaagtagctgggaccacaagtgcatgccaccacgcctggctagttttttggtattttttagtagagacagggtttcactatgttggccaggctggtctcgaactcctgacctcaggtgatctgcctggctcggcctcccaaagtgctgggattataggcgtgagccactgcgcccggcctgaagggtggcctcttgacctccagtcctgcagcccatgaaattgggcaggtactcacacctgggcatgggttagatgggcgtgggtccctagtaactctgagtatgagctcatgtgcatgtgtgtatatgtttatatatggatgccttcattgtatgcacagatacccatgattatccatgtgtgtgcataggaatggcaccctctgtctgattggaaatgagactccagagttaccccagcatgatgttcactgccttttttttttttttttttttttttttttgagacagtgtctccctatgttgcctaggctgaagtgcaaccacccaggctcaattgatcctcccacctcagcctcctgagtagctgggtcttcaggtgcaggccaccacacctagctaatttttgtatttttaatagagacaggattttgccatgttggccaggctggtatcgaactcctgggcttaagcaatcctcctgccttggcctcccaaagtgctatgattactggcctgcactgccgcgcccagctctgctgcctctttttacagcctgccggcccagaccagagtctcagaatactaagcccactttctggggccagggtcagtagatagctttgctgctgtatgattctaagcaagtatcttgacctgcatgtgtctcagtgcacctcagtttcctcacctataaaatgaggggtttggatgagttgaggtctgaagcctcctccagcccaggtaataaatctttgtagtggacaggaggaataggtcctaggggtttcaggaggggacttccatgggtacctctgactctacagagaaatggaagactgagatctgacttagcagcctagaaagacttagcagcctagaaatggggttcagctaattctgggaacagagtccggtcacttaaggtaccagagtgtagccaagagcccccttttctgggcttggggaaccagaaccatgtgttcaacagaccattgcctgtacacagggtagagagtgcaggtgtatactcctgaaccagccacccttcttttttttttttttttttttttgagatggagtctcactctgtcgcccaggctggagtgcagtggcacgatctctgctcactgcaagctccgcctccccggttcacgccattctcctgcctcagcctcccgagtagctgggactacaggcgcccgccaccacgcctggctaattttttgtatttttagtagaggcggggtttcaccgtgttagccagaatggtttcaatctcctgacctcgtgatccgcccgcctcagcctcccaaagtgctgggattacaggcgtgagccaccgtgcccagcccccagccacccttcttaagcttcaagctataactactgagcctgtgatgaaagtctactctatgccagacccccacaagctgggtgcgggcagtatagggacaaagactctgcccttgggatgccaaccatccacttgagaagacacatacacatacaatgagtcatcatcacttactgtttatggacaaataaacgtccatcaaggtagccatcaactcgtgggtagggacaaggaaggctacctagaggaagaaagggtgagtagaatctctccctctctctctcttttttaagagacagggtctggctctgtcatccaagctggaatgcagtggcttgatcatagctcattgtaacctaaacccaagtgatcttcttatttcagcctccctaagcagctgggactacaggtgcatggcatctggctaattttctcattttttgcagataagtggtctcgctatattggccaggctggtctcaaactcctggccccaagcaatcctcctgccttggcctcccaaagtgctgggattatggctgtgagccaccacacctggccaagtagaatcttgaagacaggaaagatctggatttcagaaagttctgaagaaggcattccaggcaggggaaacagcttgagcaaaagggtggaggtgggagagtgctgtagagtcaacaaggagtttgactttagcacaagatgcgtgtaggagaaggggaggtgaagctggagagaactggggccggagcatggggggcatgagttctgtgttaggagtgtggggctttaggagccacatcaggttttagaacaaacaagtggcttgacaggagagacgtgttagggattatttaattaaagtcagcaagtaggtctgaaagggtatgaggttagcaggaagtggctgtgatgggcagaggctcagagttgcatggaatgaggacactttgggtataacactccaagggccacaatgccactcccctctccacccctcagccttgggttatttttttctggcttcttcccctgtcgctagggttaaggagtcccttgggggtttcagatgaggctgggatagagttttatcactagagtgccgggcacggtggctcacgcctgtaatcccagcactttgggaggccgaggcaggcagatcacaaggtcaggagaccgagaccatcctggctaacactaaacatacaaaaatacaaaaaatacaaaaaattagccgggcgtggtagcgggcgcctgtagtcccagctactcgggaggctgaggcaggagaatggcgtgaacccggaaggcggagcttgcagtgagccgagatcgtgccactgcactgcagcctgggcaacaagagcgagactccgtctcaaaaaaaaaaaaaaagttttatcactagatcattaacctctggcctaggtcacctccggcctccttttgggctaggtgggcagttctcggaccctcccccaccagccctgctctgctgacctagaacctctggccctggagattctgatatgtgtatttgtggtctcttctcgggcatctcccaggccactgggagagctggggcctagagcgtggggtgggtggaatcctgagggcagagagtgtggaagaatcttacaatggcagctctagagggaagcctggatatgtttgtttgacaaactgagacccagagaggtaacatgacttgaggtcacacagcaagtctagggcacagtcaggactgaaagccaggactctggggaggctaaagcgccctgaggtttagaccatctggttcatgtagagaatggagagggtcagggctgggagctatgggttcaaatcctggctctgccattgactgtacttttgtgacctaagaaagtcacttgagctctctgagtctgtttcctcaactgttaaacgggacaatatctaccttttgggttgttgtgaagataaaaaaacacacccatagcacaggtcgtggcacacagtaagtgtgccaatacatgtcagctagtggtatggtggtgcaatagtaggtgcctaataaatgttgaatgcattgttgaacatgagttcacacgctaacagtgagattgtgagactcagctttcccacgtgtaaatcaggactcataatcagtccctgtcctgccacttctttacagccccggtagcaacatagattaaataaggtatgtaaacgttcaagcgcggagccgtctcaggtcaatgtttactcagcccagggcaattcctctccaagtcctactctgcgaaatttcacgtcagcttcactaacttctctacattcccagatgctccccgggaaccgggggttggggatgtccctcttttctcaagcccgccgagctgaggaaaaacggggtgggaaagcagagtgtgtaaggctgaggaggtgagccagaggggggagggagagcaggaataagggcagtggggagaatgcaggtgcacggacgtggtgtgggtcgagaacagggtccgcatcgggggacttggatataggatgcagtgaaaggatttggggagcagtgggagaggtgagggcgctgcgatccgggaagaatcaggaaaataaggagccggtaggagggagtggagatcctcctcgcggagagctcgccgcggcgcagggctcccagctccccgcagctgcctccccgaacactcaccctcccggttccgagaacgtttcccggcccgagcgcccggcccgcaaaccgggaggggaggggaggggaggggcagggggggatccgcagcccgggattggccgccgccccgccagccggtgacgcgaggcgggcgggcccctttgtgacgtcacaatcagctgtttgaacgttccaatttgtgccgtgagccccgccgcagcggccgcacagactcaaagccccgcgggcgagctcagcagcccggagcgaccgcggccccgccgcctcccccgcgagtcccggcgatgcggcccggcctgtgagcggccggcgaccctgggacgccccgccgcacaactacctcaacgccgtgccgcccccctcccgcccccaggtgagtcccgacccgggtgggcctgggggctcccctgccacggacacgccctgcgccccccgcgcccgggcctttgtctgtctccgccggcggccgccggggccgcgttcccggctcccgattggttgccgcacgcccggtagaccatgacgtcgttctatttgcatatgacattgagacgtcaccaaggccggtaccgcccccacaggctcgggtcgcttgtcctcccgtgacccggtagccgctgtgtcggggctgggccctgggtgagacgctgcaatccaaagggggctgcagggggatcggcgatttcctaggcttatccaggggctggggtcaggcctctgatcccctactttctctttgcaacctgagaaggagtcagacggcgctgctgggcctaggttgagggggtcgtcaggagttcagggctgcatgggactccaggtggttgggacagcaccagatggtggtgggatcccctccctccggctccagactccgcccccagggactaacagaataacatcctcctaatccctgatttgtgtgcagcgccttagctgatgtcactcctagacccaaaatgaagggtcttagaccccagtgcatggaaggggcaacaggcccagagaggaggattagctctctcgaggtcacataaccaattagagtcatgctcactgagtgacagatggattattagccaggggcaaagacataataggggctcagtacaagtggtaagatacacatcctccttccactggggacccgatcttgggctcagccttatcacggtttgataggctcctaggtgtccttactcctggacccttttccagggaatctctggagattggttcaccttttgtggtcctgaccccttctgtcctcactgtaccttgaagtcctagagtccaataaaatcgctgcctcccagctgtttggatcacagagaggtgagtcattggctgcctcggggtgtctccagggctgatgttggggtggagggtggggtgagggttccctctattggccctttaccttcccaacttcctaggtcgtcagctaggaagggcctgacctggcctagtgcagacaattgcaggtgttttgctgctccctcgtcacctctgcccacagagagtataggagaagggataggataaggagagtttctgacttaacaagtggatgggcctagaggctgaaccaggaactccattcctgctgggagtttgctcaaggatgggctgggggtaggggtggcttagggcacaaatgctattctgggcagagctgctgtagttattaaagggaatggttctccctggagcagaactgggaatgtgagaaccaggaagctggcagggctgggaaaggaaatctgggaggctccccaagtggtcaggagagggggcaggcactggctggctggtgactgctttcactcctggctgtcactgacttgctgtgtgacctcaggcagggagcttttcccctgagcctccctcccctaaacctatctgaaatttggggaggcacagtgcaggctctggtacacagtgggtcttcagtaaatgcatgctaaatcttggtgccagtaaccccagacccttttgtagctaggcgaggggtggtgtggctaggtcaaggtctttttcacctccctgtacccctgcatcattgtattcttggggattgtttgctgagtctttcctgactgtgtacactctggactggatgcacagtaacgtgggactaggtctgccctgccactatctagccatgtatttttggatagatttatgtcttctttctgatcatcagattttaaaatgggctgggtgaatatgatggtccctgaaacagctcttaacttctctttcatattccatgaattagtaggttcttggaaggaggatgtgcctcatcaaggcctcgatattcccttccttcaagaggggccaaactttctgggcttttggtaatggagtcactagctccctgtggctacatatgggttgggatacatgaattgtgctgggtggacactagttgggggtggccccaccttcttaatccctgtagatctcccacccccatcccaccagagaagccagcatcttaagcctactgtgagtctgcagatgtggaaatattctcagggtatggaagtgaggtgattctgcagcaagtgtgaaaacatttctagggaatgggggaggtagcaataagcatggcaatactgcaggtggattagcagaaagaggagaaatgccttcagggaagtctggacatgcccccaggaagttctacaggaagtgtggaaacacccttagagaatggtgacaagtgtctcagcagcaaaaccgttgagcatctttagggaacaggtgtggagagtcagtcaggcttcaggtactgggggagtatggccagcagcccccagccaagctctagtcctgaggtaggctggcatggggagggggtagatctagagctaccaccttggtgtttccatttctgcagtagggggcctccctcttcatcttcacccagggaaggattggttaagggcttacctcggtctgggtccaaccctcagtgctcatccttaagggctcctgggaactgacagctccctcccttcatcatcacctcccactgacctgctgtctcactgagcccaagcaacctgatcttcctcctacccctggatgctgcccttgaacaggagcctgggaaaagggggtcagaggggggagggcctgccggcatgccatctttacacttcatatgacagacacaaccgaggtgtgccaaatcacatggtaagatggtagcagttctatgggatttctgctggccagtgcttttcaaaccacacaggctccaggagtggttcttaatctctggggtcaaagattgctgtttaggaaatcatgatgaaaaccaaggtcctttttcccagaaaaatacacatggaccatgacccctggccaccaaattgaaaatatcaaattcagacagacacccagaaaaggcaatagaatatagtgattctgggtgctgcctctggaatctgattgtgtggattcaatcccacctttgtctcctactagctctgagactttgggacagttaacttctctgagcctcaatttcttaactgtaaagtaaggacagtaattatccacttcctgtagttgttgtgaggattacatgaggtaatataggtaaagctgcttagcatagtgcctggaacataaatgttagctatatcattattattattttgagaccaagtttcgctctgtcacccaggctggagtgcagtggcacctcgcaggttccagtgattctcctgcctcagcctgggattacaggcacctgccaccacgcccagctaatttttgtattattagtagagatggggttcaccacgttggccaggctggtcttgaactcctggcctcaagtgattcacccacttctgcctcccaaagtgctgggattacaggcgtgagccactgtgcccggcctagctatattataatgataacaagcagacaatatgggcaatttcctccctgcctggagaactcctatttactcctcagagtgcagcttggatgtccaattctctggagaccttccctggcagagctgtgtcatgtgtcactctatgttcctaaagcaccctgtaataataactaatttattagtttgttgagtgcttaccatatgcccagacagttctaagcactttataagtgtttagctcatttaattcttcctcctccatctttttttctcattcaataactttggtatagctcatttaattcttattagagcctggaggaggatactattattagcttatttaattcttataagagcccggaggaaggtactattatcattgtcttttgacagatgagaaaactaaggcacagataagttaaataactttctaaaatcatacagaagataaaaaaaaaaccctggatttgaatgcagaaagcacatcttcccaaagcgtccgcacacatccccgttgtgtgtacccttctccctgctctgggggtgatatcttctggcctcttccccaggccaggagtggggtgaacctcaatcagtggtggctctcacgtccttctgattcccaggtttttgcactgccatagggcgcccccgtgaggcgcttcgccccccaccatgttccagcgcctctccagcctcttcttcagcaccccctcgccccccgaagaccccgactgcccccgcgccttcgtgtcggaggaggatgaagtggacggctggctcatcattgacctgccgggtgaggcctgggtctgtctcctgggcctgtgaagtcattctaagggcagatggcctagcagcggaggggaagggcgctgctgggggacgggggagtcccccaagcctactggaggtggggtcacggggccccttcccatgaaagccggggctctctcctggcggcccaggagaggcccgcacgtcaggtcccctagggcagcagggcgagacgcctggcccgtgggtgccccggggcgctgcggacgggctgcgggtctgactaacgatgccctttctctccccgcccccttgtccggtgtgtgtgtgtgtgtgtgtgtgtgcctcctcgctgctcccctcctctgcacggctcccatcccgcgccccgtagacagctacgcggctccacccagccccggggccgcccctgcccccgcgggccgccctccgcccgcgccctccttgatggacgagagctggtttgttacccctcccgcctgttttacggcagaggggcctggactcggtcccgcccgcctccagagcagtcccctggaggacctcctcatcgagcaccccagcatgtccgtttacgtcaccggcagcaccatagtgctagagcccgggtccccttccccgctcccggacgcggccctgcctgacggcgacctcagcgaagggtgagcgggccgggggcggagcctggaggcccagggagacggatcttggaggccagggtccaggctaggaggctggggtagtggggccaggagcccgccccgcgctcgagggggtagcggccttgggagggttgcctttgagacaaagtggggggccggtgggcctccgggcgaggctagaagcgggcctgaggacggaggggcggggcttgagagggaggggcgtggccaagaggctggggccggggttggaggcttgaggagcgtggctggagcgcctagggagtgggacttaaacagaaaggcaagggtggaatagggggtgggggtccagtctcccccgaggtccagtttacctgttaagggctagaaccgaggaggcacctccgggttggtacccacaagaagggcgtcgggcaccccaatctgaacagacacagaactgagccgaagcaagggtgggagatggcagcgccctctagaccccccgcccagcttacccggcttgaccgagcctggctctgtcctcacagggaattgacgcccgcccgccgcgagccgcgggccgcgcgccacgccgctcctctcccagcgcgggcggcgctgctggagaaggcgggccaggtgcggcggctgcagcgggcccggcagcgggcagagcgccacgcgctgagcgccaaggcggtgcagcggcagaaccgagcccgcgagagccgtccgcgccggtccaagaaccagagcagcttcatctaccagccgtgccagcgccagttcaactactgagcgtccaccggccgcgccacgaaccccttgccgatcccgatccctgtcgggctcctccgactcctcgggctggacaccgaaacctcccttcttaaagcgtgtgaggttgggtgatagccgttccttccccgacaccctcaatttccccatctctgatcctctaatctgcctctgaacccattcacccttcaccctcactcctggtccccatacccagcatctaatcatccatgccccctactcctggcccctccatcctttcttctctggtccccatccctgtctctccctttcacccttgccctccagtcctctacctctggcctgcccctatttctgaaagcttcttccagtccctgatctggctcattccccaccttcaactcccaccttacatgtctcacactatcccatggttggcattacactcactcctgttcccttattcttcattcccagtaattccctaccaaatggtggggaccctgagcccagctctgaccaggtagagcctgtgcagcctgggctgctgtcattgccctccagtaagggctcagggttttgcttttagtctccccttccttctgccttgggggcggtactctgtggagctgcttaggcctggaaaggtacagtatgtagaagaggactgtgagacgtgagttagagggagaagatggagggaatctagggaacgaggcagcctattggagatgcggacaggacagacacgttgagaagctgcagggagcagggcaccaagggagtgtgcactgtgcttgctcagagaggccaaaccctgctcccaggctgaagcctggagtctgcccccacttcccttttctataatccacccttctgcaggccctgaaatctgaagggcttagttagtaccttgccactctacccccaacacgtcacccgagtagaagctgggcaaggccctaccatcctggccgtctgttcacaagcccaaggtgctagaactagcttaggagacatgcaggccacagggcttctaggcagggaaagggcacacaccctaggtcagcgtgcagagcagtgatgctggaggacacaccatggggtgaagccatcccaaggctgacagctcagtcttcaccttgcctctggccttgtatttcacaccctgctcagtatggctagccagcagtcctgagtaggagtccaggactcccactgtctcaatctgcaaattgttcctatccaggttcagggccttcagggggcctcttttcattttctcccacaggcctctctttctttctaggttgctggggagaaatgggtaccctatgatccccctccccttctcctccagtaaatacctggaagagggaacctgaatccctgggggagacagaaggggcaggggccaccagcctccccttcttgtggtgagactgaattttgggctcagacaccagcaacagcctcttgggatgccctgagttgcttcccatttcctctttctagccgtccttttctagtgtgtgctcactcttcctaggaacttttaagacttcttggtacctatgaacataggtcctcccctcaccccaactctaggtttccaggcctcacagccaagctgaagcttggagaaaactctgcattcccatgagggcaaaggcagctgccctccctgaccctatagccccaggcctcatggggggtatgtggggaagggatggggtatccccatggatgctgggatgaggacagaggaagacctgatggggtctcctattccagggaataagccaaattaacactaaaaacggatcaaagctcccacgccagtccactagggccccagtagttgacagccttgctcctctcccaagttctccttcagaacctagttgcttttattcttccagctaccacttgggcacttcacagccagcctagggtcttcggcacctccaagagctgaatctccctccaacccttcttgcctactcctcactgccagctgggacctaggctcagtcctgtgtggtgcccatgatccttctggtgggggaagagtttaagttatagggcatttggctcaaattttaaaaggccttttgtttacctatatttctggaggctcctgtattctagaacccaatctctcacctgcttggttgcaaggctcatatttttttgtacctttcctatagattctgtagcatttgagtgtggcaatattttaattgtgtatagatttctaagaaccaacactactcagtctcctgctagtctgactcctgaagcatcagcccttgtcatactgtattgactgtgtacgtgcctttcaccttgagcatgcttcaggatttttttttaaaccacagaacttgaatacatgagggaaccagagttcaaagtcctatgcaaccttaggagggggttagagagtctgttttgattgatgttttctgaggccctagaggagtttgtatcaatttgtgagtattaatgtcagtactaccagcactttgccaaaactgtcagagggacccgtttctagagtgagtcccagttacatcaaacagtgacttccagttattccccagtaagtctgagtggttccttcaagctgggtgtctttccagcctttgccagtctagccccagcagggcaccgtgtatgaatgcagtttggtgctgttttagagtatgcctgctccccagccccctgcctggaaccctctgagcaacttgctctgacctataatgtcttaggtgcaacacggaccccaccagagctcttggatacccccctagatccatgtggctttatgtgaggggactgaatgcagacacaccatagcccccttctactactttccctctcgccctgccacctagttccacatggaaccaacaagttgagtgcatccctgttgggtgttttgtgttgagactggctgaaatgaggagactttgaccatgtgacgtgtcaacagactcaaggagacaaccacctcaactgggtcatgtggcatgcctgtgtatgtgtgtaacagaattctgattgttagactgtaatgctattcctctatgggagaaaaaaattaatataaagaaaaacaaataaaaatatatttaaagcacatgatcctttctgcctgagttgagcttaagtatgagaagcatcttgtaatcttaagcacagtagtggcataggatattatgataaagctggccttggttctggtgtgtgtgtcatatgggagaggaagaggggagataagcttactgggaacagagccagacaatggggtctgactcataaatgactactgttagaggatccttacaatgcaagacacatacatgaagacagctgaaatagagatgagaataacagcatgacagaatgaccaaactcatccttgtggtctcaggcactgggttagagcaagggcaagtagccactggaggggaaaggatgaagtctaatcctgggggagatgcagcagaaggctgaagcccaggctgagacaaggccagggccccaagcatcagagtctcctcaagttgcaggtagggtggggcagaagcagctggctttggagactacacacattttgaagaaggacagccagagtgaaatgtagtggacatctctgaaatatacagcacaaaatgacccctttaatttgggagctgctctgtctaaccacagaactaaaggtggaaacctgacctaaactggactagatttttttttttttgagacggagtttcactcattgcccaggctggagtgcaatagcgcaatctcggctcaccgcaacctccgcctactgggttctagcgattctcctgcctcagcctccccagtagctgggattacacgtgccaccatgcccagctaattttgtatttttagtagagacagggtttctccatgttggtcaggctggtctcggactcccaacctcaggtgatccacccgcctaggccctccaaagtgctgggattacaggtgtaagccaccatgcccggccctggactagattcttgatgctggcacaatcttacaggccagtttgggcttacctcctgcaaggaggagatgtcagcacaattgttttggagcaatccaccatgcaaatggaggagcagatatgtgacatggtgaaaaagtgccatctcagctgctgacagcttcctgtccctagaaaatcctgggtggccattgatctctaagttggttttgttatttgcatcaaaagaaatctgagcaatatatatcaaaatacctggcacagtgctgaacagggctagtttcttcaaagccaagaatgaggtgagggagcaagtatgtacattttcctcaacttgccaggcgggcatctcaggttcaatgaggactagataggaattccatccacaaggctgtgtctgcttagttaaggtccaaagaaagagctgatcacccaaaaatcccttaccaataacataactttatgttctatgacaatgacatttatttaacacgttatttcacattgtacaaatccttagattctctttattcactggtccatttctacaacaaatacatccaaaacactatataataaaattatttacaacatttccaaatgagaagattgcttttgcccccactactgctattcacacacagtacttccacggcacaatacatcattaggagatctaaaaatgctcaccctgtactctaggctgcttaggaaatgtgaaaactagtaacatttataatggcattagctcctttcaatacaagacaacattttagaaaccttgaacttcaactcgcaacaccaaaagggctcaacagtcctgctttccccattgcactttatgaaacaggttgcagggactaggaaaagggccacattattaaaattactaactgtacagaaattgatttaaaaaagtcacagctcaaaattgctctttgtaaaagtcacacacatttccaagtatcaagtcgcagtcctgcttgtttacttggattttcttcgcttggattgcaccgcactggttatgtctgtgggggaaagaaaggacatgttcagtggaagtaactctttacagcagtgccctttagacagtccacaacaagcagggcagacctaaggggagccctactcaactcagaatctgtctaaggggtgctctgaatggagagagtcacaggctttgcttgatgacttacgtgggaagagggtgtggtcctgcattgggcagaattggaatgtgacagaggtggtggcgatgaagcacactgactagagaaagtgcagggtggagagagcctttgtagctgggcaattcacccactgtttccctcaccagttctcatcataaaacgaagtgtaatagacagactgacaatgcttttggtgagaaatcaacgagtaatgccataagcaaatgagtaaattctgttagaatgcaaaaaaaaacctgccttgggatcccttttggagccaagctattgtttcacagtaaggaaccatttttgtcatgctatagtcaaggtctaaacaacatgaccatgggccttggtcagtgagggtctactatggcccagccagttatatcaagattgtggaaggctgggcgtggtggctcacgcctgtaatcccagcattttgggaggccgaggtgggcggattgcctgaggtgaggagtttgagactagtttggccaacatggcgaaaccccatctctactaaaaatacacgaaaaactagccgggcgtggtggcgtgtgccttaatcccagctactcaggaggctgaggcaggggaattgcttgaactacggaggtgaaggttccagtaagccgatatcccaccactgtactgtagcctggagacagcgagactccgtctcaaaaaaaaaaaaaaaaaaaaagactgtggatacatacagtcatgaatgcaattcagaataagcaacggcctgctctgagcccaagtgagcctgaaggcttcatggaggaggtgggaactgagtgatttacacacagaatgacagtgacatacagggaaatgactatgttttgattcctttagtttctcttgtactatcagtgttttaacttaatcttatgccagacttaaactgtgtttcttaaaaacgttttggccaggtgtgatggctcacccctgtaatcccaacactttggaagactgacgcaggaagctcacttgagcccagaagttttgaggccagcctgggcaagatggtgagaacccatctctacaaaaagaaaagaattagctgggtgtggtggcacatgcctgtagtcccagctactcaggagaccaagtgggaggatcacttgagcccaggagttcatggctgaaggagttcaaggctgaagtgagctatgttcatgccactgtactccagcctgggtgacagagaccccatctctatttaaaaaaaaaaaaaaaattctacacaaagttatggcagagtacagtgaatagcctgaagctctccaaaggtaaacacttctttagaatctcatattgacttcaaaaggtcacctttatttcatattctggttttaatatgaaaataatgttctaaaattacttctcatcaaggagaaaaaaaatgcttctaatatatcaatacaaaagatgaatcagatttacccatttctggtaactaggctgaattttctgatactgcatgttaggttgtattcaaggcaaattttcctttgtcttttgtatcataatattttgtgaacccagactctaataaatatgtagattgtaaggaaaaatttcactactctgttagctaaggtgactgctaagaagtgaggcctaggccaggcgtggtggctcatgcttgtaatcccagcactttgggagtctgaggcgggtggatcacctgaggtcaagagttcaagagcagcctgaccaacgtggagaaaccccatctctactaaataaagaaaattagccaggtgtggtggtgcatgcctgtaatcccagttactcgggaggctaaggcaggagaattgcttgagcctgggaggtggaggttgtggtgagccgagattgcgccattgcactccagcttgggcaacaagattgagactccgtctcaaaaaaaataaaaaaataaaaagaagtgcggtctagatgaatttccaagaggtgcccagtacagtaatttcattcaagcctctgttggtggaaatttcagtatgtttgtcttctcaaaggtcatgtttttttttgtgccatgtggtagaatcagtctttctgatttactcattagtcttttactaatcagaagacagttaatctgccaggatgttaataatggtgttctttattttaattcatgtaaattaaagagtctcacacagcccacataactccctaaaatcaactcttcaggtccaaatctcaagcgttattttcactgcagcaaatttgtcatttgcagtaaaaataggcagggtttttgtcttgacagtgttcatcctcagcaaaacattcattaactaggtcaactttggaagcttttcccttgttgtgatatgaaggatcaagtggtatgtctgagaaacatatgtggctgggaaaagaagtgggtagtggggtgtgggggagaagcaacctcaggctccccctccttccttgcttgttcccatttgtcactgctccgaagcacccaatgaactggtaggttgcctctgagcgtgaatcaatgagtggggtcaggaataaacaaatgacttgtgctagaaactgcaaaaaaacccacaaacacaccattaaaaaccctcatcttttggatactgtggttggtggggagaaggatgtaaactttcatacttccatgaggaaaaaaataaattttaaactgagtttgaagtctctatcaccttccctggataaatccagtcaatctgagacatagagcaaacctcagactcaacatgtctaaaaccaaacttgggattttcacctccaacagtgaggtcctttgccactgttccccatcatgtctgaaaaaaatctgtctgaaaaaaacatcttttgatgagtttttttgttttggtagttgattttctactccctccaaaatgttaccacttttactactctaatgaataggcaaatcacctttttttttttttgagatggagtcttgcaaattacttttttttttgagacagtctcggattgtcgcccaggctggagtgcagtggtgcgatctgaactcactgcaacctccaccccctgggttcaagcaattctcctgcctcagcctccctagtagctgggattacaggcatgcaccaccacgcccagctaatggttgtatttttagtagagatggggtttggccatgttggccaggctgatctcaaattcctcacctcaactgatctgcccgcctcagcctcccagaacgttaggattacagaagtgagccactgagcctggccacaaattactttaaggtaagaaattctaggtaagtgatgtagaggctaatgatccagtcagggtgtacctcagactgtgattggcacgctgttcctaaaggctgcctggcctgactgtgaacctaccttcagttttttaactatcagggattttacaaaattagtgtctcttaacagatagacaaatagttcaaactctagcagtgtagtcaaatcatttatatccatgtcttagaaccaactgggtggtaaagaactgggtcaataatagtcttttaagtgactgtccaactatgtcactgggggaacatttaaatttataacctaataaagggatttgtttttcagcctggttgcctcattttgaccttaagcaaatttgaccaaatctacagtacaaggctctacttaatcctctagtatgtgacctctaccatccaaggagctttagaaatggactttgaccttgctcacatcattgtgcctttcactgtactatttctatccgagacgtctaagtaattgtaaaaaattctggaaatcggcgagatgcggtggctcacacctgtaatcccagaactttgattagcagaggtcggcagatcacttgaggtcaggagttcaagaccagcctggccaacaaggcgaaaccccatctcttctaaaaatacaaaaattagccgggagtggtggtgcatgcctgtagtcccagctattcgggaggctgagccaggagaatcacttgaacccaggaggcagaggttgcagtgagttcagatcgcaccactgcactccagcctgggcgacaatccgagactgtctcaaaaaaaaaagtaatttgcaagactccatctcaaaaaaaaaaaaaggtgatttgcctattcattagagtagtaaaagtggtaacattttggagggagctctccagcctgggtgacagagcaagactctgtctcaaaacaaacaaaaacattctggaaattttccttcacaatttgcatggttggtttcaaaatgaagctactacagtttcaggtggttactcttcagggttttctcccacgacattataaatgtatgttcacttgcatatctacagtaatacttctgttttaattcagtatatctttataccctgtgtttttttagacagtttcttcactggctgtgggtagggtggggctatcacctactttgttgtcagagggacacccagggctgctgataattacagattgctctgaactttccttaaattaacatattttcctggttccaaacttaaagctttgaacttcatatttttaactaccttttaaaaaaataattacctttttcccagttgaaaatataacaacaactattctaaatggaggagtaaataatgataaagcaagctagaaaaatcatttgtgtttttgtggcaaattcatcatgtcaggaaggaaaactactcatttgcatgtttgtaaacaacacatctgatcaggtgcaattttaaaaagtgatttgtggtagctaatttttgtgtaattataagtgacccaaccaacaaaaacaatggaccaaagaatgaccaaaaaccatgtgggccttcctggacttgcccagaaatcatccatcccacctgctctgatctggcagtctggcaggccttggccagcatgatgtaagcaaactcggctctcgcagcaggagcatgattaatgtcactggttctccaacaatacaaacagcaacacttttaattacaaactgctcatagtgtttctcagcttcagagattttcatgaaaaacacagaatgtctctgattttgtttgcatatgatatatatgaccaaactcttattaaatgcaaaaagaagccctctttccccctcaaaactttacacagtgctgattctgcaggaagatacttcactcatatttcaggtacccagcactgcatatgtccccacatttgaggtgcatccattttagaaaccagcttgatatttggtgatcacattctgggtatgggtttaaatacaatcacagtaaattattttataacttggttcacatttttggatacaatatacaggccaaaaatatgcataattattctttaatttggctccaagagctttaatactgaaaaaccaaaagagctacagtactcatttctgatttaaaaggtaactgtgatactacaatatatattttttggtttttgtcccacgttcctggctcacagctcctataactcttgtaatttcctaagtgagccatcttttgttaaaatatttggccttttgcccatggttcctgaaacagctctgaggttgagttgatcacaaatggccaactcttttatcaatcatgcctatgtaatgaagccccactaaaaacccaaaagggacctatctccccttccccttcttcctctatacaaaaaaaaaaaaaaaaaaaaaaaaaaaaacaacccgcaaaacccacaaaaggactgaattcaggggcttcccagaaggtgaacgagaacacatctacctgctaagagggtggtgcaccaactccacagggatggaagcttctacacttgggatccatccagaccttgccctatgtatctcttcatctggctgttcatttctatcctttaaaagtggtccccaacctttttggcatggactgggggttgcgggggagacagtttcaggatgaaactgttccacctcagattatcaggcattagttagattcttataaggactacacaacctagatctctcgcatgcacagtttacagtagggttcacactcctatgagaatctaatgtcacctctgatttgacaggagatggagctcaggcagtaatgctcgcttgcccaccactcacctcctgctgtgcggcccagttcctaacaggccacagaccactaccaaccagtccatggcccggggattggggaccactgctttaaaatatcagggcatagtggctcacgcctgtaatcccagcactttgggaggcgaaggtgggaggatcacttgagcccaggagttctagaccagcctgggcaacatggtgagtcctgtttctacaaaaaataaagaatttagctagccatggtcatatgtgcctgcagtctcaattactcaggaggctaaggcaggaggcttgcttgagcccaagagtttgaggctgcagtgagtgatgatagtgccattgcactctagcctgggtgacacagtgagaccctgtctcaaaaaaaaaaaaaaaaaaaaaaaaaaaaagcaaaagaaaaagccggctgggcatggtggctcatgcctgtaatcccagcactttgggaggccgaggcaggtggatcatttgaggttaggagttcgagaccagcctggccaacatggtgaaaccctatctctactaaaaatataaaaattagctgggtgtggtggtacgcgcctgtaatcccagctacttgggaggctgaggcacaagaattgcttgaacctgggaggcggaggttgcaacgagccaagatcacaccattgcactccagcctgggcgatggagtgagactccgtctaaaaataaataaataaataaataaaataaaagtaaaaattaaaaaaaaactttcatatgggaggccaatgtgggaggatcacttgaggctaggagctcaagatcagcctgggcacacagggagaccccatctctacaaaaaaattaaaaaattagccaggcatggtgatgcacacctgtagttccagctacttgggaagctgaggcagaaggatcatttaaactcaggagttcaaggttacagtgagccatgatcatgccactgtactctagcctgggtgacacagtaagaacctgtctcaaatgaaaaaaaaaaaaaaaaaaatgccaagcacagtggctcacaccagtaattccagcactttgggaggccgaggcaagtgaatcacttgaggtcaggacttcgagaccagcctggccaacatggtgaaaccccatctctactaaaaaaaatacacacacacccacacacacaaattagccaggaatggtggtgcaagcctctgtaatgccagcaacctgggatgttgaggcataagaattgcttgaacctgggaggtggaggttgcagtgagccgagattgtgccactgcactctggcctgggcgacagagtgagactttgtcacaaaacaaaacaaagcaagaaaaaacgaaagaaaaagctgtataataaactggtaaacatgtttccctgagttctatgagccactctagcaaattaactggacctggttacgaggggttcatggaaactccaatttttagccagctagtcagaagcacaggtaaaacaacctggggcttgcacctggcattggaagtgggcagcagtcttgtgggactgagccctcaaacctgtggatctgatactatctccaggcagatagtgtcagaattgaattggaggacacccagctggtgtctgaggcagaactgatgacttgcttgatgtgtggggaaaaaaacaccttacatcttgtgtcagaagcgtgttgtgagagtatagcaggagaaactgagtctgtttttctactcatacacagtaacttaaccagagacagttagagaatgatggcctgaggtcttgcgactgatgcggatatctatacatgactgtgattccagggacaggccagagctatgccattctttagggagacacttagcacccctccatgcaagatcacaaagcctgagagtcattatggcctcttctaagccaactgctaagcctcagagcaaggatgtgccaggctttccaacatcaccactgccacggtgggacaatgttcagtttaagtgtacaggcttattccccatccccaacaccccttaaaaacaggttctagctttccatctcttcttggctggtagttctctacagagcggttctagtttgagcatctcttcttaactgtcccagttgcttcttagattctttctggtgccctgtaaataaccctttagtaccttgaggctctgggctgaggtcaaggttccaaaaatctggtgtgtgacatctctaaaggccaataccttttccccgctttaaaggtaattacataccatattctatagcctagaagatcttactcttttgggaaagtgaaaggctacaagaacatgcagaactgaggggaagcagattttcccatagaactctaggcatgttcccttttatgctttaagtgtagtacttcaatatactgaaaagtgtactcccttccaaactagtttctgcctagagatgattcccagagaggaggaatgaagttattggcttcatatctccacctaaaatgaggatacctaagagaccctgactgtggtgtatacactattcctggaaaagaaagaaggcctctctcacctttgccccttaactctccagcaggctgagtatggtgatggtactttgtacacctcaattttaactgtatatgacctctggcctattcccagaggctcttgtgaggcatcgtgacattcttgcctagagacataacctgccaacagcagctgagtcctcagatccgtgtctagtgtctagtgtgggtgcaccagaatctgcctggtctttaggctggcatcccaatgatacttgaccgtttctcagcagtcctgctgataatcaggaactcagccaggatcccagctcttaccttacccaaactgaactactcaagctcagcacatttcctaagagaatgatctggtcactgcctcctcattcttcaggtctcagcttaaatgtcatgtcatttttttctagaaagccttctctgacctggcagaagagcaaggtatctcagctatatgctcttatagtgccatgtaattttgctatcatagcatttaacatttaacacagagtattagaattcgtctttcaatgtggtaaagacagagactttttttttttttttgagatggagtctcactctgttgcccaggctggaacacaatgacgcgatcttggctcactgcaacctccgcctcctggattcaagcaattctcctgcctcagtctcctgaatagctgggattacaggcgcccaccaccacacccagctaatttttgtattttaagtagagagggggtttcaccatgttggtcaggctggtctcgaactcctgacctcaggtgatttacctgcctcggcctcccaaagtgctgggattacaggcgtgagccactgcacgtggctgaggctctgtcttttcactattataacctcagggcctgacatgtagtaaatatttaatacatatttgatagatggttattcatttgataattactgattggtacatctctgtatttggcaccatactaggcaccagagatacagtagttcgcaaaatcagacataatctcctgccctaaccaagtatacatactaattacctatgtcacaaactggcatagttatagctgtggtattatgaagaagaacctggtgctgtgattccccatagcagtgacaactgagctaagataagtaggaagggtgggacgttaaggagaagagaggtgggcagagagaagagcactccctgcagtagctgcaacatatgcacaggcttgtgatcagaggaatgaggacggcatgtccgacttgctaagggaagtgggatgaggctgggagatgacagggccgagaccacacagaagcttgtggggtaggttgaagcttttggactttaatcctaattacaatggtaaatcattgaagggttttaagctagtgggtagtagtgaagatggaaaagggccacctgagataaaatgggcagttttttgtgacgagtttgatataagggtgagggagagaggtatcaaggaggacttgtctaatggatagatggtggtgccatttattgagatggggtacaatggcagaggacctcactgttggaggtgaaaaatcacaagtttggttttagatatgttgagtctgaggttccagtaaggatgtgcatgcagttgtctaagatctctaggggtctgtactagaaatagaaatacaaatttacaagtcatctgtgaaaggctgttactaaagaagaggggcatgactgagatccattagggagaaaatacgaatttgaagagaaaaggtgactcaggatcaaagtctgaggaaggtcaccatctaatggctgggaagggagactgaggaggagcagctggagaggtggtagcagaagacaacagagagttcttggtcacagaacccaagggaaaagttaatttaaaaaggagatagtagtcaacagagaacactcacagggtaaggttcttaagaaggtcagaggagatgggatcaaaggcatagatggagaaactggccttagacttgaggaaggacagctgctctattatagaaagcacaaaggaggatactggtagatttatttcttggtagtgggaagctgagggaattctattttctctgtgaagaggtcagggtctctaccaagagagagggggagaaagtgtggaccagaggtttaaaaagaatagagtgggaaagatagttgaccatggaaacatggaaagatagctgggccatattcaggacctatctgaagtgggtgatcatgaatttaaagtggaatcagctgggcgtggtggctcagcctgtaatcccagcactttaggaagctgagatgggcagatcacttgaggttaggagttcgagaccagcctggccaacatgatgaatccctgtctctactaaaaatagaaacattagccaggtgaggtggcacgcacctgtaatcccagctactcaggacgctgaggcaggagaatcacttgaacctgggaggcggaggttacagtaagctgagatcacgccactgcactccagcctgggcaacagaatgagactccatctcaaaaaaaaaaaaaaagtggactcaaggccaggtgtggtggctcatgcctgcaattccagctttggaaggctgaggcaggagaattacttgagcccaggaattcaaggctgcagtgagctgtgattgtgccactgcactccagcccaggcaataaagtgagaccctgtttcaaaaaaacaaacaaacaaaaaccaacaacaacaacaaaaaaacccaaaacccaaaaaccagtggaataaatctgccctgttatgttcttttttccagcagtgcttgttgctcttgagtacacacacagaaaacatacagttaaatgaacaaataaaggaaggaccaaacaggtagtagaagacaaagacacttgacagacttcaggaacagaagcaatgatgaaggacaaagtcttctactgctgtggtaagaactctattcctctatttgacccacaaatagcacccacatcccactgctaacctttagtagagctggaggctgaagcaggtcgagaagatcgtttacgatgtccattttccacactttcagaggccacagttggctcttcagttcgggagtttcttcggcctgggattttggacttttcaactatctctttgggctcactgctgacagagggaagcaaaaagtttccaagcaggtgagggaaccaggccacacaaaaaacgggctcttcagatagtttcattcgtaaagtaggagactaagaactatatagttattctggagagaaagcagttcaacctggggtaataagcactattgccttctatgttactgggggtttaaaagtgagtctagcttattacattagtaaaaataaaatagtaaagcataatgttggtgaaattgtagaaaaactggtaaaagacataaaaaaattggaacaaaactcccctaattcctcacccattttcttttcttttcttttttttttttttccagacagagtgtcactctgtcgcccaggctggagtgcagtggcgctgtctcagctcactgcgacccctgcctcctgggttcaggcaattcacctgcctcagcctcccgagtagctgggactacagccatgtgacaccacgccctgctaatttttgtctttttagtagagatgggggtttcaccacactggccaggatggtcttaaactcctgacctcaagtgatccacccacctcggcctcccaaagtgctgggattacaggcgtgagccattgcaccaggcccctcacccattttcctaaggtaatagttcccttcaaaaattaaaacattttggattttgtaattttttagaatcatgaaaatggtctttaagatgtctgaaaattgctattaactcaaaatagtatataaacctaggaaattattaacatatattggcatttactaatgatcccggtagagtcagataacagcatattagaagccacagtatggggataattcacaatacactgctaggtatattgattgtccacaccccaacccccttttcttagtatatgaagatttaaaattggtaatattcactgttattgaggatacaggaacaaaaacatttacatacactcctaactggagtgtaaattgtataacccagtggttcttaaaaggaggcaattttgcttcttaggggacatttagcaacatctggagacatttttgattgtcacaacttggggagaggggtgctaccggaatcttttgggtacaggccagggatgccactaaacgtaagccccacacaacaaacagttatctggccccaaaggtcaataatgttgaggctgagaaactctggtgtaacccttgactcagcaatcccacttctaggtgcctaaggaaacaaatctttttacagagctccacacataaggaagttaaaacattttatttgtactagtgaaaacagaagacctaaatacctaacgatagtagattagttagctaaatcatggcacatccatatggagtcatgaaaaatcatgttgtagattatttaatgacaaaacgatttatgacacattaccaagtgggaaaaacttaccaacacaatgaacagtataattccattttcattgttgtatgtgttgagtatatatgtaactacatatgaataaatatgagctatatacacataaatcttttgttgttgttgtttgtttttgagatggagtcttgctctgtgccccaggctggagtgcagtggcaggatctcagcaaagtgcaaactctgcctcctgtgttcaagcaattctcctgtctcagcctcctgagtagctgggattacaggcatgcgccaccacgcctggctaatttttgtatttttagtaaagatggggtttcaccatgttggccaggctggtctcgaactcctgacctcaaatgatccacctgccttggcctcccaaagtgctgggattacaggtgtgagccacaacgcccagccctatacacataaatctgacacaatatatttgggtgcacactgtgtgaaaaagactagaagcagatgaactaaaatatatgtacagtgaatattgttgagttgtaggaatactagtttactggtgagttattttcttctttgtaattctctgatctgaatttctggttttctttaataattttttacactttcatggttcaaaaacgcatgttaaaatgatcagaaaaaaaattctttagaaaattaaatttgcttgcaagacatgtaacaaataaaaataatgcaacaaaacaaaacaaaacaaaacaaaacaaaacaaaacaatactggtcaaaaggctgcctcttctgggaagtcttccatgatctcatttcccaagtagagctgtctcttttgtctcttgggttcacagtctttatctggcattctagagcacccatcagattgtacatcgtgttctattttaatgttttgtgtcttcaactagactgtgaacctcttaaggacacagaccataacctgactgtcaactatccctacccttccactgttcactcctgccagaggaccctttgctagtagcaccgtggttgggaactgggacacaccattcactcccatagctttatgtataacagccgcccgacacccaaccataagccaaggtaagtcaaggagaggtgaggctggagctggggtggaattacaagtcagggggatttatacctcctttgagaggtggtgaagatggctttctggctaggagctcagaaaatggtcaaagcttctgaggaaagaaagttctttttttaaaaaaaatttttgttttttttttgagacaggatgtcactctgtcccccaggctggggtgtgggtagtgcaatcatggctcattgcagccctgacctcccaggctcaagtgatcctcccaccttagcctcctgagtagctgggactacaggcaagtgccaccatgaccagctaattttttattaattttttattttttatttttttttcatagagacagggtctccctatgttgcccaggctgggcaactcctaagctcaagcaatcctccctccttggtctcccaaaatgctggggttacaggcatgagccactgtacctggctagatgattcctaatgaaagtgcctctttctcctggcaaaacaaaagccacagcaagactatcctgttttttatggtcaatgctcaggtatctctggaaacaaacaccccaaatgtatttttggtctgattagcttctttctctagacaaatagctggtgcatgcttgagaaatgcagatgaattcaaacattagcccaatccaaataaaatcagacaggcagagtggtatagtaggagtagcaatgaatttggaatgagatgaacaggggtgaagtcttagctatgcatttattgactatgctatttaatgctctatgttctagacttttttttttttttttttaagatagagtcttactctgttgctcatgttggagtgcagtgagcacgaccatggctcactgcaacctcgacctccctgggctcaggtgatcctcccacctcagcctcctaagtagctgggactacaggcacataccactatgcccagctaattttttgtatagacagggtttcactatgttacccaggctggtctcaaacacctgggctcaagccatctgcctacctcggcctcccagagtgttgggagtacaggtgtgagccactgagcccggccgttctagactcttttttcttttcttttcttttagacagaatttcactctgtcgcccaggctggggtgcagtggcatgatctcggctcactgcaacctccgcctcccaggtttaagtgactctcctgcctcagcctcccaagtagctgggattataggcatgcgccaccatgcctggctaatttttgtagttttagtagagacggggtcttaccattttggccagggtggtatcgaactcctgacctcaaatgatctgcctgcctcggcctcccaaagtgctgggattacaggcgtgagccactgcacccagcctcattctagattcttgatctataaatcccatcttgtctgttgcaatacataggttaaatatcagggctctgaagtcagaaggcttgggtttgaatctaaccttcaccatttactaattctgtgaccttgggcaatttagttaacctttctgaactttagatttctcatctataagacagaatttactttcctaatagatactgtgaaaattagatgagataacacatctagggcacttgtagctcaatctattaaggatgcatggcatggaacaacattcaaataaatggtggctattaacctcctcacagggatgatatgaagattaaatgaaaaaaatattgtgaaagtgtcttatgaagttgctgtacaattatgagaagttctttaaaatattatccagtgcattcctacactaaaagagacaagactgtgtgtggtggctcacacctgtaatcccagaggctgagacgggtggatcacttgaggtcaggagttcaagaccagcctggccaatgtggtgaaaccccgtctctactaaaaatacaaaaattagctaggtgtggtggtacatacctgtaatcccagctacttgtgaggctgaggcaggagaattgcatcaaccccagaggtggaggttgcagtgtgccgagatcgtgcaactgcacaccagcctgggtgatagagcaagactctgtctccaaaaaaaggcatgacttttggaaaatggtaatattcctctccacagagctaatgaagttgaagccatagatgtatgtcattttgtagggttatgtggagcagcacagtgtaacagaaaaaagcataggttttgggtcagatcctgcctggctttctccttcttttgctttcagggtcaaacaactgttctttagaagacagctgcaaggactattattaatattaatatcaatggtaacaacagctcccatatattgaacatttactatttcctcattatgcagaacatgttatctcactcagctttgaaaacaaccataaaaggtagaaacttggcctccagcttttattaagagaaatgttacctctgagggattaggactcatgacagctctctacgttagcagtaaaaacagactggtgcaagagtgaaggaaaaggacaaggtgaagagaggtttaaagactgagacagctgatacctttcaaagaggcttatgctgtgttcatgctacgtctgcagaaatgatcatcttacctttgtccagagactatggcagcatttacctccagctctgcaaaaaaatataaaggatagaaatgaaatgtgggagctgccacagagagaagctaggagtctacaagaattctctatgccctatttaggctaaagtgtccctgtgcccagcaggattctcaccctacatggtatggagacaaagctggcacagatacaacttggtttgtttgggacataagacacttggtctatttttatttctactccacatggtgaaataatctgtttggattaatagaactaagttcacccttccttgttcatatttcatccagttacaaccaggttagcaaaataagtctcttcctctcatgtggaagagaccgttttcattttaaaacatctccatccaccttgttgccacttttttaaaaaaagcaatcttcaaatatgtcttgaacatctattaaggatgcattcttctccaaaggacttcctcactgagttttagagggcacagtgctttgctttcagatattgcctttacaccccattctattcctttctttctcaacctcccagcaatgccctccaagcaaggaaaatcttagtaatctgtctagcagggttttccatcaatgagcacactctgggtttaccatgcacttcttcctcagcaccagcagaaaaacatttgctttctctattatgtgcctttaggtagttccatcttttccaaaagccttccctgatgtaccagatagcagtgatctatcctgcctctggcctcccacagccctattcctgttcccccattgagggaagtcagcacctcattactcagtgtacatgtctaacctactctactaatcacatggtaaccttaaaggcaatgaagtcagagtgcctggttcaaaattttgacttcaatgcttattagccatgtgaccttgggtaaattatctgacatctctgtgctcaatcccttacctaaaaaatgggaataatcacattacccacttcaaagttaaggagatgaaataatgcatgtagaaattttagtatggcacctgacacttagtcataactcaatgttattagctattattattgctatgaagatcagattgatgcagcctttcatgtaaggaggttggactactctgcctttaatgcaaggtgctagtagaagggaatctttgatgggaggctgaggcagaggaatcccttgaacccaggaggcagagacttcagtgaaccgagatcatgccactgcactccagcctggtgacagagcaagactctgtcccaaaaaaaaaaaaaaaaaaaaaaaaaaaaggaagggaatctttgcttctcattgctgtttagcctcctgtatttgtacccacaaagcctgaaaacccatccacaaaaaatagataccaattcactgagtctctgctactttgctggcttggctggaacgtataaactcaggtaatgtgtgctcaaaaatgaaaatgactcaagtcaaaagaagtgctcaccctcattgttttttatttttttgagacagggtctcactctgtcccccaggctggggtgcagtggcactcactgcaacccccacctccagggttcaagcgattctcctgccacagcctcccgagtagctgggagtataggcacgcggtaccaggccagctaatttttgtatttttagtagaaacagggtttcgccatgttggccaggcttgtcttgaactcctggcctcaagtgatctgcccgccttggcctcccaaagtcctgagattacaggcatgagccaccgcacctggcctatttttattttttgggggatggtctcactctgtctcccaggctggagtgcaatgggatcacagctcactgcagcctcaacctccttggggtcaggtgatcctcctacctcagcctcccaagtagtatgcatgccaagcccaactaatttttaaaaattttttgtagagatggggttttactatgttgcccaaggtagtcttgaacccctcggctcaatcaatcctcccatctcagcctcctaaagtgctggggttagaggcatgaaccattacacccggcctagtttgctcttcttttttttttgagacagagttttgctcttgttgcccagggtggagttcaatggcgcaatctccggctcaccgcaacctctgcgtcccaggttcaagcgattctcctgcctcagcctcccaagtagctgggattacaggcatgtgccacgacagccagctaattttgtatttgtagtttggggtttctccatgttggtctgggtggtctcaaactcccaacctcaggtgatctgaccgcctcggcctcccaaagtgctgggattacaggtgtgagccaccgcgcctggcctagtttgctcttttaaaacaagaaaaagtttgatgcttttgagaatcttaacactatcactgctgattcacaagtagagatcaagaaggtttgatgaaggtaatcagtggctctgagggatgttaaggataaggagattcatttacgccagacttccaaatggaagaggattcttcagccaattactgtgagaagggggaaaaatgatatggtaaatcctattttctagagtagggttggggcaggaaatggaattccctttccctttagagttactccttttcttaccaaaaatgagttttgctgtatgacccctcctttaaataacgtgctccattcctacccttctcaaatatccaacacaatgtcaggtatcatgtgggcaattggcagcaaagaaagaatctgggtggctgggccggaagtagtggctcatgcctgtaatcccagcactttgggaggacgaggcaggtggatcatgaggtcaggagatcgagaccatcctggctaacatggtgaaaccctgtctctacaaaatatacaaaaaattagccaggctggtggcgggcacctatagtcccagctacttgggaggctgaggcaggagaatggtgtgaacccaggaggcagagcttgcagtgagccgagattgcgccactgcactccagcctgcgtgacaaagcaaactccatctcaaaaaaaaaaaaagaaaaacaaaaagaaaaaaagactctaggtggctgaaatgttttttgctcgcacactattttcagaggcctgattttattcagagtgtgcagtagaaagtcctatcagtcacacaggatgtagcattctgaagtaggttttaaaataatcacaaactataccttacttttactggctcagattcacaaaattaagcatggctactattgctttttcttactaactttgtcaagtgtgtgaattgtagtttcaatgagattcttacctctgtggggaccagtcatacttttttttttttaactcctcaatgatctacagtgacaaagaatcaggcgaaactaaactgtaccatatctgcgatatttatctgcctccatagtctataaaggcaaaacaagggctgtggctgccatcatcctcatgtattctgagctgaccctgatcccacagcagttatttgtcagattaccatgggatcctacttccagaaatatcatcccttgtgctatttacaatatattggtcatggggagaaacttaatgccacccagagacgactgaaatgactctgcctccctggaggaatggctatcacattgtggcagagactcaatgaacaagactccactactgtcataataaaattacaaagtgcgttaatgcttgccagcccagtaagtcaccatatgccagctattcagctgccaaccatgggtgccagggtcacagaacagggaaaactctgcaacagaaacccatggctgggtggcagacagacaatgggcacggaattgcccttcttgagttccctagctgacactatgaatgcatgagagagcaagctggtcggggggaaaataatctcaagtagaactgcacaagctttgtcactcaaccaaagtctgctctgaagcaaacagataaaatagttcctgtcacttcctggcataagaacacacgacattgaggacagcagtagttccttcacatgtaacccatcccactccaagaagtttttccaaagtacgccttacctggtctggcaacagaggcctgcagtgctgtggttgaagtttcctttgagactaaattctgcgacggggctaaggcaaggaaaaaaaaattacagaccttttactttcttttctaaacaaaaagaaagcattaacctaatcaagggctaagtaactgctgaaacaatgtactcttagagggcagtactcaaaattggcctcgaaattacaagtacattttaaaacttactacaaaaattaattaccataacacccagtaccaatgactaccatttaggggtataggctcttcctttttgtatgtataataataaggggaagagatggctataagaacatagcactcacattttctgcttcttggggtcaggtcctgaccactacttgaaaaagccccaaagcatatcttagtaggcaacccaaaccatagaggtacaattataccattcccctcagcatttaaaaaatctagcctcactccctaaagactatactctatgagagtggaaatggtcacataattttgtacttttctatagcacttagcaaaagtgatgggcataaagcaggcattcaattcatacataataaataaataaatttgatatgttatttacttatctaacaaatagttgcaaagaacttactaggggcaaggcactgtgccaggtaccctgagagaccaaactatatcctcttgcacatcaggaactcagtctagtattaaagataagatatatacatgtagtgcacttgagtgcactctgatgtcatatgaaggagtcacaaagtataaaatactacaaaagtccaaagcaagagttagcaattctaggttgagaaatctgaaggtacattaaagggagaaacatcagaatcaggcttcaaaggacacagagaacttaggcccttaaggaatggaataaaatatgtaatgccctctagaagggaaccatcctggaagataaagattatggcatggatatgccacagtcacatcttgacatctcagtctaaaatcctagataaactctgcaacaacatgttttactctcttgtggaaactgaattttgtatatttccctccctgcttagcaaagcagtaaattatgcatttgtgtttaagaatttattttggatgcttatctgataaagcttaaaactatatcttaacttctacttttaactttagtgttcatttctcaaatttccttttctttttctcctgagacagagccttgctctgttgcccaggctgtagtgcaatggcaggatctcggttcaccacaacctccgcctcctgggctcaagcaatcctcccacctcagccttctgagtagctgggaccacaggtgcatgccaccatgcccagctaatttttacatattttttttgtagagacagggtttcgcctcattgcccggcatggtctcaaactcctgggctcaagtgatccaccagcctcggcctctcaacatgctgagattacaggcatgagccaccgtgcctggccaatttctcatattttcaaagtaaaagcacagaagccccttgaaaaagaacagaaacaatcacttataagcaaagtgagtgttcttaactaaaattgagaacttttcccaagtgctggttcatctcctcaaggcccacatatttctctagtataatatatgatccagataaaaataatttctaattacttcatcatttttctcttgataccagagggaaaagtctcctgaaagaaggagaaatggaaatacttaatagtgaaggatatacttaatttacaccaggttcccttttaattcttagggttcatctacaccaacagaactagaacaatatacaataagcacccagtcttgtgaagactgtctcttgtaagagcagcagacttcttgaaggcctttatcctgcccccatctctctaacactgaggtgaagaggcagagagaaggggaattaacctttccagagctctgcgtgaggcagtgtgttggccacttgacaaatcttctcattgagtcctctctcagaatcctaaattctgggaggtagaatgtacgatctccattttacaagtgaaatacatggcttaggagaggttaaggaacgtatcaactgtaactggtaaccagtgggctagaatttgaactctgatcttaccctgaagtttgtgttctttctgcctctcctcctgggtgcttaccactcagtggtaggcactcgaagcattttagctgcataaataagataggcacttaattagctggcctaggatatcgtaaaggtctttcccagctctagcagtgtgtgactgactccactctggggaaatagagcttcttcacttaagcctcacaggaggaggaacatgtcagggaagggaagaagggaaggaggggcggttgtaaggacacctatgcttccatcattagcccatcttaacagtacataggaaatagcctgaactagatacacaaatggaatgtaccaatcaacaaagagattacatcaaaaagaaactgggaataacaatttttaccatttattgaataataattatatgctaggttctgtgctaagaatgttatatgtactaccttattgaattcttacaactattattgttccatattacaaaggaggaaaccaaagtctggagtggtcaagtaacttgcccaagcccatatagctggtaaatgctggtgttataataccaacccaagcctactggctcttgaccactttgtttctactgtgtccattatcatgaaacccagttttcttccagctctcctctagagtagcccagacaaaaaaagaatggttcctgagatagagtacagtgagaatggggctatgaggacccattgttctgaaatagtcatgagcaaatcttcaccctggtaaagagaatctgcagaagctgctgttcacacttaaggcacagtgttaaatgggaggttcacagtatagactctgaacaaacactgaacgtctttgagcttcaatcttctcacccatacaatggggttaagaatatctgacatagttggtataaagatgatgcaagacaacatatgtaaaaatgcttccttataaattgaaaaacttatataaatgaaaggtatcattatttcaggaactctttgttttgagagccttagctctctgttttgtttttttcagacagagtctcgctctgttgcccaggctggagtgcagtggcatgatctcagctcactgcaacctctgctcccaggttcaagctattctcatgcctcagcctcctgagtagctgggattacaggtgtgtgccatcatgcctggctaatttttgaatttttagtacagatgcagtttcaccatgttggccaggctggtctcgaattcctgacctcaactgatccactcacctcggcctcccaaagtgctgggattacaggcgtgagccaccgcacctggcccttagctctctttaatgaatgcaaacttaacatgggatttaaaagcatattttccaacgtactttcaataaataaaactactgctattgccatttagcccattctctttcctccaagtaaaaaaggagtcatgctttctcttgtgggattaggtcatcaaaaaactgacacaaagagatgatgaagccccaagtacatacctatgctgggtagaagttctggatgggatcccaccttctcctccactaggccacccgcaagtgactcagatgctatgccaccatgattgctttttgtggtcggtacggcggagatgagctcggagggtaccagagtggttactatcgagcgtacactggtggggagagcaccgccaggtaagctgggtcctgctgaggcagtgcccgggcccacagggctagaggtcatttttagcagagtgggtgctgggggcgttggggttttactgtccagctctgtggataactgctctgttcccatgagccccggagctgtggtgtctagcccttggccttcagtctctccatctgcaccatattgttcttcccctttctcaagagagcctgtaactttcttacatgccttggtcaacaaaatttggccaattttgtccacttttcctttgcccttactagacgagactgggcttcgccggttgccagaggaccctggactattggtcaaaaggggagaaaccattgtggttgactgtgaagagggaagagtgttctgatctgctgaggtgttcacctgagggctagcctcatctggattcaattctttcacttgctgcacagggggatgagaagggacaactggagaagacgtacaaggaggggaaggaagctgaacaggggtggctcgtgagctaaggaccaaaggtcgacctgtctggatgtttggagcaggactactggagagggcattaggcggtacaggagcagaagaaaattttatgttctgaggtatgtgtaaagggccaacaactgcaacagagggaggcatcaggccagagttggttgtcagtggggctgcaggaattgtgcttggctgtgatcctttcataacctgaattattgaggatgaattgataaagacaggtgtaatgaactgaggccgggcattagactgagcagctgactgtccctcagaaaccataaccttgctacccgcattgggcattgtgacaactgttgacatcaatgcagactgcaagtgagttggcaaagctgctgatgtgttagctgaagttgtgatgggattggaagtgacaaatacagttatttgatttgggggcaagggagtggaaatggaggaagagctaacaggtcttgacattactggagggatgcttggtgcaacgttagaactgacctcactcaattcgggatgcacaagggatgaacacagctcattactgtgaggtaagtttagggaattagaaggttctttagaagaagacagatcctgcagtgtgggaatgacagatgcttttttgaggtcctccccagaaactactggaggtgttacttccagatctgtaagcccagggggtttaattgtcacattgggagctccagagttgtcaagaagttgacttaacgatgttggtgcttccctcatagcaggagacaccaaatttttgttctcttcgacactgggaagtttgttaggatccgaaggctgcccatcctttttggactgatcttcagggacaaccattttaacttcttgggcagggactgcttttagttcaatgtttacctgttccttcctactctgggaattctggcaatcactgtcctgaggcacattcaagctctccttgttatcctcaacaacacccccaactgcagccacagacacagtagaattctgaggattcagcccactgttgttaggaaagctcccaggtacagggggattggccagaggagtgggactgaccaatacatttctcggcaactccacattctgcaatagggctgcatttgtctgagaggccagagtaagtttaggggcttttgaattttgcctcccagggcttggagtggttttcctactggacccaggactagacctgcgactgttgcttggacttgcccgttttgttgctccagaattagactgctttccagaattcactaccacagaatctaatttgtgagtttgtggggtagcaaaattggaaggattcatggtaagatttgaaggtgcttgcccgatggccttcaaagttgttggatttaggccttgttgatcaaagcccctgtttaaatttggcctaggaggtaaaggaatattaatctgtggagggaagagtcctgctatggaggcattgagtctttctggtgacagactgatttctgaaggttctgtgctgggagggcggttgttgggtgtctgaggataatagggtctggggctggctctgtttggtgttttgggcctagatgtctgggttggcgcagccacatttgggaagtggtggccgtgagagctgggcagggaatttacagggggttgctggggagttgcaccttgagttgctgaaaggggcgatggtccaggttttggccctgtcatcattaactgattctggggaagtactacatgtgaaggcatgttgtttgggcctcctgggacagatggtgcttcactgccacttgcttcagggagtgaggccatctccgccagtggcgagctggaaggattctgcgggctctcctgatagaccattttccttgaattgcttcccaagggagtattcacaggcattggcattctttgtttatcaggtgatggtggcacggaggcaggtccttgcagactgaccatgacaggcacactgccactctgttgcatgggcattctctgggagtcggggttcagggggccccttggaggatggacattttgagagactggaagcctaactgatttgggatcctgctgcatcatgagcatcatcatcatttgttgctgctgctgctgctgctgctgagactgtggctgactgggaggtggtggctgctgctgctgaggcagttgtggctgtggctgctgctgtggtggctgtggtgggggtgccacatgctgcatgagttgaggaggcatctgctgaagtggcctctgttcaactggttgagaaggataacctaaaacaagccccccaaattagggaagttagatttttcagcaagaaaatgttgctacctttagagtatagccaagcaatactcatctaggtggcacagactatgcacaaacagctcaggcatgcccactcctggggcagggggcagcccctcattacttgacataagcaaaaggggcacagtgcttaaggaagcaaaaagcaaagcatcaaaaaacctggagctcctcggtgtgtaggatctgaatgagccatgactgtactaagagcctgattttctgtgctatgcactgaaaatggctgtgtctataccagccaaacattcagatgaaatgagaaaaactccatcaacatcaagtgcctggccacccaagattcaggtctcatgtagtcataatcaatatttcaatgtacttgtgaatgaagtaaagcatttaggattcacttcttctgttagcacaggaataatttttttaagatgtggttttgttgaaaataacagcactgaagacagcctttttattctttcaacagaagtaaaatataaaattctaggattcagttccttaagaaagaggaatttaaaattattccaattcattggctccatacactacgccgcatccttcaggcttaatcctttgggggaaaccgactgaattaaaattgcccttcaggtgtaaatcagtttaataaacagtaggagctaatggaagctgatatacacattgaaaataaaattagggcattgaagtttttatggatattaatttgcacttactttcttacatgcaaatctctatttggagaaatattttccatgaatccacagctggagaataagtaaggcagaagcatagccctcaggaataaaaaataattttgggaaaagaactctgaaggacaatgtcttctagatatgcagagggcaacatctcaaattattctctttttttgtgaagattttacttggcattttagaaccaaaaccttacaatcagaaaagataaaaagatacgcaaaccaagaataacggtggttctgtgggaaaaagtgggcatacagctgggcatatatgggatacaattccagttccacaaactagatttattccattgttgcatgaagagtacattagggaggttttaagaaggtgtaggaataagaacaactggctctggcagtcaaaagaaatgctgactcaacattttcatagagcagctaccaaattttgtgggtcagactcagcactcaattaatgtcttctggccaaagatttccatggtatcaatgaatacaatgtgtagaatccagttttgaagatttttaaaaaaatccttttttattttaggcccgagtaacttcttcacctttataaagccaataacatggcatttctatggttcaactgtcctttcgactacatagtcaaatacagtgggttcctatttttcacattcagtctggggttcccacattaagaaatttgtaattgctacaaaagcctgttgatgtcagggttatgacatggatgccttttatctttaaaatcagcccaccagacagtaaataccaaagaggacagcatagacaatatagcagcctctcaaaagtaacagttaagggcatggctgctacagagtccagaagctggaggcagcagtccaaaaggcactaatgataagacagattggggctgacgtgacagaatggtgaagagggaaagccaggacacacatagtgcccataacacaatcacaaactgaatttattactcagggaatgcaaactcctatgcctttaggggccaggcaggtagtagagaatagaagtggactggtataagacagcaggagtcctgtcaacagtgccaaactgcagagcagatgccctatttaaaggcatttaaactcggacttttgtttaagacactgcatagcaactcaaaaccattataggccaaattcagcctgcaggcccccagtttgcagaaagaaggcaataaatgtatacaaagacccctgggattcttataagaagagttcagatgtgtctgaggcaagcaggcatgttcctgctctcaatgccttctggacatactccccaaagactgatgacctcccagtctcagctatgctgctgcatctcactgacgggaagtgtgatatgcccaaataatttgtaataaataacacaaagtattgatatcatgatggatttagctttttgtttggattcaattttaaaatacataaattaggggtagattaaaggttactcctaaaataatgtcgctctcattttcatgccaaaaagaagttgaaataactagtgaggaagaaacaaaacataccctctgtacacacaggggagagtggcctaagtgtgaagggttgtgtatcttcaaccgtgtcataggggaataaagttacaagtcattgctcaggccaagataaccaggtatagagatattgtggcagctggccttggttctataatatctaggtttgaatgaattaattttaggagcttttccatctttgacataatttttcaacatttaaaggatagtattattttataatcagagaggatacaacaaagggggcttccaatattggtcctatttattataaattattaacctatgtggtagatacatgggtgtctcttttattctttatatcttctttatattttaaagactcattaatgaaacttctataaaaaagatcatcttgttttaaaccctggtagttccctgctttgagaagccccaggaagaaacgctgcaggaaaggcaggcaagcaggattagagtgaaatcatctctccatttaatcttatcctgttctgatgccaactagaatcttgacattgacaagaataaagaggcacttcacatttcatggtttttttttttttttttgagacagggtcccaggctggagtgcagtggcatgatcatggctcactgcaacttcgacttcctgggctcaggtgatgctcccacctcagcctcctgagtagctgggactataggtgcgtgtcaccacacctggctaatttttaaaaaatttttagtagagacaaggtttcaccatgttgcccaggctggtcttgaacacttgcgctcaagcgatctgctcatcttggcctcccaaagtgctgtgattacaggtggatgagccatcatgcccaaccacatttcagtccgattttatgaggacttaaaataacaaagacaaatttgaatagaatgtgtgtgtgtatgtgccttcaaaagttatatttgaaatttttacttaatatcaaggcaaagcttccaaataccagacacattaaatcactgaagtagactagttagcagataaaataaaatactattgtttccttgaagacatggaagccttgtaatgccacatgcacatgtaataagtatataatctagctaacattttatcacctggtggccggtttgaaaattctggcagtttagggcctgagttatccaagttaattccttgttctccaggcaacggtggctgatcagcctcttccagaccagctgggcgagtatctggggtgctaaaaaaaaaaaaaaaaaaaaaagtgacatattttagaataagttgtatagaaaatacacaaaactagcttaacccttcccctatttctgaagaactaaaatgtttgcattaccattattcatctctctctagtctagataaaatattaaatattggcataaaaataatctggcaatttcattaaatgttaaaatccatttaatctaacagcactgtatttactcagaatgctttccacaaattcctggtgcaataattttcatgtaatcacccattccttagctgttttaagacctgatcataggactatcaatgttacaaggtactgttcctgtgaaaccacactatcttcaatgtagcgatcaaattcaactagggggtctgattgtttcttttttgtggatataacagtgggggctcaattcataacaccttgcaaaaggttgtataggttggctgatggtattcagagaacaaagaaagattgagaccaccaccacaaagattttgctgcagaatgagaatttgcagacatctctatttgctttgagatgcctttgcttttacctgggtgtagcttaaaatttttagtaaggaagaaaaaaatgaagaaattgtagctactaacacccacattctcaaagaacaagactggtcacgggcctcattttgtttgtaatctcagtactaattgtacttttcttttctatctttagtttccctttgccctgattttgttcacccacttttaggtagtgttttgtctcattatactctgtacagtttcataagccacaaaaatccactttaaaagcctcccagcaaatggaaatttagaacctgaagcagatcgtcagcacatccagacctataacaatttgctccttgtaagacttctctctcactttaaattacaggcaagaattcgtggtaacctttactttcagaaaattgtagagataagaaatctcagatatctggtccagccccatcatgttatgaatgagaaaactaaggcccaaaaaggtgtatgaaacaggcccaagattccacagtgaagtagtggtagagctggaagcaggtacttttcctgtaaatccactgtctccctttcctgggagtcctgatgctgtgtaaggtccctttcacaatttgtagacctaagtaaccaatttccctaagggctggtgaagatggcaaaaaatacacactagaggcaactgaataaccttgcaattttactcccagactaccgagagaataaaatatttattaaataattattcccataggttgatgctagtaaagaatttaactgagaaagagctatcagaaaaattagataattaactttgaattcaggaaaatataggttatcattaataatacaccatgattagcttttaaagcataagattcaagaagaggcaagtgagcatgatataatacagtacaaagaatgttgtgggaaggctgggataaaggtagttggtttaattttgaatatttaagctggttgaaataaagtttcttgattctttttctataattctaacaatttatttcaattaacctgttttacattcattagccattatttcctcatttattatttttttatgattaaaggcacaaaatatagctcagtgaatattccttctggaaacattttatcaaacccagaaacacaaattaatacttagcttcaggaaatgaaatataaattgttaattgcctttcctgctatgatcttgcaaaataactcacctggagaacgtttactgaaagggtaactgatttaaaaggtccaatcatcttagcgtggggttttaagcttctagggatgataaagagcctttaaaggaaaggcacctgtgcaaaaaaaccatttctatttgagagacagcagtagttttaatttccaaaacacatttggcctctctggttccccaatagccatcataagcctaaagtcagtgctttgtggagttgccatatggtagcactggttacttttcaggctctgattgccaaaaccccccgacactgtaaaattaagagatataccagccaattgcaacatatgaatcttgtttggatccttatttgaacaaattgtaagaaaaaaatttgagataatcagggaagtttgaacactggatatgagagtactaaggaagtattagttttctaggtgtgctaacaatattgtgcgggcatattaaaaagtgtccttatcttttagagacacacactgaaatatttacccagcgaatttgctttgaaatactcaaaagggtaatggaagagagtacagatgaaggcaagacagactatgagttgataattattgaagcagggggatttcattatactattctagttttatattctgtaaaattttccatcaaaaaagttatccacacagaaaacaaatgaataaaatttgaggcaaaaccatcacaacctactttagatcttgctgactatttttcttcttccgagggggtttcttcttcttcggtttatttgcgttggtattattttgcttattgtttaccccaaaatggcctgcagatatgtcactctgcaataagttgaccaacaatgggctcgttagcgtgacatccttattgactgggaagcctggattttgaccacaggacatctgatttccattgggagctccactgaaaggtgcattgaaagacatcccatggcctgagaagtggtttcccgaggcactgtttccctgcatggcctgcacatgaggggggaccatgttggtttgttgaatgctaacatcaggcatcatctgagataaactgacatcgttatttgctgtagtagcaggatcaccatgctgctgggccatgtgtgggctgggccctggtggccgcaggacctgtccctgaatgcccataacctgagatggactgttgttcacaggcccttgctggggcagcatctgtcctgacatctgtcccgtaaactgcaccatatttccttgcatgtttggagttggtcccctcattatctgggctggtcccggcatgacattggactggttctgagtgttaaactgctgcttattcccctgcatttgattggtcataatctgctctatcattgggttctgttggagcaaaacctgcccctgaggccccatcatctggttatgtggcgccatcatttgtgggccctgctgggaaagcatctgcttgggtggggtcatcctttggggcgagggcccaagattttggctcggggggttcaccatcatctggccctgtggcataagctgggcccttgaaaggatcatagggttctgagggttcaaggttccttgttgctggaccatctggccctgggagggcacgatttgctggtgcatgcccatcagctgagatggtgggccctgctggggctggccttgcatgttgctgaggttcacttgaggaaccccagaagtaccagcctgctgattgttcatgttgccatgaattcccatgaggctgggctgcatcatatttggcggcccgtgggacacctgcatctggttttgaggaggaccagctccttgaccaccttaaaaaaaaaaaaagtcacagtttcagaaataaatatttttatcttattggtattaagatactcaagttacattactcagaaagacatccatcacccttatatccactgaccaacataaatatgctgttgacatacttcctgtgagttttctaaactacaaagatgtggctgtgggataactgcttacattcccaatgaccatataatagagaaggagaaacagtttctacattcccatatggtatcttaaagatttaacgtttcaaagatcaagaaagtttactttctttcagattaaataatgagaaaggcagcatctcactgttttaaaatgacttgtagtggccaggctcgggtggttcatgcctgtaatcccagcactttgggaggctgaggcaggcggattgcttgagcctgggaggtggaggttgaagtgagccaagatcatgccattgcactccagcctggtgacagagtgaaaccccgtctcaaaaaattaaattaaattaaattcaaaaagcactatgggctactgaaataactctgctataagaatgtgaagtgtcggccgggcgcggtggctcacgcctgtaatcccagcactttgggaggccgaggcgggtggatcacgaggtcaggagatcgagaccatcctggctaacaaggtgaaaccccgtctctactaaaaatacaaaaaattagccgggcgcggtggcaggcgcctgtagtcccagctactcgggaggctgaggcaggagaatggcgtgaacccgggaagcggagcttgcagtgagccgagattgcgccactgcagtccgcagtccagcctgggcgacagagcaagactccgtctcaaaaaaaaaaaaaaaaaaaagaatgtgaagtgtcctcttaggaaaacctcaacaatcatgagaagacatttaaaaatgcttcttggaaaactgtaataataatgactctcaaaagctatgtgtgtgatatgtggatgctgcacttcaaagaaaataacaccaaggacaggtgtcctctgccctgatgtggtaaaaagcagttaatcttgatctggaagctgagcctctggtgggagccaactgactagatgacccatctggaagctgcaaatagaggaataataaaacctcagtgaccctctcctgcgcagtccctggtgaatcatgtggcacatgttttagtcttctcagctatttctaacttagacaaaagttgctacccgccttgctgtagtgcttatttatttactgggtctttgggattttcctatagctacttgcattatctccccgtttaactgaataactttgtagttaattttgtcccttttatttttcactttttttgttgttttgtttttgagacagaatctggctctggtgcaacctcggctcattgcaacctccacctcctgggttcaagtgattttcatgcctcagcctccccagtagctgaaactagaagcgcacaacaacacacccggctaatttttgtattttcagtagagacagggtttcagcatgttggtcaggctggtctcgaactgctgacctcaggtgatccacccgccttggcctcccaaagtgctgggattacaggctgagccaccgcacttggccttatttttcacttttaaatggggactagaaaatcccctacaatgaagttatgaagccagtccatgctccaactatgaaggcagggggcaaactaccttgttcacactatccagacttctcctgaactctaaggaagattttctaaaccagccttataaactcaaagtggaactccatgaccattgtatatgcttgtatacaataaatatactgtgtatattcattcaactgacaattattcattaagtacctgatacatagaaggcactttggtgctgaggtaacatcaataaacaagacagaccaaatccctgcatccttggagcctacagtctaactggcaagagacacaactaacaaacagacaagtattttttcaggaagcagtaaaagctaacaagagaaagtagggtgagagaagagaaagtaagagataagagtagagctactttagataggataaatggggaaaccaaaacatgtacacgtgggccgggcacagtggctcaggcctgtaatcccaccactttagaaggccaaggtgggtggatcacctgaggtcaggagttcgagaccagcctggccaacatggtgacaccccatctctactaaaaattaaaaaaatagcagggcatgtaatcccagctacttgggaagctgaaacagaaaaacgcttgaacctgggaggcagaggccgcagtgagccgagactgcgccactgcactccagcttgggcacaagagcaaaaactccatctcaaaaaaaaaaaaaaacacacacaaagaaaacaaacaaaaaacatgtacatgtggaaggtaccatataaaaacacaaaatagctgtgatagggtacaagaatgagaaatgactttgtcattgttttaaaacatacttttttttttttgagatgaagtctctctctgtcgcccaggctggagtgcagtggcgtgatctcagctcactgcaacaacctctgcctcccaggttcaagtgatcctcccgcctcagcctcttaagtagctgggattacaagcgtccgccaccacacccggctagttttttgtatttttagtagagacagggttttaccacgttggtcaggatggtctcaaactcatgatctcaagtgatccacctgcctcggcctctcaaagtgctgggattacaggcgtgagccaccgcacctggcctgttttaaaacttcctataaaaaaacatgaatttgctgggtacagtggctcatgcctgtaatcccagcactttgggaggccaaggcaggtggatcatgaggtcaggagttcaaagaccagcctggccaacatggtcaaatcccgtctctactaaaaatacaaaaattagccaggcatggtggcgggcacctgtaatcccagctactcaggaggctgaggcagagaattgcttgaacctgggaggtggaggctgcagtgagccgatattgagccactgcactccagcttgagcgacggagcaagactccgtctcaaaaaacaaaacaaaataaaaaaaaaacaaacatgaattcatataactcaggaatgcagttttgcattagcagatagagaaattcaagcagtttgcactacccttctgttaccctgccagaaatagtgtgaactttttttgtaaaagtcagatttttgtctcattccttagtgatttacaattaaagttggagtcacattactaaattaactccaggagggatgggaattcagaaactagttgcactatctcagtccaaactgcttcaatgagaaagggtaagaggattagtcatgtggtccttaagcaaccagaaacatgaagtttgagcttatacattactgctttgcaaatactttttagccattcccctgtatcttatttcctctccaaaatttcttctttttgcagtacactgttggtagtaaacgtgaactgatgaagtttgaaaaatatcacactgtaaaccagaattcagacactcagcataaacaaagcttaacatgtaccacgtagagatttaaaaagttgcagttgtccaaacatgcctccatgcctttgtgtctgtggttttcatttgccagaaatgcctttttgccttttactacctgagcaagctctaactcaggggtcagcaaactatggccctctgctggtctgtaaataaacaagtgtttggaatgctaccatgcttgtttgtttatgtattgtctatggctactttctgtgctatcataacaaagttgagtagctccaacaagagactatataacctgaaaagccaagaatatttactatctgccccttcagagaaaaaaaatactgctgattcctgctctaactcaagttccatctcctcttagatgtttctgagttcctgtgacattttacctacttttgatatattgacaaaagttactgccctgaaagaataattatttatgggcttgaaattaaggggagagaccaagacttattacttatctgtatactcctgttgtctatcaagtctacgacacaatgctcaataaatgctggctaaacaaatcacagaaaacaaacctgcatgctggacattttgatttgcttgcagctgaggggctcctgaattcccaggggtggttgctgtggtcgaaggcacctgaccttgcataaagttcggattggcctgtcctgctgagaagccaggtgggaggcgtttaggcattccttaatagaaaacaatgagtaaggcagttacctagcaaatttatactcttgcttagatatggaatgaataaggaaggatgagctgcatgaagtctccactggcttagctctctctgtcacactggtaggatctttaataataaggttgggaaagatggttaaaaaaatcaacacaatctcttatatgaggcattgtcaaaatgaaaaataaatactaaaaaacttacacttagaacatgccaaggaaaagatggcaatctgctccctaaatgtgatctgaggccacgccacagcaaggtttgagggctcacttttctctgtaattaacaatggaccccaaaactttagttattttaacacaggcaccaaaggaatatgctaaattctctcatttcaaacaaattgatgtgaaatagtataaaacaaagagatgggtcctgatattaaggatagattgattatttttcctttgagggaaactgatggcaatctcctttgcagaaaatttccccccattattgcgcttgtctctttggaagagacaggagattagaaacagttcatgggagcttcaaagtgatgctgtattaaatcattatgctttcccctcataaggtttgctgtgattctgacaggtttggtaccaaaaaccatactctaatggaatctttctcaagtatcagttcctttttggaagggctaattttagaaaacttgtaataaggagaatctcagaacccacttatcatttacaacacaggccttgatgtggccagatcacctaggtgagcatatcatctgctctatgaaagcatcaagacctaaactcacttaaaaatttattacattcattcatttatttatttacttttatttttattttttgagatggagtctcgctctgttgcccaggctggagtgtggtggagcaatctcagcgcactgcaacctcctcctcccaggttcaagcaatcctccctgcctcagcctcccaagtagctgggattacaggtgtgcaccaccacacccagctaatttttgtatttttagtagagacggggtttcaccatgttggccaggctggtctcgaactcctgacctcaggttatctgcccgccttggcctcccaaagtgctgggattacaggcgtgagccactgcgcctggccatttatttttttaagggccaaattttcaatgtcctgaaaaactcttagtagacaaatatgcatttgtcctttctttaacagtgacaagtcccatttgcatgctcccactgtaattaaatcagtaatcacatttgcaggagggactacccagcttccactgatctggggtagatacccagaacagtgaaatttggagctgaaacatccttgcattttctaagaacttcttacaattcaaatattagagcctgcatgtcagcaaaattaattacaagagagtaaaaggctgatgagcaacttaacttcatcagaaaccatgggaacatgcctttgctatgttgcactaaagatgcaaggggttttttctgggtaggcaatgggtgtcttttggtggggagtatgtttatcagatgacagtattactgatactctataccttactgaaaagctccaagcacattcatgtgcactagatcaatgattaataagaataaataataaacatggagatggataagttttactgtaatcgttttacctctcacacattaagctccattgctttttcttcatacaagaggcaccttacaaaataaataaataaatctcctttaggtataactggtggaattccctctctaaggagcaggcattggcattataaaactataaaagtcaatgatttctgaacttattcccctttaatactttaaccaaacttaacaagtaccatgcttactattttattaactaggattatcaaaattgataactaaaagggccttttcttcaatgagaccctgttctttttattttgctctattgcataatcttaatttttcagcaactgagaagtttaaattgttaacaaaatgcatttttcttctggacattttaatttactagtacaagatcaagcaaaaataatttgaaaaacaaaatgaacatctctacattgaattttacctgaattttagtccagagagctagcttaaatttaaccagtaagatgctgcataacgtatcaagttaactttaagttatatcaagtgtcaccaccatatccacaaaaccaaataattatatccttactccactccctccattaactctaaaaactgaagttctactaagatctagctccagcaaatttaccaacacaaatagctacagtgttcctcacctcctaggcctggatgtaaactctgtggcccctggtttggtggttgctgctgcatcaccatgaagttaggtggcacatttccctgttgaaccataggattccgacccggagagctgacaggctgctgaaatccctggggaagtgggttattttgaggtggccttggtcccatctgctgctgagtttggttaaccgttggggaggatgcaggggatccctgctggaaggaggagggtgaggaggcaggagacttgttggtgaggtggggctgctgcaagggagttgggaccctagagggccctccctgcaaactcttcatctgaggagctgtgaactggcctgggttgctcatctgaggaaagtttgtgtgggcttgtgaggcttgctggctgccaaagggatatggagggggagggtgggaaggcgtctgtaccgtggctaaggatggtcttgcctggagttgctgttgcattgggccgggcaagggagccttcttccacccttggtttgcagtcattgtgcccagagaaccctgggctggaggaggttgaagggctccagaaggcagctggttccagcctggaggaacaggcacctgagttggggcagtaaactggggtcgaattccctgtggctgttgctgctgatgttgctgtgggggtcttgcctgcaactgttgttgctgctgttgctgttgttgctgctgctgctgctgctgctgctgttgttgttgttgctgctgctgctgcagctggggaaaattagctgggttcatttgtctgttcacagagacaggctgcattgggtgatgtgggggagctaaagatcctgagggatgactttgctgctgtatatggagcccagagaggagtggatccattgcatctgtttaaagatagtcaacaaagcaataattaacctactgcaatctagatcttagagaagtggcctttgtaattctggatatacagagcaaaatctgctggtactattcgataaaataaatgcttgtgaataccttctatgtatgaagcaacataccaagatgatgaattctgtcttaaaaagagcttggtcagtagtggacattaagagcgaagtgtaaaacatggagaccagtatttaccaaatcatattctggagaactatgttaattagcattataagaaaacaaaacaattaggtttgggaaacactgaacctaacaaacttagatgcgtttcttcactgtaggactttcagtgcctccaatatgttacttttgaatctccaggagggagggtaaagaatgatgcatttaccaaatttacttgactacagaattctatgtaatgagcatcttgcaggactacgcaggccaaggcacacttttagaaatgttggggtataattgataagaaaacaatgagaaattctgaaaagaaaataatgacatttagtttgaagaaatcaggtcagattttgtaaagaaggttgacattgtgagtttggaaattagaaattcagcatcagagataactgaattttataatgatctgtgcagaaagtttcagactcttcatcctcaaagattggaagtcattacctgactgagaagcagggcgaggagtcctgggctgcagctctggattggggcctggtgccatcatggaagatgacacatttccacccgggggtatcataacagtggcagggttgttcatccttattattcctagaaaaaagatccctaaaatagagtactggaattggcacaatttttgttttttaatgagttatttcaagaatatgaaaagatatggaaaatttgtttttttttttttgacagggtctcgctctgttgcccagtctgccaagtggcacaatcacagctcactgccatctcgacttcccgggcccaagtgatccttctgagtcagcctcccaaatagctgggaccatgggcacatgccactgggaccacaggcacacaccactgtgcccagctaatcgttctatattttatagagatggggtcgctatgttgcctaggctggtctcaaattcctgggctcaagcgatcctccagcccagccctcccaaagtgctgggactacaggcgtgagctactgcacccggcctggaagtttctacacccaccatctacctttttaaaatttaaaaaatttgctcttatgtccttcagatatatatgtagatacagcagaagccccctactccttccattccacttcctccctcttattgcaattgtggttaacagttctgttcttgtttattgaccttttctgtatctgtaggtaaactgcactttttctgtagataaacattttttgtatgcttttaatctttgtataaatggcaccttactatatgcattctttgtcagcttcctttttcacttaatgtattttttgagattcatctctcttgactgttataagggttccattgtatagaagcatatatccacccttctgctgatgaatactaaggttttatttttcctttattcttataattttgcaatgttgtgtatttgtcatgaattcttgtggatacatgagagtgtctttagactatatatttagaattgctaggttttaaagtctaagcatctttaattttactagatattggtaaactgctctcaaaagtggttataccaatttatactcaaactagcagtttgagaactcctctttctccatatctgaaaatttctgatactgctaaacttttcagaatttatcatctatgctcctaagtgagaataggtcaggcatggtagctcatgcctgtaatcccagagcttttggaggccaaggtgggaggactgcttgaggccaggagtttgagaccagcctgggcaacatagaaagaccccatctctacaaaaaataaaaaaatcagccagtgtggtggcaagcgcctggattcctagctatttaggaagctaaggcaggaggatcacttgagcccaagagtttgaggctgcagtgagctatgatcatgccactgctctccagcctaggcaacagggcaagagcctgtcttcaagaaaaaaaagtgacaacgcctatacttattctcttttcctttccttggctacagaattctctgtcatggagcatcttgcaggactaagttggccaaagcacacttttaggaatgttgaggtatgaataagagaacaatgaaaaattctaaaaagaaaatgatgacatttagcttgaagggcagattttgtgacattttgatttttggcatcgaggtgaaaataacctcaaaatgagttggaaagcatctttcttctttttctatgctctggaagaatgtgtgtatctgttctttaaatgtctgagaaaactttcctgtaaaaccatctgggcctataggtcatactaattgatttacagggaaacagatttttatttcaatttcttaaatggctatagacttttcaagttttcaatgtcttactgtcaatttttattaaattataattttgccaacactaaaatttattagcatagttaattgtggaatatattttttctattctttttaaaaaatgatatataattcatatactataatattcaccttttaaaatttgtacttttttcattctttacattgtttgtgccctctttttttccttggtggtcttagcacattcatcagttttagctgtcctttcaaagaaacatcttttgggccaggcacggtggctgacacctgtaatcccagcactttgggaggctgaggcaggtagatcacttgagatcaggggttcgagatcagcctggccaacatggtaaaacccctgtctctagtaaaaatacaaaaattagctgggcgtggtggtgggcgcctgtaatcccagctactcaggaggctgaggcaggagaatcttttggttttgctgttctgttgtttttttgattcatattttacttatctctattcttatctgtattatttccctcataacttacagctctgctcaattcttaagtcagacacttagcttgttaattttcagttggtgttctttcttaatataaatttctgaaggcttaacatttctttgaagtgttgtattggctacatctcacacatttcagtatatattattctcataattccattctaaatattgtctaatttccatcaggattgcttttttaaatcactaagtatttataatgcatttttacgtttccaaaaatatgagatattttggttatgcttttttttttttgccactgacttaacctaacagcactatggtcagagaacagaatctatgtgatattaatatttggtatttactgaaacgtgctcttggaataatccttggtcagtttgtataaattttccatttatgcttggaaatattaagaattcttgaattatgactgcatggttttgttttgttttttttctccgagatggagtctcactctgttgccgaggctggagtgcagtggcgcaatcttgactcaccacaacctctgcctcctgggttcaagtgattctcctgcctcagcctcccgagtagataggactacaggcacacgccaccatgcctggctaatttttgtatttttagtagagacggggtttcactatgttggccaggctggtcttgaactcctgaccttgtgatctgcctgtctcggcctcccaaagtgctgggattacaggcgtgagctatcgtgcccggctgactgcatggtttctatatatgtccattatataaaaagtattttgttattcaagctctcctttatccttactaattttttacaaacttggccatcaattactcacagaggtgtattaaatctcccctaaggtttgctgtttacatgcaattcttaaatgtcttgaggctaggttgttaaatacgtaagagtttagcaacttcctggtgaatttttccttttacattatatagtggccctatataccttcagtgatgctgtttattttaatgtctgctttatctggtaaaaatattattatgcttttcttggttaataatcaccttgttaatctttctatctttctaactttgaaccttctgagtccttatattttatgtgtttcctgtaacagcacataggtaaacctgagaatactattctgattaatcatttcctttttatcagtgttcataatccatttacctttattgtttactagtatattttgatttttttgtcattttatgatttctatttaccctttttttctattctgttttcctattttcctgaattttactggattaattttttttcatcatggtcatcctctttaatcctccactactagtttagaagttatatattccattcatattattttactggtatctttaaaatgtcagcagacatacctgacttaaagtttaaagacatatatgatcatcattattactaaataagtcaatgcttatttagatttaccccatgcttatcaattatttagctcaccattccttcttagatcttatttcttccatcttaggttcaattttcttcttcctgaagtacatccttgagcagttcaattagcaagggtctgttaatggtaaattctcttagtctctttgaaaagctctttatttcatactactcttgatagtatagctatgtttaaaattctaggctgtcaattatatcctcagcactttgaaaaaattattccaatgcttcctggcctccaatgctgctgttgagaaatcaagaaaagctgatagtctttcctttgtaaataatacgtcttttcttttgggttgcttttaacattctgtttttcaatgttctgtagctttacaatattgtgtctagatgtagttttatttttattttgtagtgctcaggaatactgggcttctgaatctgaggacttacgtctttcatccattctggaaaaaattttagccattctttctttgactgtcatccctcctcaatttctttatcttcttcaggaactcttttcaaacatatgttaaaccttctcattttattcttcttgtctcttgacctctttcatatttccatctctttttctctgcgcatcctgagtgatttattcaaattcaccttccaatccacctatttctaatttgctgaataagttatccactttgatgatttttaaatttctgtaagttctgttccccccatctctccttatgtttgatagtgtcttgttttcttatgattctcataattgttaatactctgacattcctattacctaaaattttagagggagggaatctaatcctaaattgtataaattcagaatataagctcatttatatcaggctttaactaggagaagtatgcaatgacttgggttgagaaaatacgcccctccacagcttcaacagttatcaccagtctagacctacctaatgttaatgacttagcctggctattaatgggtattcactaacatatcaaatgtccaaaatgcaagagggtagagaagacaattccacaacacccattctcccacctaacgtctagagccccagcgaacacagacaaatttcccattaatttccctatgccagagagtgacattttcctaatctatctttcactgaaaattctggcttcatgaagaattctgaattctaacttgcttcttcctgttgacccaaggctttatcttctatcccttcccggccattaaaacccaaatgctttggaccctgcagaatctcatttgtttactgccgtttaaatattcacctttgacatttttttttttttttttttgccctagggagttcctctactttctttccccatccctctgcttccaagcccagctacattttttttttttgttttttgagagggagtcttgctatgtcacccaggctggagtgcagtggcgcgatctcggctcactgcaagctccgcctcccaggttcatgccattctcctgcctcagcctcctgagcagctgggactacaggcgtccgccaccacacccggctaattttttgtatttttagtagagacagggtttcaccatgttagccaggatggtctccatctcctgaccttgtgatctgctcaccttggcctcccaaagtgctgggattacgggtgtcagccacagcgcccggctgcccagctacgtattaaatgttataggccggacgcggtggctcacgcctgtaattccagcactttgggaggctgagacgcgtggatcacttgaggtcaggagttcgagaccagcctggccaagatggtgaaactactaaaaatacaaaaattagccagacatggtggtgggcacctgtaatcccagctactagggagggtgaggcagagaactgcttgaacttgggaggcagagctcgcagtgagccaagatcgcgcaactgcactccagcttgggtgacagagcgagactctgtctcaaaaaaaaaaaaaagttatattttaagttttgtagttggagaggacagttaggctaatgtttatctgttgaaactggatctgtttctgaggaatcgcacctggttttttaaagatggtagttagacagttaagaaagctctcatgagggcttggtgcggtggctcacacctgtaatctcagcactttgtgaggcccaggtgggtggatcacctcagagcaggagttcaagaccagcctggccaacatggtgaaaccccatctctactaaaaatacaaaaattagccaattagctgggcatagtggcacctgcctgtaatcctagtcactcgtgaggctgaggtgagacatcgcttgaatccaggaggtacaggttgcagtgagctgagatcatgccacagtactccagcctgggtgatggagtgagactgcttcacaagaaaaaaaaaaaaagagaaagctctcatgagataagaaacaggtttttggctgggcgcgatggctcacacctgtaatcccagcactttgggaggccgagacaggtggatcacaaggtcaggagatcgagaccatcctggctaacacagtgaaccctcgtctctactaaaaatacaaaaaaaaaaattagccaggcatggtggcatgggaggctgaggcaggagaatggcgtgaacctgggaggcagagcttgcagtgagccgagccgagatcgtgccactgcattccagcctaggcgacagagcgagagtccgtctcaaaaaaaaaaaaaaaaaagaaacaggtcttcttggtccataatgagcttcctaatcccagaaaatttcaagtatatgctgactacatgttcaatagtgacactataacatgcattccagtactagatgggaatctgcacaagatccaaggttctcacctaggggaaattttgtcccctgggggacatttggtaatgtctggagacattttaagtggcacaaatgcagggaagtagtggtgctactggcatctggtgggtagaagccagggatgctactaaacatcccacaacacacaggacagcctcccacagcaaaaaattattggccccaaacatcaatagtgttgaagttgagaaacttgaattaaatgactactatagtatccccacaaatcttggaattctataaggctatgaaaaaaaacaggctatggatttagttttagttgcaaaagactcttgcttattagctaactttctgttgcccatgctaagagaagaaagcagtactaagaataattgaaaaaccaactgttgtagatacacagttctaaagttacttattattgttttagaggggatttaaggtctctttccctagaaaaatttagctgttcagtttaacctaatattaaactttgtttgcatccttcaagtctcaatagacaacagagaaaagcaatcctaaaatatgcttggcagtaaagagagatatcttgggggttaagatgttactgttactacaggtcattactaattgattattcctgaaactttatactatatacattatcacaatctgagtccttcattaaataccaatctaatctgatttcaacctaaagcttctcagtttcctaggttgataatcaactatagcactataattggctgggtacggtggctcagttcatgcctgtaatcccagcactttgggaggctgaggtgggcagatcacttgagcccaggagttcaaccagcctggtcaacatggcaaaaccctgtctctacaaaaaacaatacaaaacaaaacaaaaataagccgggtgtggtagtgcacgcctgtagtcccagctactgcagggctgagacaggaggaacacttgaccctgtctcaaaaaaaaagcactataatttacatgcacttcttagagatacttagtaaacatgcttgctatttgccagatactagcccaagagagcttttaattagggtactaataacagttaagtggcgtcttaacattttaagcctagaagggatctctagcattgtttccagaacataaagatgtttataggcaactagagtcagtacatattaagtcctttggccaggagttgagattagaacccagatttcctgatgctcatcccaggtttattcattctttcattaactatatctaacttggctaggcttttcccactctgcttctggcccatgtccttccagtagtggcaacagtgtcatctatcatttctcataaagctaccttaacaccaaatgctcagacttctgtggggaactacatctatgtacacaataccaggctggatattttacatctattttatggtattccacaacagcccaacagcacaggtcctgacatatatattttcctaagtcctaacaagaacttaggaaatgtttgctacactgctcagggctcttctaccttcaagcatgagctcaaaagatggtaggtattattatttcattttatatgtgaagaaagtattgcttggggaagtacagtaactagcttgaggtaacctgtaaatggtagtaccagaatgaaaacctagttccaattctatgatcagttcattagctacagttcagaatagcattttttttgttttgttttgagatagagtctcactctgttgcccaggctggagtgcagggtgcgatctcggctcactgcaacctccacctcccaggttcaactggttctcctgcctcagcttctcaagtagctgggattacaggcgcctgccaccacacctagctaatttttgtatttttagtagagatggggtttcaccatcttggccaggctggtctcgaacccctgacctcaggtgatccacctgcctcggcctcccaaagtgctgagactacaggcatgaccaatcgtgcccggccaagactagcatcttataaattgagctcctctatactgctgcatttctccaacagctactctggtagagtgggaggggaatgactgggtaagcaggttcttactctgcttcaaccacagcagctgtgcttttctgttttatttgaataaagggtcctgaagctgaaaaaattggaaagccactagtgcagtgaaaaaagcactgaactgggagttagaagatctgtgatactagtttatcgctccttgaccctgggcaaatcacttcctttatgtgagttccacagcttcctctgctttaaatgacagccaactcaattctaatattctgagattcaatctcagaatattgagttcaatctctgaagaagaaatttcaggattactagaaaaggaagcaatttataactctcaaattctaaatacataaaaacacatattctctcagatacatcttcagattccacataagcacacaagaactcaattcacagatattctctgcctcagagaaagtgggagttggaaagctacattctccattgtactattaaaataatgagggtagaaaatgtctcacttatttctatttccaacagcacaggtcatgtcacacaacaggaagtcaataaatgtttgctgcatggctcagtgttcatcaacctttaagcacgagaccaaaagattgcaaagatgcttcatgctgtgacctctagcctccgggaaggactcatgtctagctttcctgattcagcaaatagagatgttaagtatgccatgaacccccacctatcttgcagggctcaaatgatcaaataagccaaaaaaggaaactagtaaaatgtcatacaattgagtgggaggtcttacctggaccacttgccataggaaatcccgcctccatcctaactgaatttccagctcccatgggtccattcattctcacatcttggcttcggttctgagccaaagccaggttaatagcaccttcccctgaaaatgagtcaagtgataaaaaggaaatcattagaataaaatgcaaattttgtttatagacagctatataagtgctttagttttctgtgcttttgaagaattatggttagtttaccaccagaaaaatggtgggttcaatgtagatgggtctttcttcaacccatctaagcaggtttcatgaagcacaaggagatataaccaattcttacttgtaatagggaagcagggtgaccatgaatgatgcttagtatcaacagagatcctggaactctgaatatttattttcaaccatcttaccaattgtgtgtgtgtgtggggtgtgtgtgtgtgtaatggaagaaaatgttctcaaaaactctcaaaatcctagacttccttttggtaatttatgatcagaaggtagacactaaatataagtaggtttaaagaagaaagaacctatactggtgtggggacactaacacttgtgaacaaaataccaattccattcaataactgcaatataaacatatttccagcaggaaaaaaatcatgcaatgaagaggagataggttgctacaaatctactttctgagacacctaatgacaggaccaatacttttataggtttttgttttctgagatggggtctcactttgtcacccaggctgcagtgcagtggcacagtcatatagctcaccactaccttaaattcctgggcccaaggggtcctgctgcctcagcctcctgagttgctgggaccacaggcgcacatcactatgtccggctacgtataggattttttttttttttgagatggagtcttgctctgtcactcaggctagagtgcagtggtgtgatcttggctcactgcaaccttcatctcctgggttcaagggattctcctacctcagccttccgagtagctgggattacaggcgcccaccaccacgcccagctaatttttgcatttttagtagagacggggtttcaccacgttggccaggctggtctcgaactcctgacctcacgtgatccacccacctcggcctcccaaagtgctaggattacaggcgtgagccacggtgcccagcctgcataggatttttaattttaccttatttgagcttcacagtaccctcataggtaatgttactagaagtgttccaattaagtagactctaaacttagaggcaacttaaatcttacttggtccaatgataaaaacgtctctgaaacaagcaacagaatgtttcttgcacttaatccaaaattttgactattgttattgtaagagagcaccaccttgtggagagttaaaatatagctagtctgtggctgctgagctgaaaggctgcactcacccaagtccttctaaactgtagggttctgattcacagggtctgatggtaaaacagaaagttaatgaggtatggcagtttcctctgttctgtcactgatctaggtcagccttccttttttttttttttgagatggagtctcgctctgtcgccaggctgaagcgcagtggtgcaatctcggctcactgccatctccacctcccaggttcaagcgattctcctgcctcagcctcccgagtagctgggattacaggcacgtgccaatacaagcagctaatttttgtatttttagtagagacggggtttcaccatgtttaccaggatggtctcgatcttttgaccttgtgatccgcccaaagtgctgggattacaggcgtgagccaccatgcctggctaggtcagctttctatgtctattttaaccagggaggttcactggtcacagggaacaaacagcctaccaaaaaggaagcaatcactgggagctaccagatgctatagcttgcctctagaagtcaggcgtaaaaagagaaacagaatacaggtcatgagggtttccattaaaggaagggaactattaatatacaaaatttgttaagacattctaagtagaaagaatattgttctggaaaaggacatcagttcgtatcattccttaaaaacagttccattgcttcccactagtttagaaataaaggccaaacttctttttttttttttgaatcggagtgtctcactgttgcctgggctgcagtgcaatggcgcgatctcggatcactgtaacgtctgcctccgggttcaagcgattctcctacctcagcctcccgagtagctgggattacaggtgcttgccaccacgcccggctaatttttgtatttttagtagaaacggggtttcaccatgttggccagactggtctcgaattcctgacctcagacaatccgcctgtcttggcctcccaaagtgctgggattacaggcatgagccaccgtgccaggccaggccaaacttcttagcctatacaaggccttaaattatctacctagccaagtgttgttcaacagaaatataatatgagccacatatgcaatttaaaattttctagaagccacagtaagaaacagatgaaattatcatttattttacttaatacattcaatgtattatttcaacatgtaattaatgtaaaaattattattattttttgaaacagggtctcactctgttgctcaggctggagtgcagtggtgagatcacagttcactgcagcattgacctaactgggcttaagtgatccttcccacatcagcttcccaagtaggtgggactacaggagtatgccaacatgcctggctaatttttttattttaaattttaaattttttgtagagacagggtatcactatattgctcaggctggtctcaaactcctgtgctcaagcaatcctcctggcctcagccttccaaagtgctgggattacaggtgtgagccactcagcccagccaatgtaagaattattgagatattttacattcctttggggaataccaaatcttcaaaatgtaatatgtattttatacttacagcgcacgtcagttttaactagccacattttcagtgcctaaaagcaacatacagtctgtggctaccaatattggactgcccatatttagccctgtctacctctttaaactcatctcatgctatttttctccttcaatagcaaggattcagccccagtgtttccttttagtttcttaggcacacaaggctgcttctcaccccaaggcctttgctcatgcggtttcctctgcctagaacagttctctgcactcttcgcatagctagcttctcaattttcatgtaatcttaagtgtcacatgcccaaaaaggcctctaccaaccatcttatccaaggttaggtaacttttatcagaacatcttgttatttctgcagagcacattccatgtaatcattcactcactcgttttcttgcttgcctcccccatcactatacagggttaattacaagtctgtccttgttccttcacatctgttgttccagcataattaatagcattctctttcactttcagaaatgtcctaatttaggctaggcatggtgactcacatttgttaatcccagcactttgggaggccaaggtgggaggattgcttcagaccaggagttcaagactagcgacatggtgagaccccgtctctataaaaaattagtcaggtccgtggtggcacgcacctgtggtcctagctactcaggaggctgagatgggaggattgcttaagcccaggaggccggggctacagtgagttgtgtttgtaccactgccctccaacctaggcaacacagtgagactttgtctcaaaaaaaaaaaaaaagtgtcctaatttagatgataaattatatgactatctataatacatcatttatacataaaatagtgcctggtacgtggcagatgctcattagctatttattaaatataatggtcatcttataaccttataaagaattataagcatttttctatatgacaaattacttcctggaaaacctcacatttatcaaatctcatactgacaataacagggttagggcaaactgaaaacctgtgagactttgtaaccagagctctaataaaaacaataactggtggaggcaaaatgccagaaaaaaatgcagcagaaatgcctggttaaaggtgctgagataatgcacatgtagtggagttctgagccagcggggctgccattatggtgggcacaggaagaaatgcaacctgtcatgaactgagagccacacaaggctgggggatgcacgtcaggaaggcatacgaatatacactctcattcttaattttaatagagctgaaaagactcccacacatgcaacagctgagtgaaaagctttttcttgttgataattataattctatttctactattccagctcctcttacctaagaaaaaaaatcacatattaataaacagaatttccacactatactgctatcattcccctatttaccaactgcatatatgctaatttgtgtcaaagagaacactaccggctcccaaacttgccaattaggggtccacaaactacgtcctgtgggccaaatgcagcccactgcatgtttatttaaataaagtgttactgaaatcctgccatgtttacttgtttacatatcgcctatggctgtttttgccctacaagatggaactgagtacttgttgagttgagatcttatggcctgcaaagccaaaaatatttattcttggccctttacagaaaaagttagcagactactctttagatcaccatgaatttacagagggggcacaaaatgtcctcaaaaaagatgtttccccaattccctggccaaaacttaaaaaaggaagggtacaggaagtatttgtcaatggagaacggactgttgggagaacctgtccctcaagccttgcagcagacacgatagtggcaacattgcttcattccttcttttttgttgttgttgttttgagacaaaattttgctcttgtcgcccaggctggagtgcagtggcgtgatctcggctcaccgcaacctccacccaggaaaattttgctcgacacccaggctggagtgcagtggcatgatctcggctcaccgcaacctccacctcctgggttcaagcaattctcctgccttagcctcccgagtagctgggactataggcacgccccaccatgctcggctaatttttatatttttagtagagacggggtttcaccatgttggccaggctggtctcaaactcctcccctcaagtgatccacccaccttggcctcccaaagtgttgggattacaggtgtgacccaccgtggctggccaacattcttcttacaacttacaaaatcaacagcccagttccacaaaagcaatagctgctgccatcactttcactcctgctgaattcccaggagcatgggaacagagatcatctgggacacacatgtagcctaaaagttaaagaactctttctgtattgtgataatcattgtcatatgtgaatttcataatttcttaaaatatgttatctatttgcttccttgctagtactcatgtttaaatttatggctataatgttaagggagaaccagcattatattgttttaggaagtaggtctgcttaagaaataaaactggtacttctttctccagtgaaaaacactatcaattaaggttttgaagcctttaaataggtaacagagaccaaaaaacatgtggggttttaaagaaaccacttatgtattccttaaagtataaacagcccacatattgttattttatccaatagttgttcgacttccacttttcctaatagttcatcctacagattgctgtgaattaattgtacttttctggatccttttagatagttccacatttttcaaattaaagtggtattgcttaagccactattctctcatttatcaaatggtgaaaattatcccatttctcaatctacatataaccctttctaaataatttgtttgttggtattgcccctttgagggcacagcaacctacaatgctagactgcataaaatgtgtctcactcctataaacaaaatgacctcgactgctcaggtttcatggagcaattaggttctacgtaagcacagggccaggaggacctggactaaagtggaagggaaagctggaattgctggttgtcacctggctgtatcaacacaggaggggaagagagggttctagttcactgagcttccaaagagctcccccacacatggtaggtacttacatctctcacaggtttgtcttccttactaaagtcataagctcttccgagtttataacaataaggacaatatttatcattgtattccaaatgctaaagcttatagtctatggggataaaacaataatcaaataattgctctatgaaagtgtgagataaatgatctgagggagagaaacaaacttttgtgagagcacatagcaaaggactctgacttgccaaaggagttcagaaaatacatcctcaagatttaagctgatacttgaaggctgagcaggcatgaactaggggaagggggttggtagggaatagtatttcatttagagaagacatcaatgcaaaggacctgtggcaggaggaagagaaagctgagaagctggaacacagggggcaagggaggaaagttacacaagataaggctggatgaggaaggtagaggtgagaccatgcaaagcctgaggtcatggtaaggagtttggtcttcattctttgaataataccaagagatagcaggattttaatctaggggtgtagggttataggggtgtaggtgtgtgtgtgtgtgtgtgtgtgtctgtgcgtgcgtgcacgtgctcatcaaattctcattttgaaaaagatcattctggtaaaaatactgaaaatgaacactgcgggccggcgtgatggcctgtaatcccagcactttgggaggccgagagggtggatcacctgaggtcagaagtttgagaccagcctggccaagacggtgaaaccccatctctactaaaaatacaaaaattagctgggcatggtagtacatgcctgtaataccagctactcaggaggctgaggcaggagaatcacttgaacctgggaggtggaggttgcagtgagctgagatcatgccactacactccatcctgggactctgtctcaaaaaaaaaaaaaaaaaaaagaaaaaaaaaagaaaagaaaatgaatgctgctacaaaaggaaaggactgttgaaggcttcataatctgttagacgaataaagaaaatactaaagtttatttggtggaaggaaggaagcaaattaaattatatgttaagctgggtacagtggtataggtgtagtcccagctactcaggaggctgagatgggaggatcatctgaggccaagagtttgagtccagcctgggcaacacagaaagacactgtctctaaaaataacaacaataacaaagaaaaccacacaactaaataaataaataagacaaatcaattcctggtcaggatgccaataaaatcaaagtctgaaagactgatggtcaaaattagccaaaggaatggagtccaaggctacagatgctaaagaccatcaggacccagcaataacctcagtcagtccctcttcatcctaaggtgctgcaaagcaaagtacaagttacatgagttgcttggcattctgaaacacaagagcagaggaacagacaaagcagcacagaaaatcatgctatattctactgttgtaatgattctggtctagatgggcacatggcaaagtaaaagaccttcaatctgaacggagagaatccctaaatcccgaagctgctggttgttgctctgagcaaggatccgtagccgctccgctgcttcccgggggatgttgaatgtcacacgcacgctgttccagggctccaccttctgtacttttagcttgctggactcttgattgtgaaagaaaaagaattatattaataatcttttagccaccagaggagatggaattaaaaaacaaaccaaaagagcaaaagaataaggtggagcaccagcttggaatagctaacagagcatatgctttggagctacagactcaaatctaatcctagctttgccacttagcacctgggtgaccatgaacgagctatttaacctttctgaaacttatctttttcttttctaaaactatgaaaaaactacttcatatgatttttgggtacaaattagataatatatgcaaaaaatctagcatagtacctggcacaccacaggcaatgaacggaaagccgtaagatggagaaaggaccataagaaagaagagagaggttaagtttaaattaatagaataggctcatgcctataatcccagcacttcgggaggccgaggcaggtggatcacgaggtcaggagttcaagaatagcccagccaacataatgaaaccccgtctctactaaaaatataaaaatttgctgggcatggtggcatgcacctgtagtcccagctactcgggaggctgaggcaggagaattgcttgaacccgggaggcagaggttgtggtgagccaagactgcgccactgcactccagcctgggcaacaaagtgagactccgtctcaaaaaaaaaaaaaaaaaaaaaaggtaaaggacagttctccagaaaagatacacaaatggccaataagcacatgaaaaaatgcttgacataactaatcattagagaaatgcaaatcataatgataagataccacctcaccaccattaccatggctactatcaaaaccacagaaaataaacaatggtgaagatacggagaaatagaacctgcggggcacggtggctcacacctataatcccaataatcccagcactttgggaggctgaggctggtggatcacttgaggacaggagttcgagatcagcctggccaacatggcaaaaccccgtctctactaaaaatacaaaaattagccaggcatggtggtgcacacctgtagtcccagctactcaggaggctgaggccagagaatcgcttgaacccaggaggcggaggttgctgtgagcccagaatgcactactgcactccagcctgggtgacagaacaagactccgtctcaaaaaaaaaaaagaaactggaacccttgcgcactgtcagtgggaatgtaaaaggatacaagctgctgcggaaaacgacagtttctcaaaaaaaattaaaaatagaattaccacatgatgcagcaattctacctcggagtacacactcaaatgaactgaaagcagagtctcaaagagatatttgtacaccatattcatagcagcattacccacaatagctaagatatggaagcaacccaatgtctactgacagatgaatgaatcagtaaaatatggtatatacatacaatggaatattattatattattatttgagacggaatcttgctctgtcaccaggctggagtgcaatggcatgatcttggctcactgcaacctccgcctcccaggttcgagcaattctcctgcctcagcatcctgagctgggactacaggtgcatgccaccacgcccagctaatttttgtatttttagtagacacagggtttcaccatgttggccaggatggtcttgatctcctgacctcatgatcgcccgcctcggcctcccgaagtgctgggattacaggcgtgagccactgcgcccagccacaatggaatattattaagccttaaaaaggaaggatatcctgccacatgaatgggctttgagcatcttacgctaagcgaaataagccagtcacaaaaaggcaaaattccacttatatcaaggaagtagagtagtccaaaatcatagaaacagatagtagaatggtggtttccagggactagcagcaaggaggaaatggtgagttgttattcaatggttagagacgttcaatttttttttttttttgagacggagtctcaatctgtcgccaggctggagtgcagtggcgcaatcttggctcgctgcaacctctgcctcccggcttcaagcaattctcctgcctcagcctcccgagtagctgggactatagacacctgccaccatgcccggctaatttttgtatttttagtagagacggggtttcaccatgttggccaggatggtcttgatctcttgaccttgtgatccacctgcctcggcctcccaaagtgctgggattgcaggcatgagccaccacacccagccagagatgtttaattttacaagatgaaaagagttacatcctggctaacacggtgaaaccccatctctactaaaaaatacaaaaaattagcctggtgtggtggcgggcgcctgtagtcccagctacttgggaggctgaagcaggagaatggcgtgaacccgggagacggagcttgcagagagccgagatcgcaccactgcactccagcctgggtgacagagcaagactccgtttcaaaaaaaaaaaaaaaaaaaaaaaaaagacaagacaagacttagggcgacacatggtggtgattgttgcacaacattatgagtacatttaatttccactaaactgtatacttaataatggttaacatggtaaattttatgttacatgtattatacaataaaaaatactttttaaaaaagttaagtaattgaggaggtattattaattgtagttacattttacagattggaaagcaaatcccaggcacagttagctgataaaaaagttatttggctgcgtgcagtggcgcatgtccgtaatcccagcactttgggaggccgaggcgggcagatcacttgagctcaggagtttgagatcaccctgggcaacatagtgagacctcatctctacaaaaaataaacagaaaattagctgggtgcagtggcgtgcgcctgtagtcccagctacttgggaagctgaggtgggagaattgcttgagcctgggagatcaaggctgcagtgagctgagatcatgccactgcattccagcctgggtgatggggtgagacactgcctcaaaaaataaataaaaaataaaaaaagttattcaacaacctcaggcaaaacaattttctcttttgttattaactcagctaaacttaaacttctgtatccttcattcagttatacattctaatattaagataatggtcattcaacacctgtgaaaagaaggaaaaaagagataatggtcatagaggaatatgctttctcaaaatgagaaatatctaaggatagaggaaagtgcctacatgttgcctaaagccccttccagctcttaaaccattgtacattgaatgttaacttttccagacatggagttcacttgttctaatgtggaaaaaaaaacagggaaaacttgctaaaaggaatgagataacacaatcataggaatttagaaaagattagacaatatttagtccaagaccattttacaggagaggaaaccaaggcccagaaaggctaagtgatttgctcagaagcctgtggctaaccagtagcatcagagatgacattaaaacccagctctgattctcagggcaatttcctttccattacatgtaggcctccaaacagcaaaaggcaggaagtttggggatcctggttccaccaatcatagacactgcaggacttcttcccactctgaagtatgttggaatcttgtacatattctacacaaacatcaaatttgcttatggtattaacacttgtaatatgcttgcagaaaaatccatattcataacagttatatcttatcaaaatctttttaaacttccatatttgagagatttgacttaaaatattttttggaccaagaatataatctgatagcaccataaatctagagttggttattttttatttatttttatttttttgagacagagtctcgctctgtcactcaggctggagtgcagtggcatgatctcggctcactgcaacctctacctcccaggttcaagcaatgcctcagccacccgagtagctgggattacaggcacctgccagcacgcctgactaatttttgtatttttagtagacaaggtttcaccatgttggccgggcttgtctcaaactcctggcctcaagtgatccgcccacctcgacctcccaaagtgctgggattacaggcatgagccactgcgcccacctttatttattatttattttttttagacagggtctcactctgtcacacaggctggagtgcaggggcactattagagctcactgcagctttgacctccctgggctcaagtgatcctcccacctcagcctctcgagtagctgggactacaggtgcatgccaacatacccaactaatttttgtattttctgtagagatgaggtctctctatattgtccaggttggtcttgaactcctgggttcaagtgatccacccaactcaatctcccaaagtgctgggattacaggcatgaactactgtgcctggcctaggtttggtaatttatttgaaagccataaataaattgaattagcaatatgtaaacaacagaaaaatgtggtaattaatgaagagcaatgaacaatttcaggcccagcaagacctttataatatataactatgattatggttacaatgatgttgataactacatgaaaaattcttaattgtatgctaaataacgcataactatggagaaccttgtacaacacagtgaaaagcagttgaaaaaacaacagcttccgtccagataacaaatctcaaaagataaaacccccaagccttaaaagaaagctaattagctcttgatcaatttaggatttgtgataaaaggaataaatctaggcttttcactatgtccgaagggattagataattgtgctaactagaatagagaacatctaaatcaaggttcaaaaccacaaatgcccgtaagatatggacaggtaatctaaatgtgtgaagaagccagatgggaactgtggtgaagtggggctgctctcagaagcagctgctacttcgtaccatctgggagagagggagaactcaatgttatcagatcttcctatttttaaagacaaatgtaaaaatccggattttcatgcaatataactcaatttttaaagcactggcaatgaaactcaaacactgaaaacaaactaaatctcaaacactaacgtgggccaaataacaaatgcctgcagactggatccagcaagctgttagctagtgacttctgacataaaagttaaaggaataaatttaaagtatattataagcagattcatggaataataagttttctaagctttaagggtccttaaagattcagtttaaccttttcaatttacaggtaaggaaaatgaaaaccagagagttaaaaacaaataaatttgggtcttgagaattacttttatccactagagaagattattcaacaattaccataataagcaacactttatgttcagttcttctatgtacttaaaaagaaagaaaacatgtatatttttaaaatcctaaaattccacctctgtgcttaaattcagccttttgacccaatttaacaagcttgttttgtaaaactcaagataaccatggaagggcaaacatttcaaaaacagtaacaggaagaaaaaataattaaagcaaattacccatgtgtaacaaattgggcacgtttttcaatattgcatctaatttccatttgaagtctttatcatctatatttcctttgaaggccacaaaaattgtggaatcctccaaaatactatcactttttgtgtcatcatcttctagtccagagtcaaaatccatctctgagtcttccattgttgatgaacacaaggaagtatagatgtcttctaagtttggaaggtcatccaaaaccatggtgaatattattccagaagcatatgccaagaggacaataagaaaacttctgaaaagagaagatgcaaaagagcattacaatgcatagttatgcattcaacaatgtataattcatagttctatgaaaattataatttatttaataagaaaatactataaaaattaagaaattacagagaagataagctattttaattatgacattctaaaacaattagttcttacagttaccaaaaataaaaatacactagtcttaaatttaacattctttttattatgttatatgctacttttttataagctagaatgtcaggagaagggaagaaaggatcacaagaaaataaaacaagtacatactttttgagaattataggcctttggttgaccccacagagcaaggggctccccaagactccccctacttctgtcttgacaaaagcttaaaaggagccaaggtttctaaagccttcttctttctccaaactacaaagcacaaccagacctgactaatagcaactggatgattacctaaaattctgaagtctttcatgaaccattttaaacaactattaaagggttattaacagtggaatggctgaaaataatgattctgaaataaacacttaaaaattcttatatgaaagggctgggcgcagtggctcacacctgtaatcccagcactttgggaggtcaaggtgggcagatcacttgaggtcaggagtttgagaccagcctggccaacataatgaaaccctgccactactaaaacacaaaaataagctggacatggtggtgtatgcctgtaatcccagctactagggaggctgaggcaggagaattgcttgaatccaggagggtggaggttgaagggagccgaggttgcgtcactgcactccagcctgggcaacagagcaagactccgtctcaaaaaaaaaagggggttgatatggacaggtaatctttatggaggtaaagaactgtgttccggacagaattaaattgcttcctaaattttagatataaagaagttacattttctgctatcttcaggtatgctgcttaccaaagagtacatgtattaaagatcacacagtgtggccatttcctctgttagtttggggattgaagatcacatacttaacccaaaagtaaatgaatgaacattaattttcagcatttgcggtaagcaaaaatggcatggaaacctaagaacctcccacaaatgttctaataaaataattccttataattttaactataatacaacattgattgattgattgattgagacagagtctcacttttttgcccaggctgcactgcggtggcacaattcggctcactgcaacctccacctcccaggttcaagcaattctcctgcctcagcctcccgagtagctgggactacaggcaagcaccatcatgcctggctaatcttttgtagttttagtagagatggggttttgccatgttgcccaggctggtcttgaacttctgagctcaagcaagccattcaccttggcctcccaaagtgctagaattacaggcgtgagccaccttttatttatttatggcacttatttatttatggcacatgtccagcctttatttatggcacttatttatattattaaagtattacgaattattactttatacttataactataattacaagtttcttaaaaaaaagatggataagaaaattaatcccctaaaaagcaactatattaggttggtaggatcattgataaattttattttcctattttccaaatatgctgcaaatcattaggaaatacaaaactgctgtaatatggttatattccttgcataaatgaaaaaaagtaactcaaacaccgtttaacttttttttttttaatttatttttttgagacacggtctttctctgttgctggaatgtagtggcaaaaacatggctcactgcagcctcaacctcctgggctcaagtgatcctctcgcctcagcttcccaagcagctggggttacaggcgtgtaccaccgtgcccagctaatttttaaaattttttgcagagattggatcttgccatattgcccaggctggtctcaaactcttaggctcaggtgatcctcccaccttggcctcccaaagtgctgggattacaggcatgagctaccatgtccaaccaatttttcttttttaaatagtgaggctggtggatggcttgagggcagcgatttaagaccagcctgggcaacactgtgagaccttgtctctacaaaaaataaaaaaattaactgggtgtggtggtgcatgcctatagccccagctactcaggaggctgaggcgggaggatccctcaaacccaggagttcgaggcagcagtgagctacgatagtgccactgcattccagtatgggtgatagcaacatttttgtctctaaaaataaaaataaaataggctgggcgcggtggctcatgtctgtaatcccagcactttaggcggctgaggtgggcagatcacctgaggtcaggatttcgagaccagcctggtcaacatggtgaaaccccgtctttactgaaaatagaaaaattagctgggcatggtagcaggcgcctataatcccagctacttgggaggctgaggcaggagaatcacttgaaccctggaggcggaggctgcagtgagctgagatcgcaccactgcactccagcctaggggacaagagcaagacttcatctcaaaaataaataaataaaataaaataaaaaaattactactgactaaacttcaacagcaaaggctttccaaaaaccaacctaagcaatccttgggggaaaaattcttctgttataagtaaatatggcaaaaatacttccaaatttgagcagagcaccttgtgttctggcaattatatccttttctagtgctatgactgttacaatgaaactgatttgggtggttaagaaacaacagcagggtcagtggctcatacctgtattcctagcactttgggaggcagaggcaggagtgctgtttgagcccaggagttccagaccaggctaggtaacagcgagaccatgtctcaatttttttaaaaattaaaaaaaaaaaaaaaaagatacaacagcagtcagaaaatctcaaattaataccactgcccttatttgattgccatctgcattttacagatttttaataaactttagaggtaattaaacaaaactaatgaagatttttagggcttaaaagttgctgcttagcaggaaaaatgatgactgcctaaaaaactatgactatttagcagctattccaaagttggaacaactgcaagaaaacatcttaaaatctaagaaacattttccaaaagaatctttaaccagaaaggagactaactaaaaagcctggactttgatagtctccctaaacaggtcgttggtcatgacatgaggactatgtatctagatctggaaaatcttctactggcagatacaggaattgtcagtttaacaatactatgggcattacacagtacttaaaaaaaaaaaaaaaaacagagagaaattgaaagtcagtctatgaaaaattgctggctttccctccagaaaaaataatttttaaagaaacttctttggttggtaggctatttattactgcctcaatttcagaacttgttaattggtatactcagagatttaattttttcctggttcagtcttcctggttcagctgagagtgtatgtgtccaggaatttatccatttcttctagattttctagtttatgtacatagaggtgtttatagtattctctgatggttgtttgtatttctgtggggtcagtggtgatagcccccttatcatttctgattgtgcttatttaattcttttttcttctttattagacctgctagcgatctattatagctagtgatctatcaatttttttcaaaaaaccagcttctggattcactgattttttgaagggtttttcacatctctatctccttcagttcagctctattcttggttatttcttgatcttttgctagctttggggtttatttgctcttcattttccagttcttttagttgagatgttaggttgttaacttgagatctctctagctttttgatgtgggcatttagtgctataaatttcccacttaacactgtttaacactgtcccagagattctggtatgttgtctctgttctcattagtttcaaagaacttcttcatttctgccttaatttcattatttacccaaaagtcattcacgagcaggttgttcaatttccatatagttgtgtggttatgagtgaacttcttaatcttgagttctaatttgattgtgctatgatctgagagactgttatgactaaataggattccctatttaataaatggtgctgaaagaactggctagccatatgcagaaaattgaaactggaccccttccttacgccatccttacaaaaattaactcaaaatggattaaagacttaaatgtaaaacccaaaactaaaaaacttcagaagaaaatctaggcaataccattcaggacatgggcatgggcaaagatttcatgataaaaacgccaaaagcaactgcaacaaaaaaattgaaagtgggatctaattaaaataaagagcttctgcacagcaaaagaaactatcatcggagtgaacagacaacctacagaatgggacaaaatttttgcaatctacccatctgacaaaggtctaatatccagggcccacaagaaacttaaacaaatttatgaaaaaaaaaaaacaaccccattaaaaagtgcgctttcaggtctcccctgcctccaatcttattgtcctccaatctgtctccagacagcagccacagggatctttctaaaacacaaaataggccaggtgtggtggttcaggcctgtaatcccagcactttgggaggctgaggttggaggatcatttgagcccaggattttgagaccactcctgccaacacagtaagaccccgactctacaaaaaaaatttaaaaattaaccaggtgtggtgatgcacacctgtagtcccagctacatgggaggctagggtggcagaactgcttgagcctgggaagtcaaggctacagtgagctatgattgtgccactacactccagcctgggtaagagagcaagttcccgctcttaaaaaaaaaaaaaaaattaaaagagatcaattttggagatggcttaataggcctaggaaacaagttattgaggaaaaacctcaaaacaaactttgccatttacaaattaacctgtatttgatgcaggaccggcaagcctccaaagtggggcttagccttcaagcgttcttggcttcgcccaggagaacttaagggtgagccagggtagggtagaagaaaacagctctattgaagctgcagtgttacaactctgtgactgctcctgcagagcaggactaccccataggcagtgtgctgagactggcagctcagagcagttttgcaattatatttatacctaattttttttttttttttggagatgaagtcttgctctgtcacctaggctggagtgcagtggtgtgatctcagctcacagcaaccgccgccttccaggttcaagcaattttcctgcctcagcttcccagttagctgagactacaggcagatgccaccacgcttgactaattttttgtattttagtagagatggagtttcaccgtgttgcccaggctggtctcgaactcctgagctcaagcaatccgcccaccttggcctcctactgtacctggccagcagttatatttatatctacttttatgtatttcatttattttaatttttttgagatggagtctagctctgtctcgcccaggctggagtgcagtgacacattttagtagagatggggtttcaccgtgttgcccaggctggtcttgaactcctgacctcaggtgatccacccgcctcggcctcccaaagtgttgggattacaggcgtgagccatcgtgcctggcctatacctacttttaagcatgtagattaacaggtggtttatgcagaaattgctagcagaagtatggtaacttttgggtagtcaggtcattgccacggagaggggtggtaagtcttgggtgttgtcatggtaatggtaaactgacatggcacactggtggatgtgtcttatggaaagctgctcctgccccatccctgttttagcagtcctcaatttggtctggtgttcaagccctgcctctggagtcaatttccacctcctacctcatatttaggcttaactgaaggacatataggttttaaagttgaagattaagtaaacagcctgtaattccagcactttgagaggccgaagcaggcggatcacctgaggtcaggagttcaagaccagcctgaccaacatggagaaaccccgtctctactaaaaatacaaaattagccgggcatggtggcacatgcctgtaatcccagctactgggaggctaaggcaggagaatcacttgaacctgggaggccgaggttgcggtgaacatagcgccattgcattccagcctgggtaacaagagtgaaactccgtctcaaaaataaataaataaataaataaatctctttagcaggttgatgttttgccttggtgtgccaatgaattgctagattatgtgtcaagttcaaagcatctgaaaatttcaagttacaacttacaaaaaagtatatactataggttacgtggaagcctgatattaggaaatcaacaattcatctaagtgctgtatgaagcagcatctagaaagctttattcaacaaactttgagggaactatggtagtagtaatgagaaaagttaagtaaatagcagtgatcaaatgcaatttcttcaagtttcaatctatggaagtcaaccaatgacaacaatggtatctttcttactcatctaacaaataatttacctttagaaaaatataaggataaaaaggttattgtaaagccctacaaggaggaaatccaacagtttttctgattactgaggcatcaaatgcctgacattgtatttacaggtatcttgatattgtgtcacaggtttatcagcagttccccaagttcctactccaactttgcataaaggcttactatggctaggtgtgctggttcacacctgtaatcccagcactttgggaagccgaggtgggcagacggcttgagctcaggcttttgagaccagcctggggaacatggtgaaaccccatttctacagaaaatacaaatattagctgggcctggtggtgtgtgcctgtagtcccagcaactcatgaggctgaggtgaaacaatcccttgagcctgaggggagtgaggggaagggtggaggttgtggtgagctgaaattgtgctactgcactattgctgctctgagcaacagagtgagactctgtctcaaaaaaattaaaaatgactataaatactcggtaaatgtcaaagtgttatagtcacacacagcataacaataaaataatattcttcacggcaattattcctgccttaaatggaagaatattcactgaaaaacattaatgtaaaaacaaaatttaagaaaggccgggcgggcacagtggctcacacctgtaatcccagtactttcggaggccaaggcgggtggatcacttgaggtcaggagttcgagaccagcctggccaacgtggcaaatcccatttctactattaaaaaaaaaaaaaaaaattaagaataactctaaattacacatatattcacagcaacattattcacaatagccaaaaactcaaatgtccattaacaggtgaatggataaacaaactgtggtagatacatatagatagaatattatttagatataataaggaatgaagtgctgatacatgctacaacggagataaacctcaaaaactatatgctaagtaacagaagccagacataaaaggtcatatattgcataactccatttatttattttattatttatttatttatttaattattttgagatggagtctcgctgtgttgcccaggctggaatgcagtggtgtgacctcggctcactgtaagctccgcctcccaggttcatgccattctcctgcctcaacctcccgagcagctgagaccacaggcacccaccactacgcccagctaatttttttgcatttttagtaaagacagggtttcaccgtgttagccaggatggtctcgatctcctgacctcgtgatgtacccgcctcggcctcccaaagtgctgggaccacaggcgtgagccaccacgcctggcctattattatttttgagacggagtctggctctgtcacccaggcaggagtgcagtggcgtgatcttggctcactgcaacctctgcctcccaggttcaagtgattctcctgcctcagccttccaagtagctgggattacaggcacgcaccaccatgcctggctaattttgtttgtttttaggagagatgaggtttcaccatattggccaggctagtctcaaactcctgacctcaagtgatacacccgcctcagcctcccaaagtgttgggatatcagccgtgagccaccgcacccggtctaatttgtatgaaatatctagaataagtaaattcacagagacagacagacggattagtggttgtgagcgggaggtataggggatggggaatgggacatcttaatggttatgaagtttcattttggagtgacagacatgttttggaactagatagaagtggtggttgtagtacaatgtgaatctactaaatgccactgaactgttcactttaaaatggctaatttatgttacgtgcatttcaacctgatgcatttttaacaactcagaactcagcccactccatacagaaagtagcacatttaatttcttctcgaaacatgcttttagaaaagtattttccctaggtaatttttcttgtatctttttactgctttaaaatgtcaattgtgcacccatcatgagtattctctaagtagggagcagcagtctttgtcagtcagataaagatttacatagaagagtagctgcttgtggcaacagctctacagtgcttgcttccttctttgttcctaatagcactccttctttcctcctaggatctgggagtgaaggactggtcgtacctcaatgcactgctcaccctggcagaaatgacggccttctgctcctggcacaaagctcttaagtctcagaatgaaagaaaaaaaaactttctagatacaaaaactacttctcagtaacttgcaaatgtcagtgtctttaaggaaaaccagcaataaactcttaaattacatttaatgtaaacaatgactgcttgccagagtagtcacttcaacaaactgagataaaaatctaaggatgttagggcaccaaggcacatacccaaacccctgtcataatactgtacatgaaggaaattctcaaaagaagaaggagagagggcagggagatgatgcaaaaatgttctaatattagcaacttctcatgggcttatgaagcacttctgaagagtcccctgtgccaatttaaacccattatgacatacctcccagtgggggactgccaggatctgttattggagtgctatacaaaagctaggagggagggaaatagaaatttcaagataaaaacagtctaattttttctgggctttagctcacctcagatctaaatacagcatcaaactagagttatgttgagtttgcaactttcaacatatatttctatttttaatcaaaggtatttatttgaagtacaatatcctattatcattttaatcaacataaattctaaaaataagtattgtttactggtctttcattgtcttctacagtgaaacctaagattatcatttataaaaaagatgagaaactacatagtttgtagtaaaaaccccatttaaaaacagaagaatagcatctgtattttattaaatgtctccaagaataataaatgcattctacacagtttttccaaaagagagacagtatcagaaaaaaaaaaaaaagaataagcattaagttggctttattaactctctcgcataaggtttcactcaccaaaatctctttcttaatttttatcatttatccaggtcatcttctaagtccaaagaagctggcatttttagggcttggatttcaaggtagcagcccagcagccaaatcaaaattctaaaaacaaacaacaacaacaacaacaaaaagagagagagagataaaataaaaccacagtattatatagaaattaaagatttctttaatttcataacctatcttttcaacaaaagtcaatgtaaatatcacaagttatcaagtcagcattggcatctttagagaatgttaaaacagggttttcattaagtctacaaagattatcttttctgatttttttttttttttttttttgagacagggtctcactctgtcacccaggctggagtgcagtaacagatcatagctcactgcagctcaacctcctaggctcaagcaatcctcccacctcaggctcccaagtagctgggaccacaggcgcatgccaccacatctggataatttttttgtattttttttggtagagatggggtttcaccatgttgcccaggctagtcttgaacttctgggctcaagcgatccacccgcctgagcctcccaaagtgctgagattacaagcatgagccactgcccccagccttttttgagattttaggccactcatcagcaagcattcaaagattgtagaagcaaaactcacagacttatacaagcatcacttaagaatcataaaactgtcactttaagccttagagccctctctataccttcattcttaattctgtccagattaattaacatcaggtcacactatctgcatatgcttagagcccaaaacaaaatattttgtacacatacaaaatacaagacccgcttttctaacaggatttcaaatttagctttttaaacttgacaaagttttaggtgtaagtttttttcctattttatccataatatctatacattatatttttcattaaattttcagtttaagtcttgaaatatttactgtagatataaaacttatgcatggaacttgcatggtggtgcatgccggtggtcccagctattcaggtgactaaagcaggaggatcacttgaggtcaagagtttgaggttacagtgagctatgatcatgccactgcaatccagtctgggcaagaaagctagatcctgtctctaaaaaaaataataataaagccataagagaaaagattgataagttcaaatgcaaaaaaaaatcaattctgcaaagcaaaaaacattgtaagtcaaaaaaacaacaaactaagaaaaaaatacttgcaatcatatcagtgataaaagaacaaatctccctatatagaatgatatagaaaaaaatatgcataggtatgtgtatgtatatgtgcttatacaggcacataaaataaaaagatcaatttggacaaatgtataaaaatggacacagaatatgatcagaaaattcacagaaaaagaaatacaaacgaacattcaacatatgaaaagatgtttaccctcacacaaaagaagcaaaaaacaatttttcactcatcagattagcaaaactccaaaaatttgataatttactgttcccagcaaggttatggtgaaacaggcactcttattcattgctggcggtagtgcaaattggtacaccagcaattaagtaatgtctttcaaaatcacaattacaagctgggtgtgctggcacacacctgtaatcctgggtacttgagaggctaagacaggaggactacttgaggccaggagttcaaggctgtggtgagctataatagcatctgtaaatagccactgcactcaagtctgggcaacacagtgaaacttcatctcttaaaaaaaattacaattgcataaactattaacctagcaattccacttctggatagcaatcctacagatacacttatcatcatataagatgacgtatgtatagtgttatgcactacagcactgcttgtaatagaaaagttaggaaattacccagatgtccatcaatgggactgatttaaattatagaacatccttaaaaatgaaatgcaaaaaaaaagaaacacagcaagaaggaaaatgctgtctgtgtactgacacaaaaagatctccaagatatatttttgagagaaaaaaaacagagtaaaccattgagtaccttgtgctactttttttggggaaaggggagaaaaaatattttatacatgctagtgctaaaatactctagaaagaaatataagaccaataaaaatggttatcttacaaggtgaatttaaaaaatgatgttataccagagggaaggaagcactcacactaatgaggagtgtgttacaagaacacaggagccagttttaagggttttccactgggcaaatttgagacaatttgagtaccaaaagagaataattactaaaattgatatcatgaataagaatccatgaatctccagcaataactcagagagtgaaaaactttaaaaaaaaacacttcttcccatcattggaggtaactatgacattaatgacttattctgaagattgataattaaagagaaagaaataagcaatttacagcctttttagaagggttcatcctcggtagagcggcaaagctctcttacagaagactaccagttaataaatgtagaagcaaagaaagaatttcaaaatcaccattttgcaaccccaaatgaaataaatgattcaggcaaggacgatcacaggttgctaaaaatcatttttgcatgatcgaaaattgttggaaaacaggttaccacagtgccaaaggatcattccagagattacttccgaattgcaaaggggaaaaactgagtaccattataatgggaagatgtgacagtcaccagcttaacctagtgatcaaactcagcaacaatcagagtgagactcttcatttatgcctcttgatgtgatgtaactttaaatacacagactaagttatgatgtattattaccaaaagtgcctaacctaggtctaaacaagtcttcaacgtaatttctccttcacaggaattcaagagatagagcaacaagaaaaatcacaagaaaacgtaatctgacagaactagaatatggaacttgctacaataaaactggtctggtctcttcaaaaagccaaaatcttgggggaaaaaataggggaaggatagagttctagattaaaagagactgaaagtcacaacaaccaactgcaatgcagaaatgttactcagatctggtttgaagaaaacagtttgaaataattttttaggcagctgggggaaactgaatgtgaactgagtagaaggtattagggcattatttttaattttcttgggtgtggtaatgttatttgtaattaggtagagaatgttctttattcttagaagatgcatgctaaagcacagggttataaagtgtcattatgtctgcagcttgttttcaaattattcaacaaaggtagatattacaaatatggcaaaatgttaacacttgtttaaactacatggtcttcatggtattattgtttcaacttttctatatgtttgaatttttttttttttttttttttttttgagacagagtcttgctctgtcacctaggctagagtgcggtggcatgatcacagctcacagcagcttcaaactcctgggctcaagtaacctcccacctcagccccagagtagctgggactacaggtgcacaaccaccatgcccagctaattttttgattatttgtagagatagggtctccctatgttgcccaggcttatctcaaactcctaggctcaagcaatcctcctgcctcggcctcccaaagtgctgggattataggtgtgagccaccgcacccgacctgaaatatttcatattaaaaaagttagaaccaggtatagcggctcatgcttgtaatcccatcactctgggggtgctgaggagggcagattgcttgagcccaggagtttgagatcagcctgggcaacatggtgaaatcctgcctctacaaaaaaatacaaaaaattagctaggtgtggtagtgtgtgcctgtagtcccagctactcagaaggctgaggtgagagaatcacttgagcccgggaggcagagattacagcgagctgtgattgtgccactgagctccagcctgagcctataagttcgagaccagcccaggcaacacagtgagatattgtttcaactaaaaaaaataaataaaaaattgactgggttttgtagctactcaggagactgaattgggaggatcacttgagctgaggagactgaggctgcagtgtgccatgatcagcattccagcatgccggaattccactgctttccagcctgggcaaaaaagctagcatcccgtctcaaattaaaaaaaaaaaaggttggaagaaaaagaccataaaggtccatgggagctgagggtgagatcgagacttctcactatgtatctttttgaataatgtttttcttttgaaccatgtgaatatattacctattgaaaacaaaagttagctataaataaaacctcttaaacgcttagtatcaatatttctactcttaccccatctcagatatgcaacaacaaaaatgtctcctgctttttatctccttttttgaagggggctcctctggctacatttccccacgagtcatttgactcatgataagaacctggaccatcagccagcatggccaaggagtaattgtgccacctcttcccaaagcccaggcagcacagctcacagctccgggaaagactccttccctctgcttgaggagaggagagggaagagtaaaagaggattttgtcttgcaacttggataccagctcagccacagtaggagagggcagagtcctgaagtccccattctagaccctagctcctggatgacatttctagacataccctgggccagaagggaacccactgccttgaaaggaaggactcagccctggcagcattcatcacctgctgattaaagacccatgaggccccaaataatcagcactgatagccaggtggtatttgctgtggggccatgagtgagactgagacatgctgtcttcaagcatgacccagcacattcccagctgtggtggctacagggagagactccttctgcttgagaaaagaaagaggagtaaaggggccgggtatggtggttcatgcctataatcccagcactttgggaggccgaggtgggtagatcacctaaggtcaggagtcccagaccagcctggccaacatggtaaaaccccatctctactaaaaatgcaaaaattagctgggcgtggtggtgcatgcctgtagtcccagccactcgggaggctgagacagaagaactgcttgaacctgaacctgggaggcggcagctgcagtgagccaagatcacaccattgtactccagcctgggagacagagcttccagcttaggtaccagagacactaagctacaagacaaagttccctttactatttgggctatgtagagcactaagcaggctctcggggtccccaattccaggccttggttcttggatggcattttcattcttttttcttttgtttcctctgactgcatattttcaaagaggctctgggcctgccctgggccagacaagagcccactgtcctgaagggagagtcctaggcctggcagcattcatcacaacctaactcaagagccttcgggccttgagtgaacactggcagtagccaggtggtgcttgccacaggtctggggtggtggcggccgtagggaaagatgcctctgtttgcagaaagaggacgaaaaaacgggaaggactttgtcttgttacttgggtgccagctcagctgcagcagaacaaagcactagatagattcctaaggtttctgacttcaggccctggcttccgaacatctctggacccacccagggctggagagaacttgctgccctgaagggaaggacacagcatggctggctttgccacttgctgactgtaaagccctagggccttgagtgaagaacacaggtgatagccaggtggtagttactacaggccttgggcgagagacccagtgctgtgctggctttaggtctgacccagtgtagtttcagtggtggggtggccacaggggtgcttgtgtaacctctcccctagctccaggtagctcagcatagacggacaaattccagttgtttgggagagagtaagaggagagaacaagagtctctccctggtaatccagagaattattctggattttacctaaaaccaccaaggtggtacctctatgagtctgcaagagccacagttttactacacttggggtgccacctaatgtagatacaaatgcagtgacaagagacctggatcacaacactcaagtccctttgaatactcggaaagccttcgcaagaaagatgggtaaaaacaagcccagactgtaaagactataataaatacctaactctccaatgcctagacaccaacaaacatccacaaacatcaaggtaatccaagaaaacatgacctcaccaaatgaactaaatatggtaccagagactaattccagagagacagagatatgtgacctttcagacagagaattcaaaacagctgttttgaggaaactcaatgaaattcaagatagctcacagaaggaattcagaatcctatcagataaatttaacaaagggactgaaataattaaaaaaatcaagcagaaattctggattgaaaatgcaactgacatactaaagaatgcatcagtctcttaccagcagaattgatcaagaagaagaaaaaaatggtgagcttgaagacagcctctttgaaaatacaaagtcagaggagacaaaagaatgaagcacatctacaagatctattaacagaaaatagcctcaaaagggcaaatctaagagttactggccttaaagaggaggtagagtgaaagagaggggcagaaagtttattcaaatgaataataacagagaatttcccaaacctagagaaagatatcaatattcaagtataagaaagttatagaacacaagccagtttaacccaaagagtactacttcaagacatttaataaccaaactcccaaaggtcaacgataaagaaaggatcctaaaagcagcaagacaatagaaacaaataacaattttaaaaaatacaatggaactccaatacatctggcagcagacgttttagtggaaaccctataggccaggagagagtggtatgacatattccaagtgcgaaaggaaaaaaaatttaccctagaatagtatatccagtgaaaatatcctacaaacatgaaggagaaataaagactttcccaaacaaaagctgagggatttcatcaacatcagacctgtcctacaagaaacgctaaagggaattcttcaatctgaaagcaaaggacgttaatgagcaataaaaatcatctgaagatacaaaactcactggtaatagtaagtacacagacaaacacagaatattataacactgtaattgtagtgtataaactactcatatctcaagtagaaagactaagagaccaattaaaaataataactacatcaacttttccagacagtacaataagataaaaatacaaacaaaaagtttaaaagtggggggaacaaagttagtatgtagagtttttattagttttctctttgtttatgcaatcagtgttgttatcagtttaaaataatggttatgagatattatttgcaaccctcatgataaactcaaataaaaaaatacaacagataagaaataaaaagtaaattaaaacataccactagagaaaatcaccttcactaaaagaaagacaggaaggaagggaagaaggaaaagaagaccacaaaacaaccagaaaaccaataacaaaacggcaggaataagtccttacttattaatactaacattgaatgttaatggactaaattctccaatgaaaagacacagaaagtggctgaatgaacaacaacaacagaaaacaagacccaatgatctgttgactacaagaaacacacttcacctacaaagacgcatacagactgaaaacaaagggatggaaaccaaaaaagagcaggagtagctatacttagatcagacaaaatggatttcaagacaaaactataaaaaagagacaaagaaggttattatataatgataaaggggtcaattcagcaagaagatgtaacaattataaatataaatgaacacaatcctggagcacccagatatataaagtaaatattattagagccaaagagaaagacagaccccaatacagtaagagctggagattttaacatcccattttcagcactggacagatgatctagacagaaaatcaaccaagaaaaatcagatgtaatctgcactacagactacatgaacttaataagatatttacagaacatttaatccaatggctgcagaatccacattcttctcctcagcacatggatcattctcaaggacagaccatatgttaggctacaaaacaagtattaaaattttttttaattgaaataacatcaagtatcttctatgaccacaataaaactaaaaatcaataacaagtgaaattttggaaactatacaaacacatggaaattaaacactatgctcctcaatgaccagtgggtccatgaggaaattaaggaggaaattggaaaatttcttgaaataaattataatgaaaacacaacataccaaaacctgtgagatacagtgaaagcaggactaagagggaagtttatggctataggcatttacattaaaaaagtagaaaaatttcaaataaacaacctaacaatgtatcttaaagaattagaaaagcaagagcaaaccaaactcaaaattagtagaagaaaagaaataaagatgagagcagaaataaatgaaattgaaagaatacacaagatcagtgaaatgaaaagctgcctttttgaaaagataaacaaaattgacaacctttaaccagactaacaaaaaaagagagaagacccaaataaataaaatcagagatgaaaaaggagacattacaactgatacttcagaaattcaaaggatcgttagaggctactataagcaactatatgccaataaattggaaaacctagaagaaacaaattcttagacacatacaatctaccaagattaaccatgaaaaaatccaaaacctgaacagaccagtaacaagtaacaagatcaggtgaaaccctgtctctactaaaaatacaaaaattagccaggcatggtggcacgtgcctacagtcctatctactcgggaggctgaggcaggagaatcacttgaacccaggaggtggaggttgcaatgagccgagattgcatcaatgcactccagcctcggcgacagagactccatctcaaaaacaaaacaaaacaaaacaaaaaacaagatcaaagccataagtaaaagccacaataaaaaagaagcctgggatccaatggcttcactgctgaattctaccaaacatttaaggaagaactaattccaatcctactcgacctattccaaaaaatagtgaagagaatagttccaaactcattctacaaggccaatattaccctgataccaaaagcaaagaaacatcaaaaaaagatgatagacacagtgataaacactaatgcaaaaatcctcaacaaaatactgacaaatcaaattaaacaacacattaaaaaatcattcataggctgggtgcggtggctcacgcctataatcccagtactttgggaggccaaggcaggcagatcacctgagttcaggagttcaagaccagcctggccaacatggagaaacctcatctccactaaaaatacaaaattagcccaggcacagtagctcacacctgtaatcccagcactttgggaggccgaggcagtcggatcacgaggttaggagatcgagaccatcctggtcaacatgggtgaaagcccgtctctactaaaaatacaaaaattagctgggcgtggtggcgcatgcctgtaatcccagctacctggcaggctgaggcagaagaatcacttcaaccagggagtcggaagttgcagtgagccgagattgcaccactgcactccagcctggcaacagagcaagactccgtctcaaaaaaaagaaaaaaaaaattggtgaaaatataaaaacgaaataatactatgatcatatattggttacatattaaaatatatcagttcatgaactgttcgaaacaactaagcaaaatataggtttaattatataattacattattttaaaatttttgcaagtcaaaatgcacatgaactgaaaggcaaaatgcaagttgagagttacacatttttgtttgttttagttttttgagtcagggtctcaccctgctgcccaggctaaaggacagtggcacaattcccagctcaatgcagccaagtgatcctcccacttcagcctcccgagtagatggacccaagtgatcctcccacctcagcctccaccatgcccggctaattttcgtattttttgtagagacagggttttatcatgttgcccaggctggtttccaactcctgggctcaagtgatccacccacctcagcctccaaaagtgctgggattacaagcatgagccaccatgcccagcgatttataaaattagaaatgaaaataatcaatgatcaaaaagcttgctacacttcgtaagtaatcaaagaaaaacaggtcaggcatgatggctcacacctgtaatctcagaactttggaatgccaaggcgactgcatcacttgaggtcaggagttcaagaccagcctggacaacatggtaaaacctcgtctttactaaaaatacaaaaattagcagggtgtggtggcctgcacctgtaatcccagctgctcgggagactgaggcaggagaatcacatgaactcagaggcagaggttgcagtgagccaatacggcaccactgtactccagcctgggtgacagagcaagacttggtctaaaaaaaaaaagaaaaaaaaaacaaaaaaacaaagtgaaatgtgtcttttttcatcaaactggaagatttaaaaataaaataattgtggcaatgtacaatgaaatagattaacatttacattttgcttaaatataagcaaatagaattatccttaacatcttaaccataagcttaacaatctaggaatctaacctaatgaaataactgattttgtggtcaaagatttatattcaaagaagttcatcactgacgggtgcagaggctcacacttgtaaccccagcactttaggaggctgaggcaggcggatcacttgaggtcaggagttcgagagaccaacctggccaacatcatgaaaccccgtctctacccaaaatacaaaaaattagctgggtgtggtggcacacacctgtaatcccacctactaggaggctgaggcaggagaaatgcctgaacccgggaggtggaggttgcgccactgcactccagcctgggtgacagggagaaacaccgtttaaaaaaaaaaacaaaaaaccgtcatcacagcttagacaacacagtgagattccatctctacaaaaataaaatttaggccaagcgtggtggctcatgccttaatcccagcactttgggaggctgaggcaggcagatcacctgaggtcgggagttggagaccagtctgaccaatatggtgaaacgccatcactactaaaaatacaaaaattagccgggcgtggtgacaggtgcctgtagtcccagctattcaggaggctaaggcaggagaatcatttgaatccaggaggtggaggttgcagtaagccgagatcacgccactgcactccagcctgggtgacagagggagaccttgtcataaataaataaataaataaataagcaagctgggtgtggtggcacacctgtggtctcagctactcaataggctgaggtgggaggattgcttggacctgggaggttgaggctgcagtgagccatgactgcatcactgtactccagcatgggtaacagagtgagaccctgtctcaaaaaaaaaaaaaaaaagttcatcaaaatattctgttgatggttcaacaacagaagtggttaaacaatttaaatatactcaaatattgcttcccattgagactaatgtttttgagaatatttaacatcatgagcaatatttatattttaaatataaaatatataaaacatgttacttccgctttctttttcaaaaaaattattttaatcacacataactgtatatatacatggggtacagtataatattttgatacatgtatacaatgtgtaataatcaaatcagagtaattaattagcacatccatcacctcatttattatttgtgttgggaacattcaaaatcctctcttctagctatttgaaaatatacaataaattatttttatctatagtcatcctacagtgctagagaacactagaacgtattcgtcctatccagctataattttgtatccattaaccagtctctttttatccttcccctgctcttcccagactctagtaacctctgttctactctctatttcttataccctttttttttttttttaagacagtctcattctgtcacccaggctagaatgcagtggtacaatctcaccttactgcaacctctgcctcctggtttcaagcaattcttgtgcctcagtctccctagcagctggattttcaggcgcgcactaccacgcccagctaattttcttgtatatttttagtagagatgaggttttgccatattgcccaggctgatctcaaactcctgggctcaagcaatccacccacctgggcctctcaaagtgctaggattacaggtgtgatccaccacacctggcctattctacgatctacttctattgtgatcaacttttttaccttccacatataagaacatatggcatttatctttctgtgcctggcttatttcacttaacataatgtcctccaggctgatgcatgttgctacaaatgacaagatttcattcttttatggtatatataccacattttctttatctagtcatgtactgatggacacaagttgattatcttggctattgtgaatagtgctgcaataaacatgagaatgtagatgtctctttgacatactgatttcctttcctttgaatatatacctattagtgggattgctggatcatatggtagttctcttcttagcttttttttttttttgagacggagtcttactctggtgcccaggccccagactagtatgcagtggtatgatctcggctcactgcaacctccaactcccaggttcaagagattctcctgcctcagcctccctagtactgggattacaggcgcacaccattgtacccagctaatttttgtatttttagtagagacagggtttcaccatagtagcctggctagtctcgaactcctgaccttgtgatccacccgcctcagcctcccaaagtgctgggattacaggcgtgagccactgcgcccagccctctttttggcttttcaaggaacctccataactattttccataatggctgtactaatttacattccaatcaacagtatataatagttgccttttctccatctttttggtaatagccactattttaactggggtgaaataatatctcattgtggttttgatttgcatttcttgatgactagtaatgttaagcagattttcatatacttgctgacaattttacattttctttggagaaatgtctattcagatcaagtacccaatttttaaagtcagactgtttttctactgttgaaacatttcagttccttctttattccagatattaatcccttgtcacatgaatagtctgcaaatattttctcccattctgcaggttatctcctcactgtttcctttgctgtgcagaagctttcttaactggatataatcctatttgccagcttttgtttttgttgcctgtgcttttaaggtcttatctataaaacctttgcacagaccaatgtcctgaagtgtttcctctatgttttcttttagtggtttcatagtttcaggtcttacatttaagtctttagctcattttgagttgatttttgtatatggtgagagataggggtctagtttcattcttctccatgtggatatccagttttctcagcatatgcattgaagagactgtctttttatcaatgtatgttttgggcgtctctgttgaaaatcagttggctgtaaacgtgtggatttatttctgggttctctatggtgtttcattggtctatgtgtctgtttttatgccagtgccatgctgttttggttacaatagttttgtatactttcaagtcaagaagtgtactgcctccagctttgctctttttgctcaggattgctttggctactcaaggtcttttgtggtgcctgccatacaaattttaggattgttttttctaaagaagtctgtggtagacagacttgtaaaatggccaccaattactccagcctcctggtgttcatgcctttgtgtaatctcttcctcctgagtatggactggcctggtgatttgcttctaactaacggactatggaaaatgtgataggatgccactccatgattataaaaaattgtgatttccatcttcctaggagacttgctattcctttctcagctttgtgatgttgaagaagctacatggaaaggaattcagagcaacctccagccatcagccagtgagaaaccaagcccttcaattcaacatcccttcaagaagagaattctgtcaccaaccaagttagtttggaaacagattattccccagccaagcgctaagatgagacaccagccctggctgacaccttgactacctcctgtgagagaccctgaaacagaagacccatctaggctatgccgattcctgacccatggaaacccatgccataataaaaatgtatgttgttttaaactactaaatttgtggtaatctgttatgcaacaataaataactattgtaccctacatggaaatcctgctgaataaactgcctggcaatttccttttttattttttgagatggagtctcgctctgtcgctcaggctggagcacagtggtgcaatctcagctcactgcaagctccgcctcctgggttcacaccattctcctgcctcagcctcccaagtggctgggactacaggtgcctgccactagtcctggctaattttttgtatttttaatagagacggggtttcaccgtgttagccaggatggtctcgatctcctgacctcatgatccgccctcctcggcctcccaaagtgctgggattacaggcatgagccaccgtgcccggcctttttttttagtttttgtttttttgtagaaacagtatcttgctggcggggcctggtggctcatgcctgtaatcccagcactttgggaggccgaggagggtggatcacatgaagtcgggagtttgagatcaccttggccaacatggtgaaaccctgtctctactaaaaacacaaaaattagctgggtgtggtggcaggcgcctgtagttccagctactcaggaggctgaggcacgagaatcgcttgaacccaggaggcggaggttgcagtgagccaagatggtgccactgcactgcagcctggtaacagagcgagattccgtctcaaaaagaaaaaaaaaaaagaaacagtgtcttgctatgttgcccaggctgatctccaactcctggcctcaaacggtcctcctgccctaccttccctggaactctgcccagccaggattcttaaatcaaatcacagtgctggaactgtgcccagccaggattcttaaatcaaaatatttttccctctatttataaatatttatccaaatatttatggggggaaaaaagtcacaggtcacacagtggccagttctgctttagctagcagtggttcccaaacttgtctgtgctttttttttttttttttttgagtcggagtttcgctcttgttgctcaggctggagtgcaatggtgcgatcttggctcactgcaacctctgcctcccggattcaagcgattctcctgcctcagcctcccgagtatctgggagtaaaggcatgaaccaccacgcctggctaattttgtatttttagtagagacagggcttctctatgttggtcagcctggtcttgaacccctgacctcaggtgatccgcctgcctcgacctcccgaagtgctgggattacaggcgtgagccacagtgcccagccttgtctgcactttagatcttcttgagatcttttaaaaattccaaagtccaggccatactcccagggcaatcaaatcacaatctgctggggaagggaaagggacaatggcatcagttgtccaagctccacaggtgatttcaatgtgaagacaggtttgggaaatcactgagctaaagttttatctgtgtgatcaagaaaaagctaattcaagatgacagagagagaggcagctgaatgaaactaactatatacacctgcccttctctgagatcgtaaggtagccttgatttccccctgcaaagttatgaattctgaaaatatcagagagaaggccaaataaatgcttattttgctttttggatttatccatgcctccattcgcctccagaattatgaacaagtgagaaattcacctttttgtcttttcttggtacttttcatggaaccaataaagaattctgccatattacatgtattcaacataactaataagacatgacttgaatgcttttttattaagcagatcttatttaatttagtcagttttgatccaacccacatgccaaatgcagcttgccaaagtaaaataccctatggacattaggatcaaaatgcctcctttttaaaaagtaaagtctatttataatccaatcctttaagttgaaattaggccttttataaattgaatttcatgtattctacagaatcaacagacctgcttaagaactctctgaccactctcagaaaagttagtcagtgggacccctctccattcctcccaggacctaaacaaaaaagaaaaagggcaagaggaagaagagaaacatcagaagaaaagactacatataaacccttataaacctattcaaaataaatttttgtgattggccaaattccttctctctaccactgtttctgctaattttactctagaaagagttgtaaaaggccaggtgctgtggctcacgcctgtaatcccagcactttgagaagccaaggtgggtggatcacctgaggtaaggagttcgaaaccaacctgaccaacatggcaaaaccccatctctactaaaaataaaaaaaattagccaggcatggtggcgcactcctgtagtcacagccactcgggaggctgaggcaggagaatcacttgaacctgggaggcagaggttgcagtgagtggagattgcaccactgcactccagcctgggtgacagagctagactgtctcaaaaaaaaagagttgtaaaagacagatgacctatctacaatttctagtccagtggcttttattaaggaaagcttataatcatcaaagaggctcaatatacttttgaaataccacagtagtggttacacaagtgtgttaattttataattcattaaccttataatttgtgtgcttttctttgtatgttacacatcaattaacacatttttacaatagatacatttgtcctgggcagaatctctgaaagattctaagtaagcaggtatcagaaatagtcaaggttacatgatttgtcctaggtcacagatatagttagctacaaatgaagtccttcatatcactttcctactctttctgttataaattgtaaatatgttgatattattatactttttaatttaacattactttcctacttaagactatgaaaaaaataagtattacaagtgagaactgcaaaaaacaagcaaacaagtaaatagaaaacacatgtcctgggttcataactgtgcactattgaagctattgtaccatccatatgaggaaattaaataaagcctaacgcccatgcaaccattttttttctttttttttttttgtttgtttttgagacggagtctcgctctgtcacccaggctggagtgcagtggtgcaatctcggctcactgcaagctccgcctcccgggttcacgccattctcctgcctcagcctcccgagtagctgggactacaggcgcccgccaccatgcccagctaatttttttgtatttttagaagagtcgcggtttcaccgtggtctcgatctcctgaccttgtgatctgcccaccttggcctcccaaagtgctgggattacaggtgtgagccaccgtgcccggactctgtgcaaccatttcttaacctcaatatcctttttcaaatgctttcaatgtagacatatgtcaaactattagtagtaaaatcaactgtgtacctattcagatagactagcattatttttgatatgaaaatatagggtgatagaacggaaaaagggctaggctgagcattgcagagtgggttttagtcatggctgtcccataaagttgttttatgatttagggcaagacataaatctctctggtctaagagtattaaaatgagaggatgaacaccagagctaggactaaacagaatctcaggttccttccaggtttaagaaaactcaaggactatttaacaacaacaacaacaacgtgtatatatatatatatatatatatatatatatatatgctttcaaaatgcattttacaaatgattatctctattcaaatatgtttaaagtagctttgtaaaataaaaatactagaattcctctggcacctgcttcataaatacaagcatattcttcagcttgtatcaaatgcaaacctctgatctgttgtctaggtgcaacaacctctccctctcagttggctaataataacattgttgattctttatcatcatgagactcttttgcctgcatttaaaaaacttcattttatgaatcaatttcagatttacagaacatgagttatttttatgagaaatatgtatctctcaatatgtaacagaagtctttcttaatttctaataatctactgtaatttgaaaactttccatggatgcatttatttgactaccctttaccaactgcctactagcactctgctaggcactttcctgctcctgaagttactatacaagaacaaaaagactgtggaatggttaattgaaacaacattatttcatgaatgcctccatctgaatattacacttatagtatttaaaaaattaagttggccttgtaaccacacaaccttaaatgtttcaggataacttataagacattgttaaagtgtctaaataaacagttaaatgctcactgttaaagacaatttgcctaggcataactattataagatccaatttcatcctccctataccctttcatgaggtccttataaaactatttcatggtggccgggcacggtggctcatgcctgtaatcccagcactttgggaggccgaggtgggaggatcacaaggtcaagagatcaagaccagcctggccaacatggtgaaaccctgtacctactaaaaatacaaaaaaaaaattagctgggcgtggtggcatgtgcctgtagtcccagctacttgggaggctgaggcatgagaatctcttgaaccagggaggaagaggttgcagtgagctgagattgcgccactgcactccagtgtggcgacagatggagactctgtcttaaaaaaaaaaaaaacaacaacaaaaaaactatttcatgcttattctcagatctggggctcccaagggaaaatttgtgcagctctccagccaaatcagagaaacttaatgctctgaaaggatcaacaaaatgcctgtcaaggtgattggcatttcaatacaacaaccctggtttgctcttggtagggataatagacaatttaagggattaggaaatattaacattaatttttaaacttcaatcctaacttcttagtataagaaacaaaagataaattagtaaaacatgaaacttgagatttccaaaaccactcatcccaacacatattataaacatattataaaccgtaagtcagaggctcagtgagatttttcccacgttgttacataaaaaaaacaaagaaataaatctgtgcccaaattgcaacaaagagaaaaaaaattacaaatgaataatacaaaaacagaaataaaatctagaagaggtcaggcgtggtagctcacgcctgtaatcccagcaccttgggaggccaaggcaggaggactgcttgagcctacgagtttgagaccaccctgggcaacatagggagaccccacttctacaaaaaaaatttaaaaattacggccggtcacagtgactcatgcctataatcccagcacactgggaggctgaggtgggtagaccacctataatgaggtcaggagttggaggccagcctggccaacatggtgaaaccctgtctctattaaaaatataaaattagctgggaatggtggaacacccctataatcccagctactagggaggctgaggcaggagaattgcttgaacccgggaggaggaggttgcagtgagtcgagatcacgccattgcactccagcctgggagacaagagtgaaacactgtctcagaaaaaaaaaaaacaaaaaaataggctgggtgcagtggttcacgcctgtattcccagcactttgggaggccgaggagggtggatcactttaggtcaggagttcgagaccatcttggccaacatggtgaaaccctgtctctactgaaaatataaaaattagccaggcatggtggcgggcacctgtaatcccagctacctgggaggctgaggcaggagaaacgcttgaacccacggggcagaggctgcagtaagctgagactgcaccactgtattccagtctgggcaacagagtgaaactctgtcttaaaaaaaaaaaaaaaaggtcattttggagacaactggagaaacttacagacttaatgttagataatattaagaaattactgttttgttaggtgttaataatggtattgtgtttatgtagaagaatatccttacttgcaggtgatgtgtgctaaaatattaaaggcatagtatcatgatatctttatttttaaaaagtttaacataataaacatattattaaacatatgacaacatgttgaatatagatggtgagtataagggtggttcactgtactattattcctggggctttttctatgttttaaagttttaataaaacatttaaaatatcaaaaaaagcccacaaaactgaagaactgctattatactagaagaaaaaatttatgaaattcaattttaactagtagctagtggcactataaactggtagttgttctgaagaataatctgacaatgtggctaaaaagtgatagcctcagacctaatgaaatcattttagggaatatattctaagaaaaaaactggaagaaaaaagatttataaaaagatgtaacagcgctacaatttagaattgtaaaatagggctgggcatggtggctcactcctgtaatcccagcactttgggaggctgaggcgggcagatcacgaggtcaggagttcgagaccagcctggtcaacacggtgaaatcccatgaaatacaaaatcccgtgaaaatacaaaaattagccaggcatggtggcgcatgcctgtaatcctagctactcaggaggctgaggtaggagaactgcttgaacctgggaggtggaggttgcagtgagctgagatcacgccactacactccagcctgggtgacagagtaagactccatcttggggaaaaaaaaaattgtaaaatataaataaaaacgaactgaaaatcacccaaatgccaaataaccagagtattttagactttggttgtcatatatccattaaaaatgataaatatacagatgtgtagaaaagtacgtcaatatattgccaaatgaaaaaagactaaaaaaacctttatatgaattaaatttgtaaagactgtatgaatatgaaaatgactcagaagttatgtacttgcggtatttaaacataatttttttttgttttttgagacggagtctcactcttgtcacccaggctggagtgctacggcatgatcttggctcaccgcaacctctgcctcccaggttcaagcaattttcctgcctgagcctcccaagtagctgggattacaggcgcacgccaccacgccaggctaatttttgtatttttaggagagacggggtttcaccatgttggccaggctggtcacgaactcctaacctcaggtgatccacccgccttggccttgcaaagtgctggaattacaggtgtgagccacagtgtacagccttaaacataatttttaaaatttcatggggacacgtgctattagaaaaagtataaacaatgcaaatataaaatcaggaagaactgcctgggcacaaataaagaaagcacctgagggctattactgaccacaattcaaatgagtattcacaatttaaatacagtactatcctgggcaaggccaacattgctaccattaaaaagacacaggctgagcacagtggcacacgcctgtaatcccagcattttgggaggcaagagtatcgcttaaacccaggaggttgagactggcctgggcaacataggaagacccattctctaccccaaaaaaaaaaaaagccaggtgaggtggtgaacacctgtagtcccacgtgttcactcaggagactgaggtaagaggatcgcttgagcctgggaggttgaggcagcagtgagccatgatcacaccactgcactccagcctgggtgacaaagcgagactctattttttttttaaataataatttaaaaataaaaagacacagaaaaagagcatatcattagcctggacagtacccagtcttcctcaattctatttgttattttaaaacaatactcagttttcctcaattctttccaatatttttttaaattatggaaaaactgaagaagtttcaaagaaaaaccaagaggtaaagaataggatggaaaagaggtaattttgaagaatggtttgaaatcaaatgaagtgtgacatgactattaacactgaaatatccatggggaggcttttgaatggagaccctgaaaagctgatgtatctctcaatgcccacagatgactcaccaagaagagagggctaacaaaaccctcaaagtttgttgttttacagaagagagatttctttattgtgctggcaaaagttactggcataggaaaatgagggaggctgggtgtgttgtcattgaccatctgtttttctacagggtgtttacttatccatgatcacctgatcatattagaatgtctctaaaacttgactcagttactcaaagcttgaatcaattatctaccatttcaaaattccgcagtgccatcctgctcccacacactggtcactcagcaacattcaaatgtcttagacctggcatccagggccccaagaaagtacgtcggcttcacttctccacaactcctcaacaaaccagcaaatcagacttctcactatttcattacctaaatattccttacattttcctatgtccatcattcctttggttactctctccttaatcccatttgttgcaatcttacccttccattttaataaattttaatttaatgcctctatgttatctcaaacactacctgttatgtgttgacttgtgccccccaatcccatccctgccaaatatgttagtcttaactctcagtacctcagaatgtgacctgatttggaaacagagtcgctgcagaggtaatcaattaagatgaagttactcctactggagtagggtgggacctactagtgaccttataagggaaatttggacacagagacatacagggaaaacgccatgtgacaacagaggcaaagatggagtgatgcagctacaagccaaggagcaccaagaattgatggaaggctcagcctctcaagtaggtgcgattagatgcacatgccagcacgcctggctaatttttgtacttttagtagagatggggttttaccatgttggccaggctggtctcaaactcctgaactcaagtgatccacccaccttggcctcctaaagtgttgggattacaggtatgagccagctatttgggaggctgaggcaggagaatcacttgaacctgggaggcagaggttgcagtgagccaagtttgcaccactgcactccagcctgggcaagggagtgagatgctgtctccaaaaacaaacaaacaaacaaacaaacaaaaaagagcagctgggtgcagtggctcacacctgtaatcccagcactttgggaggccgaggcaggtggatcacctaaggtcaggagttcgagaccagcctgaccaatatggtcaaaccccatctctactaaaactacaaaaaaattagctgggcgtggtggcagttgcctgtagtcccagctactcaggaggttgagacaggagaatcacttgaacccaggaggcggaggttgcaatgagccaagatctcaccactgcactccagcctgggcaacagagtgagactccatcacacacacacacaaaaaagcaaaagcaaaagcaaaagaaaatgtatataaatgggtactacggaactgatattcaacagattcaatatcagtaaaggagctgattaatgggaacttttgttgcctttgtgtgtgtgacggagggggaggggttgcagctggttaatgctaaatacaaactgaaatatctgtttaaagtatgaatgccctctgaatttggtgctcattaatattaactgatatagttaatttattaactgataatgaatattataactgacatagaatacacaattcatcacaaagtaaaggtatggtcctggccttctgctttatagagattgtatatcaaataaagcatatgaccaactctagggctgcattcctccttccatcaaagccatagtatttcatttgtgtatacatctaaatgtaactctagttatttactaattaactcagaatgtttattgagctcctaggcagctactttatgtcctttttagaataaggtgaggtagaaaaagatcacatttaaaaaaataaatgaatataccagacatcaaaataggcagacactggagctgaagggagggaagggggaaggcagagacagacaccagcccagtcctaaaggagcactcacccaatctagtgagaagtaagagagtaaactagctccatatctctcctttctccccatgctgatcctacacttcacaatcaggcttcctttcctaacgtacagctttcatcacatcactggcgaaaaacatttgatgacttcccactacctagtcaatcaagttcaaacttcccagcttggaatagaaatgggtattcaaagccttccatgatttgattatatggtatgcagagattaggaaggcaggctttgaaattagactacctggactcaaatactttctgtatcaattgttagctctcttcttcattttatatgtaaaaagggattaaaaaccagtgcctacctcatcaggttgttgtaaggattaaataaaatgctacttatgaaatacttagcacattatcttgcaaatagtaagcatgcaaaaaatgtgagccattggccaggcatatggcttgtgcctataatcctagcaatttgggagaccaaggcaggagatcacttgagcccaggaattaaagactgcaatgagttataatcacgccactgcactccagcctgggcaacagagtaagaccctggttctatttaaaaacaaaacaaaacaaaacaaaaaaaccctacccaaagaacactggggggaaagaaaagccactactactattaatttttttaagttttatttattttaggttttatctattattgttactattgttcatctccatttccacccttaattccaacaacacccttataacaatcctcttctccaagcaaagtggactctttaccatctcctaaatacccacctctgtgtttatgctttcactcagcctggaaaatacagcactgtctcatctccaagtattaagatactaactattcttggcagcttcgttcacagaccacctctttcaggtaccattctctagtatcccagctccataacacattacagacattcctcagcatagaaaccttggctagattcatcttggtatcttgcagagttctagccagtttccagaatacatggtagggctcaacaaatgtttgagaaaataatacctatatttcctttctcgtccaaccactctcttagacaacagctccacaatacaagtaaaaagagttcttctacagtatttcataaagctggccagctaattttctatcaccaatgtggtaatttctaatacagtacttaatacatagtagatgcctaaatattcaaggagctaagctgaatttcacctcatcttttaatttcatttatcattctattcattatgatcaagtatggctcatccttagaaataggttttagtatttacttgcccacaaactcatctgtcaatttctggccatcccccccaccatcccaatatgtcatttactggtttgggggagacaatattcaatacctcaataaagtaagaatcagaaaattaaatgtctgcagggccataaaaataaagagcaaagcaagacagcaaggcagactatggagaactaggaaacacatctcacctaaaagtttcagctggttaccgctataaatgaatatgggcttgctgttgacagatcttccaatttttcaaggttaagtcagaaactcagaggtctgtgtacatttttaagacattaaaaatattgtgtaaaccaaacaaaatacttatacaggtcaaatccaaccacaggttgccagtttgcaacctctgctacagaagttctctgcaaaagtgatggcgtgagaagagttctatcctagcagataatctaaggcagcccctaaaactaagtagctccttggaagcatctcctgcaacactcagcccaactctcaccattctgattgacctgaaaaccaaattaatttggcaatttaattgagcaaaatgagcccctgctctgtaccaggtgctgaggaatcagaaatgaacagtagtgctaaagtacagctaatatttattgagcatgttctaggtgccaagcactgttttacacgttatgtatattgactcatttaatcctcacaaaaccctatgagattactattatccttaaagactgaggcgcaatgaggttttatttgtccaaggtcacacaatcagcaagcagcagtgcttaataaggacctgagacagactccaccaaaaagagctcacaatttgaaagcaagccccattcaataaatgatgctgggatcactggttatacatagggaaaaaaaatgaaactggacccgaccttacactacacataagaatccattccagatacattaaagatctaaccattgaaaacaacagtaggtattccagaatataaagaataattgcaggctgggcacagtagctcacacctgtaatcccagcactttgtggactgcttgagctcaggagttccagactagcctgggcaacatggcgaaaccccgcctctacaaaaaatgcaaaaagtagcagggcatggtggcgcatgcctgtggtctcaactggcatgggaggtgggagggttgcttgagcccaggaggttgaggctgcagtgagccgagatcgcaccactgcactccagcctcggtgacagagcgagaccctgcctcaaaacaaagaataactgcaaatcttaaaggaaaagattgataaagttgatactaaaattcagaactttttaacaaatgacaccttaaaacagatgttttaaaataagcaacaggccaggcgcagtggctcacacctgtaatcccagcactttaggaggccaagacgggtggatcacttgaggtcaggagtttgagaccagcctggccaacatgatgaaaccccatccctactaaaaacacaaaaatcagccaggtgtggtggcacatgcctgtagtcccagctacttgggaggctgaggcaagagaatcacttgaacctgggagacggaggttacaatgagctgagatggcacgactgcactccagcctgggcgacagagcaagacttcatctcaaaaaaaaaaaaaaaaaaattaaaataagcaagaaactgggaaatgacatctgtaatatctaccaacaacaaaggattaataatcagaatatataaataaatcttttgtaaaagacaacccaataaaaaaaatggcaaaacaagcccgagcattatctaatccgtgtaaagctggcactaccacagttaccacacagtacactccagaacaatagaccttgccatcactgactgatataaatattcaggggtctgtgttatgctgcaggtacacagagcatgggtaatccagcccaaagggcagagccaagacgtttattcattctctatcatcatatagacattggatggcaaattagaggttgaacatccaacactcaaacacatagatcaggggttggcaaatgtttttgtaaagagtatttccagctttgtgagctgacacaacacatctctgtcacgactactcaactctgctattggtaccacaaaagaagatatggacaatatataaataaatgagtgtggctatgttccaataaaacgttatttacaaaaacagatcgtgggccagatttgacctatggaccacagtctgtcgacctctgacatagatagttgtgctttttctacactataggtaggacacttcccatgttttcccctgtcttttatgtctgctgacacctctgatttccttaaccaaaaactacaccacacttgacagctttgcaatggtttccaaaactctattactctgccaaaaaaaccttttcgcccttattatcaatgagaattctcccctcattttcctttcacttttttttttttttttgagacggagtcacgctctgttgcctgggctggagtgcagtggtgcgatctcggctcactgcaagctccgcctcccgggttcacaccattctcctgcctcagcctcccgagtagctgcgactacaggcgcccgccaccacgcccggctaattttttgtatttttagtagagatggggtttcaccatgttagccaggatggtctcgatctcctgacctcgtgatccgcccgcctcggcctcccaaagtgctgggattacaggcgtgagccaacacgcccagacttcctttcacttttttaaacctctttgacagacaccaccccaaaccagaaatttaaaaaactccccctaagccactcacaatgtcaataatcaacacctgcaaattctaactccactcaatgcccacagcctctgccttagttcagatcctcattacttctaactctgctcagtgcccacagtctctgccttagttcagatcctcattacttctaactctgctcagtgcccacagtctctgccttagttcagatcctcattacctctctggtcttcagtctaccctccttccaaagaacatccatttatctcctagaaattaaacctccaccacatactccccttctcgaagatcttgaatgcctctctcagctaaggattcagtccaaactccttagcaaggtccttcacaaccaggttcctaacatggtcttcctagtctcatctctggccatgctttcacacacattctatgctccagccacattcagttattaatacattccctgaaaacgtgtctttacctgaaaggcccttctctccatttcactggcaaattcctgtatcttttaggacacatctcaaatgtcaccccttcgcaacaccttccctgattctttgagcagacacacccatctccgtgtccttatagcgtttaataactcttctttggcatcgaccatcctgaactatgattgttcacatgtctacttcactcatggggctgcatacccaaagtgaagtgactctgccttaaaaacttctgaagctacagagcccagtataatgcttgatatgcagtagatgccttgaggcacagtaaacgtttgctgaatggaagacatgcctggcagtaggagtagggtttcttaacctggggttcatagacaggagtctatagataggacttcagtggggcttgtgaacttggacagggagaaaaaaatctcttttactaacttttaactgaaaattaccattctattcaaatatgagtgtaggtaacataccattctagtattagcagttctgtgactctgtaacaacagaaatctcaaatatctttatatcatactacaattgttgcatataatcttgaagtagcctttatgcgcatcatgtctttgaaattataattatcggatccatcactaaatctgatttcttaacgtgctgataaacaagtatatgcatattagatttgtatattttggaaactgtattttaatataattggtgttccttataattcaatgtactttattttatacaattaaaaaatattattctgaaaggggtccatggcacagataaggtcaggtcttcctgcattagaaaaacccagaataggctgggcgcggtggctcacgcctgtaatcccagcactttgggaggctcaggtgggcagatcacttgagctcaggatttcaagaccagcctgggcaacatgttgaaaccccaactctacaaacagaaaaaaaagaaaagaaaagaaaagaaaaacccagaacaaatgaattgtgttgctgtatatacatatggtattgacagttttattttatatatgcccgcataatatttttgttcgctaattctctttgattatatggggccctggacctattttccatgactaatttgcatatttccttcagaactctcccatagcccatgcgaactttgaattcttctctaacatgatccaacttcaattaataaaatagagactctgggtgtctacaatttttcacttttcttttttaggattttgtgttcctttgtggtaaacacctagaagagaaggagcatctctcttttttttttttctttagacagtgtcttgctctgtcgcccaggcaggaatgtcatggaatgaccatagcatggctcattgcagccttgacctcccaggctcaagcgatcctcccacctcagcctcctgagtagctgggactacaagtacaagccacatcaggtggctaattttttttatttcttttgtagagatggggtctgccagctcctgggctcaagaaatcctcccaccttggcctcccaaagtgttgggattacaggcgtgagccactgtggctggccggagcacctcttaaaactctagaaagttagaaggtctcaaagataacttctttgcacaattagagatgaaccaggaaataccaaataactggctgcctatacttttttgtattcccttcagcctttgtattgccacactcattacaggaagaaaacaaatttaatagttatctggtatatactgttatgcttcatttcttgttgtttttgtttgtttgcttttagtttcatcacaagaatgttatgcttcatttcttaacacctttctcccagctagcaaattcctttaaggcaatgtgtttagtgaggaagcagccgacaatttctagtacccctctgccactaacttgtaagatcttgaaaagtcaactttacctttctatgtttcagctaaaatcactacctgatttgaaatctttacttgatctctcaggcctttgtagtttttatacattcactcttcttcaccattttactggcttcaataacgcctttctgatgacctctccaggtgactctgctcttaagctgtgggctgtccccttccagggaagacaccttgggtcaccgcccccaaacagccaggtccctccttttaaagacacacacaactccctaagttgataaaggttctctccttccttgccaaccagttccactctctgtgcctcttttgctggccagctcctgcacccaaacctcagtctccctttgtcccccttttctctcatcaaacacctcctttttcctgttgcttcccccaagagggggtggaggatgcttgggacataagtcttcagagccttgggagttatacagctttgcaattcagccccagtaccccaaggactgccccaatctgaaccagcgtctgtacccaaagggccctcattcctcatcaatcacctccttccctcccagcaaagaactgctccagccctgacagcctgagcttggcccccatgcctccaccccaatccccaggtcctacctgcattagggctctaacaccgcctaaggcctaacccagttccacgtcctgccatcctctcagcccatagaccccaatcccggttcccttcggacccagtgttccttctccgcgaccctgaccacgaccccacgaccggctcccgcctgttccccaggcctggagcgccaccccgtgcagaccccggccagccctgcactccctcagtgcaccggcccccgcgcccagcaccctccccacccagcccggccgccgctccctccagcgcccccgcccgcaggcctggggcccgctccccaacatggcgacggggacacaagcgcggcgggcggggcggctccgggccgggcccgctctcagaccgtgccactcggtcgcccggcgccatttttccgcgcgggcccgggcggcgcctcctccccgcgaagccagcccgacaaggaccgcggacgcccggcgggcccaccccttacgggcccgcgccgccgtcccctcacctgagcgcggccccggccctcccgggcgggccttggagcgccggcccgggccgtgcgtgcccgccgccctcggtgcgtccgtccgtcagtcctcgcgtgcgcccgtctgtcccgccgcccgcgcccggccgcccgcagcccgacccggcagggcctcacggagccggcggggagggggatgggccggaccgggccggggagggagggggagggagggagagagggagggagcgcgagagggggcggggcggactcgaggggcggggcattgcccacgtgaccagacgtccccgggagcgcgaggtggagcgcgcgccagctcccttcggtgctgagtgcttagtgctgggatctcgtgggtctctgtcggctttccagggctattctctcgccagtgagtcccacttcggaagcacacattgcacagtcttttgcgagcgctctgagtatccttggacatggcaactccaagcctcagtttacccatctgaaatatggggaaaatcatagtgcttgtgaagagcaaatggaggtgggcttggaaagcacttgtcaccgtgcctgacacatactgtctaataataagcttaatgggatatagataaaagctttcattattatttgcctctaaatccctctcttctttttcccatcattacctccctagcaagctaaaatgctcagtaaatagaattattgatcgaacgagtgtggcccctcccctcttcccaaacgtagaaaggcctcctcagcactggacttcatgtctgtcatacaggcctggattcatatctggctttcactcttttttaaaaattttctgttttttcccacactacactgatgtattttttaaattttcgtaagtacgtagtaggtgaatatatttatggggtacatgagattttgatacaggcatgcgatgtgtaatcacatcatggtaaatggggtatctagcaactcaagcatttatcctttgtgttacaaataacccaattatactctagttattttaaaatgtacaagtaaattttgtgtgtgtgtggttttttttttgttttttgttttatttttgtttttttgagacggagtctcactccgtcgcccaggctggagtgcagtggcgcgatctcagctcactgcaacttccgcctccctggttcaagggattcgcctgcctcagcctcctgagtagctggtactacaggcgcatgccaccacgcccagctaatttttgtatattttttaagtagagatggggtttcaccatattggccgggctggtcaggaactcctgacctcatgatccgcccgcctctgcccctcaaagtgctgggattataggcgtgagccaccgcgcccggccaattgttttttactgtagtcaccttcttgtgctagcaaatactaggtcttattctttctaactattcttttgtacccgttaatcattcccacttcccacctacctccccattaatcttaccagcctctggtaaccctccttctattctctatctccatgagttcaattgttttaatttttcgctcctggcccggcatggtggctcacgcctgtaatcctagcactttgggaggccaagatgggcggatcacctgaggtcaggagttcaagaccagcctggccaacatggtgaaaccctgtctctactaaaatacaaaagctaggtgggcatgatggcgggtgcctgtaatcccagctactcaggaggctgagacgggagaatctcttgaacctgggagatggtggttgcggtgagcctagctcgcgccactgcactccagcctaggtggctgagtgagactccgtctcaaaaaaaaataaaaaatagttaattttttgctcccacaaataagtgagaacatgtgaagtttgtctttctgtgcccggcttctttcacataacataatgacctccagttccatccatattgttgcaaatgacacgatctcactcttttttaatggcggaatagtattccattgtgtatatgtacattttatttatccattcatctgttgatggacacttaggttgcttccaaatcttggctgttgtgaacagggatgcagtaaacatgagagtgcagatctcttccatacactgatttcctttctttccggtgtatacctaagaatgggattgctggattgtatggcagctctctttggctttcgctcttgatagctgtccttgcctctctgaacttgagcatcttcatctgtaaaatgggagttggggtctgttctgagcatcccaggagatagaggatgagcaggtggattgtaaactaattaaacaaatcagtcctactgatcccatagaagaaagggagtcaggaaccctttcattccatcaatatttattgagtacacacagtgtgcttggactggtgtagtagatacccaccatcttttcacattaccctgaccgccctctaatctattctccaccctgctgtcagagtaatgtttctaatgatcagaaatatgatcatgtcactactctacttaaaagtatctgttgatggccaggtgcagtggctcacacctgtaatcccaacactttgggaggctgaggcaggtggattgtttgagcccaggagttcaagaccgggctgagcaacatggcaaacgctgtctcaacaaaaaatacaaaaatggctgggctcagtggctcatgcctataattccagcactttgggaggtcgaggtgggtggatcacgtcagctcagaagttcgagactagtctgggcaacatggcaaaaccccatctctactgaaaatacaaaaattagctgggcatggtggtgcacacctgtagtcccagctaatcgggaggctgaggcatgaggcaagaatcacttgagctggaaggtggaggcttcagtgagccgagataacaccactgccctcctgcctgggtggcaaagggaaaccgtgtctcaaaaagacaacaaaagacaaaaacatagcaggcatggtgctgcacacctgtggccccagccactttggaggttgaggtgggaggattgcctgagcctgggaggttgaggctgcagtaagctaagatcatatcattgcactccagcctgggcaatagagtgagaccctgtctcaaaaaaaaaaaaaaatctgatggctctacattgctcttaagataaaggccaagccgggcgcggtggctcacgcctgtaatcccagcactttgggaggccgaggcgggcagatcacaagatcaggagatcggaccatcctggctaacacggtgaaaccccgtctctactgaaaatacaaaaaattagccgggcgtggtggcaggcgcctgtagtcccagctactcgggaggctgaggcaggagaatggtgtgaacccaggaggcggagcttgcagtgagccgagatcgcgccactgcactccaggctgggcgacagagcgcgactccgtctctaaaaaaaagataaagaccaaataaatgttggcctccccacatctctagatttatcttagggccctcttcccctttctctgggttgcaactacagtgatatttcttacacattgttctccctcctttctgagaacccttgcacatgctgatccccctgcctgcaatgctctccccacttagataactctcagtcttcagatcccagttcaaacggggctactccaaggataccttccctgacccattcccacacaggttttcttagcacgatatgcttgtccttagtagaatacactgagtcattattacctgtctttgccactagactatggacaccataaggaagaaaaccttatccatcttgtttaacattgttttctcagcatatagcacagcacctggcacagagtaggtgctcagtaagtatttgttgcgtttgtgaatcctaagcacaatactaggtattgggcccaagagggcagacaggagcaaagagaaccacaggcaaccgcaacaggggggcaccttagacctttgagcctatgaaattaacaccaaataaatttaaaatatcctggaaaaaaaaacttttctgaagctttttattttaacttttaaaaactgaaatataatttatatacaataaaatgaaaaactattaagtgtatatctaataatttttttgcctacattcctgtgttaccaccacctagatcaagttatagatctatcaacccagaaagttcccttttgttctcttttgtatgttctcttctaataaatacctgctcccccagatgtaaccattattctgacttctagcaccatagattaactttttttttttttttgagatggagtcgcgctctgtcgcccaggctggagtgcagtggcacaatctcggctcactgcaagctctgcctcccgggttcacgccattctcctgcctcaacctcctgagtagctgggactacaggcacccaccaccacgccaggctaattttttgtatttttagtagagacggggtttcaccgtggtctcgatctcctgaccttgtgatctgcccgccttggcttcccaaagtgctgggattacaggcatgagccaccacgcccagccgtagattaactttgacagtttttgatctccatagaaacagaaccatacagtttgtactcttgtgttagcctggaaatctgacatagccaaagggtgattttttggataaagatacaattaatgaatgacttgattaattaacctgaaagactgaatgaaaagctctggctacttcatcctacagacacagaggtcctgacaacagccagcccagaggctgagaagacctcactgacatatttccaaacccacaaagacttctagagataagaaagctctcaaagattccagaaactcagcaataagactgggtgctatggctcatgcctgtaattccagcactttgggaggccaaggcaggaggattgcttgagtccaggagtttgagaccagcctgggcaacacagtaagacttcatctctacaaaaaatttaaaaattagctggtcatggtcgtgtgtgcccgtaatcccaactactcatgagactgaggtggaaggatcacttcagcctgggaattggaggctacagtaagccaagatcacatcactgctctccagactgggtgacagagtgagaccctgtctcaaaaaaaaaaggcaaaggacttgaatagacatttcttcaaagaagatatacaaatggctaataagcacatgaaaagatgttcaatctctgtagtcattaaggaaatgcaaatcaaaaccacaatgagataccaattcataccctatttatgtatgtatgtatttatttattgagacagaatctcactctgtcgcccagactggagtgcagtggtgcgatctcagctcactgcaacctctgcctcccaggttcaagcaattcttgtacctcagcctctgaagtagccggaattacaggcgcgcaccaccatggccagctaattttttgtatttttagtagaggtggggttttgccatgttgtccaggctggtctcaaactcctgagctcagtcattccccctgccttggcctcccaatgtgttaggattacaggcgtgagccacggcgcccagctgctgttatttttttaaaaggcagaaaataacaagttttggcaaagatgcggagaaattagcacttttatgcattgctggtgggaatgtattttgtttttgttttttgtttttctttgagacgatctcgctctgtcacccaggctggagtgcagtggtgcaatctcggctcactgcaacctccgcctcccgggttcaagcaattctcatgccccagcctccagagtagctgggattacaggcatgcgccaccatgcccggccaatctttgcattttctgtagagacagggtttcaccctgttgcccaggctagtctcaaactcctgggctcaagtgttccacctgccttggcctcccaaaatgctgggattacaggcgtgagccactgcgcccagccaggaatataaattgatgcagccatggtggaaaacagtttggcatttcctcaaaaagttaaacataggcgcccctgtaatcccagctacttgggaggctagggcaggaggatcacttgaacccaggagtttgagtccaccctgggcaacatagcaagacccagtctcaaggaaaaaaatgttaaacataggattaccctatgagccagtaattccacttctgggtattcatccaaaataagtgaaatcacattagtaccactgtactccagcctgggtgacagatgagaccctgtctcaaagtttaaaaataaataaatgaacaagccaggtgtggcagcacatacctgtggtcccagctacccaggaggctaaggcgagaggatcagttgagcccaggaggttgaggctgcagtgagccatgtttccattcctgcattccagcctgggtgatggagcaaaaccctgtttcgaaataaaatttaaaaaataaagaagtgaaagcagagtttcaaagagatatttgtgcacccctgttcacagcagcattgttcacaatagccaacatgtggaagcaacctacatatctatagacagttgaatagataagcaaaatgtggtctatacatgcaatgaagcatcgctcagccttcatgaaggaaggaaattctgacccgacgtacaccacagatgaaccttgaagatattatgctaagtgaaataagtcggtcacaaaaagacaaatattgtatgattcctcctatatgaggttcctaaagtagtcaaattcataaagacagaaagtagagtggttgccaagggctagagggagagggaatgggaagtttgtgtttaatgaatacaaagtttcagttggggaaaacaaagttctggaggtagatggtggtgatggttgcatgtgaatatacttaatgccaccgaattatatgcttaaaaatggttaaaatggcaaattttatgttatatatgtattttaccatacacacgcacaaaagattccagagccactatcctaattttttcaccttgttgtccatgtccttaagccaagggtcatgggtgttcctgggatctgcaagaatgcaaagagctgagaagacaggggcgcattgggcacctgcagatcctgtaggtaaaaatagcaggagcctaggcaacacaaatacttgttgcctgcaggcaggcagcaaaagaacaaaaacaggccataaactagcagatagtatagcataatgattacaatattgggctctgaagccaaagtgaatctgaacacccaagttcagattctagctctgccatttattagctatgtgaagaaactgcaaccaaaaggagataaatgacttgtccaacagggtccaaagtattttctcatttatattgtttaaaaatctttacatgggttttgtttcattctatatccccagtagactgtaagctccccaaggaagctatgtttgtaatatcctcacttgaaatgtaacttaacttctttgtgcttcagttgcctcacctgtgggatgcagagaataagggctcctacttcataaggttgtcaagcatattaatgaatttatacctataaatgtttaggagaaagcttagtgcttatgatagtctcaacaagcaatagattgagagaggcttctgaagaggtggtcaggctatttcataaaatgttttgagcaagaaaaacagtcctaaaacatccaggattgttctagatttggactagagtgaagaaaaagcaaatcaattgttctttgataatttgatttgtatttattggacttctactttcatgtgtgtccaaacaggctcaagctctgcagtgataagactgacagtgaatacttcaatgatgtctttaagaaaaacaataataaaacaggggaaaaaagaaagaacaaaaccatctagaaagtgtcaacattttactgtctgcagggttcgtcacaacagtgccaaatgacaaacttaccacatttagttggatgaattttgccctgcagaaggatatcaccttttttttttataggcaaacagtttatttattcatcctccttctcttcctccccatcttcttcatcttcttcttccatcttttcccaggcaactttagcaggaccttttgtgccgtccaactttcctttcgacttatagtcagcaacatccttctcatacttcttcagctttgccaccttagtgacataaggctgcttttcactgtcatttaagttattccacatctcacccagcttttttgccacgtctccaatagagatgccagggtttgtggatttgatcttggggcagaattctgaacagaacaggaagaatccagacagtggccttttgggggcattaggatcgttcttgcctcccttagctggtccataatccttcatttctctatcacagtgcactttatccgcctttgccatttaatcgaatttagactctctctctctttttttttttctgagatggagttttgctcttattgcccaggctggagtgcagtggcacgatctcagctcaccgcaacctctgcctcctgggttcaagccattctcctgcctcagcctccccagtagctgggattacaggcgcccaccaacacgcccggctagttttttgtatttttagtagagacgaggtttcaccatgttggccaggctggtctcaaactccttacctcaggtgatccacccaactcaccctcccaaagtgctgagattacaggcgtaagccgccgtgcccagcctagacttctctttcccagacattgtcttccacctctcagagcactttttggaaaattctgcaaaattgacagggacctctggatttttcttatgctcttctctgcacgtctgcacaaagaaggcaaaagcagacatcttgccccttagtttcctggggtcacttctagccatcctgactgtattgttcactagtcttgaaggatatcacttttaagtggacaccattcacatgacattataatttgcaaatttattatgataatttaccagtagatggcagtaaaatgccttgttatttcagaatctgttcgttgtaacaattttcagatatatggaaataaaatgccttgaggagggggtcacttgtgctttgcataaagacatgctatggcgaggcgcagtggctcatgcctgtaatcccagcactttcggaggtggaggtaggtggattgtgtcagcccaggaattagggaccagccagggcaacatggcaaaaccccgtctctacaaaaaaatacagaaattagccaatcgtggtggtgcatcatgcctgtagtcccagctccatgggaagctgagatgggaggatcacttgagcctgggaagcagaggttgcagtgagctgagactgcaccactgcactccagcctggatgacagagtgagactctatctcaaaaaaaaaaaaaaaaaagcggtggtggggtgggggcttactatgggcaagccatggcttgctcttcaggaaaaaaatcattgaaaaaatagaagaaatagactaataattacacaattttaaaaagtggaagaatatcaagtgaccatacatacacaaaaaggtgggggtgggggagaaaaaaaaaactgttttcaaaaatattctgaaattttaaagctttttattagagtataatataaagacataaaagtacagaaatcgtaagtgtaaagcctgttgaatttccacaaagccaacacacatgtctaacaaacacccaaatcaagaaatagaacattcagccccacagaagccccttccagtcattacccacagcccccaaggttaaacagtattttaacttctaactccatagattagtctcaccaggagttaaacttacagattcatctacattgttgcatgtagttgtagcatgttcattttcattgctgggtagcatttcattatttattttttatttttttgagacagagtcttgctctgtcacccaggttggagtgcagtggtgggatcacaggtcactgcagccttgacctcccaggctcaagtaatccttctgcctcagcctccctagtagctaggaccacaggtgcatgcc

SEQ ID NO: 437 - DNA, 230252 bp, Homo sapiens
atttttctcacctactcctcaggaagcttgctccatcaaatatttttatctttttcataccttcagtttttctggttccttccttttttttgcgtgtatttcatgttaaaaaaatacttggccataaatccctcttaaacgttgcctccccatcccatgttttctgcacaacccatcttttggaaagtgtactttgcacttactgtctctacttgctaatgttcaattcactcataaaaataactgacatttggattttgtcccaatgttccattgatatttctgtcaccaaggtcactaaaaatccccttcctgacaaatcaaattggtccttatcagacttcactttcctgcagcattaccactgttcatcactctctttcctgaccctctttcgtctcttccatgacaccacaatgtcctggttatttctcttaaatctctggcttcttatcctccaattattaagtattagtgtggctgctgaccctctccttttcttactctacattctcttctcttccagagtgacttattggctgtgctaactgagataaatcactggatctttgtatttttatcatctataaaatggaaaaaatagaacctgcttcatagtgttatggtagatattaaataaataatgcatagaaacgttttagagagcatctggtttataagaatgactcaatatgtgttaaatattgtaaggttattcagatactgaaaaatgcaatattgaaaaggtatcaattatcccgtcattaacttttacaataaatgtaatccccattatacttcaaatagtagtttttcaagaaacaacagatgctggcgaggttgtggagaaataggaatgcttttacactgttggtgggaatgcaagttagttcaaccattgtggaagacagtgtgatgattcctcaaggatctagaaccagaaataccatttgacccagcaatcccattactgggtatatacccaatggaatataaatcattctgttttaaagatacatgcatacgtatgtttattgcagtgctattcacaatagcaaaggcatggaatcaatccaaatgcccatcaatgatagactggataaagaaaatgtggcacatatacaccatgggatactatgcaggcataaaaaggaatgagatcatgtcctttgcagggacatggataaagctttaagcaatcatcctcagcaaactaacacaggaacagaaaaccaaacactgcatgttctcactcacaagtgggagttgaacaatgagaacacatggacacatggagggaaacaacatacaccagtcctgtcagtggggtgggggcaaggggagggagaacatcaggacaaatagctaatacatgtggggcttgaaacctaggtgatgggttgattggtgcagcaaaccaccatgacatacgtgtacctgtgtaacaaacctgcactttgtgcacttgtatacctgaacttaaagttaaaaaaagaaagaagtattgaaaagatataaattatcccctcattaacttatataataaatgcaatccccattatacttggaatagttgttgttgaaaggaaatagaccaactgcttagaaaactatctggaagataaactgtacaagggaaggcaaaaacttaaaacaaagtttcaggccgggcatggtggctcatgcctgcaatcccagcactttgggaggccaaggtgggaggatcgcctgagcccagaagttaaagaccagcctaggcacatagtgaggccccatgtctaaaaaaaaaaaaaaaaaattaaccaggcacacgatggagcctggctgtaatcccaggtactccagaagctgaggttgggaggatcacttgagttcaggctgctgtggccacaaactgagattgcgctactgcctgcactccaggctgggtgacagagtgagaccctaaaaaaagaaagagagagagaggaagaggaagaggaagaagaggaagaggaagaagaggaaggagaaaaacaactaagtttattggcaaaagaatcacaaaggtttaattaaacaaaatttttttttatatacgggtttcatacatgattttgtagtttggacattggctatccatctggaaataaagttaaatctataatttagaaataaaattaaaactgtaagttagatcattcataaaaatgtattccatgtgggttaaagtcacaaaattttaagaaattttaatatatgtattttaattttttaaaataaaatttggaataaaacccaatgggaacccctgtgttagtaagcctgataagaaaaaaaagcattcttcaataacacaaaaatcaaaagtcataaaaacttttcaaaatcaaatagataaagaaaaactataaactttaagagaaaatgaacctattgagaaggaacattttcaacatttatagcagactaagaattaagatcaaatctttataaggaaatgctacaactaactaatttttttttttttttgagacggaatctcgctctgtcacccaggctagagtgcggtagggagatcctggctcactgcaacctccgcctcccaggttcaagagatgcttctgcctcagcctcccaagtagctgggacgacaggtgtgcatgaccacgcccaactaatttttgtatttttagtagagatagggtttcaccatattggccaggctggtctcgaactcctgacctcgtgatccacccgccttggcctcccaaagtgctgggattacaggcgtgagccaccgcgcccggcctctaaataaaaatttttaaagagttaattgaaaagtgaatatgatatgagttggcaaatcattgaggagtaaatgcaaatgctaaaagaggctcaatttttctaaatatgaaaaatacacaaatttaaaatttcaagttttttgtaattaatttttaaaaatctatacaaacacagaataaatgatatgatatacctttacatacccaatagccagcttcaaaatttatcctcaaaatttctgtatttgcctaaggtaaattttagcatttaccctagagaaactcttgtgcatttgaacaaacgggtgtgtaaaatgatttttattaatcattgtttgcataaagtaaattggaaacattgattcccagaaaaatgaaatcattaaactatagtacatgcatactatgaaatgccgcgtggcattaaaaagtatgtgagttaaatgccaaaatcttcaagacacgctgttgagtgagaaaagcaagttgcagaataatacatagagtatcatactgttatttaaaaaaagaagcaaaataatatttatgtctctattcatctatccatcatctatcaatcatttatgtatttatcaaactgtagcatagagtggtataaaacgatattcattaacaaataacaatgattacttctggagaggagtgtgggattgttgttcatcaaagattctttatatttatcctaatatttgggatttttcacaataatacatttataattatgtaattaacaataaataccattataacaataattaagagcattggaataagcaagttgggtgtgaatctgaacagcagcacttattatacaggtaacttgggtctctcaatctcttttttgccattgtcaaatagggttaatttaatctactttgtggagatgctgtattaactgagataatgtgcataaaataatctataatatagagttggtattgagctgaagataaatctttgtactcttattaaatcaattttgaatatcagggaactgggagaaaaagtacttttttcctcagaagactgcatctgctcaccagagtttaattcaacaagggtgatgaccctgtcttaaacttgcaaattactgatgatgactctagtatctgatgtattgcaggtgtacatataatataccttttgtatagtacgtgtaaaacaaacaaatgcttgtacattaatatgacatcaatagtgtccaccagtaagaacagctgtcctactttctgaaattgtatctccagaacctactatgttctggatcttcacttggttttgaatagacagctcaaattgaatatattttaaaactgtaccttctatttttgtctataaatcttccttttcttctattttctttgttttatggcacctaatttattcttgaaaagtctttcatcattttgattattgttctactgtaaacattttagactttaacgacaaatgctgctgactttgtaagattttattttgcttcttttactgcactgtatgtatttatttttcttttttaaaaaatttaacttttagataccgggggtagatgtgcagatatgttacatgggtatattgtgtgacactgaggtttgaggtatgaatgatctcattgcccaggtagtgagcatagcacccaataggtagttttcagcccttcacccccttcttcttaacaatagtcctcagtgtctattgttcccatctttatgtctatgtgtacccaatatttagctcccacttataagtaagaacatgcagtatttgatttttctcttcctgcatcattttgcttaggataatggcctgcagctgcatctatgttcttgcaaaggacgcgattttgttgtgtttatggctacaaagtattccatcttgtataagtatcacatttactttatccaatccatcgttgatgggaccctaggttgattccacgtctttgctattatgaatagcgctgtaatgaacatatgattgcatgtgtatttcttgtagaatgatttattttcctttgggtatatacccagaaatgggattgctagatcaaatggtatttctgttttaagttctttgagaaatcttcaaactgcttttcacagtggctgaactaatttacattcccatcaacagtgtgtaagtgttccctttatctgtagcctcaccagcatctgttgttttttgacttaaaaaaaaatattctttctgactggtgtgagatggcatctcattgtagttttgatttgcatttctctgatgatcagtgatgttgagcattttgttacatgtttgttggctgcttgtatgtcttcttttgagaagtgtctgttcatgtcttttgcccactttttaatggagttgttttctgcttgttgaactgattaagttccttatagattctggatgtaggacctttgttggatgcatagtttgcaaaaattttctcccattctgtatattgttcactctgatgatagtttcttttgctgtgcagaagctctttggtttaattaggtcccaattgtcaatttttgtttttgttgcaattttgttgcactttaaatgtaatatttcctagggattcagtgagcttttctaaattggagaaatcatattttttcatatctgaaaactgtagtccattagttcttgatacttaccttctcccacttttttccttgcttctgagatagaactttctattttccgtgtctctttattgttcattctttttcaccaactccttatctcacattgatctattctaaaaaaaacttcagatctatcttctgtttagtatattgtagtgtcatctactatttattagttaaatttttgaaaaaattttaatgactttttttatttttagaatttatgttcagtttattttcgaataggcctaatcatttttatcatgtcttgttcttgttttataaaataaatacattcttttatctcttaaaattttttatttgtatgtatttaaaaggcacaagtgcaatttgttacatggacatattgcagagtagtgaagtttaggcttttagtgtatccatcaccaatgtacattatacccattaagtaacttgtcatcatctatccctcctccaactccctcaaccttccaagtctccatcatctatcatttcacactctgcatctatgtgtacacattatttagctcccatttataagtgagaacatgcggtatttgtttttctgtgtctgagttgtttcccttcagataatagcctccagttccatccatgttgctgtaaagacatgatttcattttttatggctgaattgaattccattgtgttatatataccgtattttctttatccaatcatccattgatggacatttaggttagttctatatctttgctgttgtgaatagtactgcattaaacatataaagtacaggtatctttttcatacaatgattccttttcttttgggtagctacacagtaatgggattactggatcaaatgatagttctattttaagttctttgagtaatttccttattgttttccgtaaaggttgtaccaatttacccatacacagtgaataagaacagtgcattcttcttttttttttttttttttgagacaaagtctcactctgtcgctctgtcgcccaggctggagtgcagtggcatgatctcggctcactgcaacctccgcctcctgggttcaagggattcttgtgtctcagcctcccaagtagctaggattacaggtggctgccaccatgcccggctaacttttgttttttttttagtagagacagggtttcaccatgttggccaggatggtctcaaactcctgacctcatgtgatccacccgcctcagcctcccagagtgctgggattacagacgtgagccaccacgcccggccagaacagtgcattctttgtttaacatattttctcaaccagttattttctttgattctttttttctgtttcttaacaaagtgttattttataatctcttaagttagctccattatcatgaatcttttgagtgtgaattttcccactcattgtgtccaatgtctgtcatggcagtgggtttctagtttgatttatagttttaagctgtgagctcatcttcggtagaggttggcttccatgggaaccatttgtgaactgtgaattgtagcatttccacatgagagtttagtttcatctcagttctcattgatttccctgtttctgaactactcttttctttatttccttctttcttcccttccttcctctctcctgcttctttctttcctttctttcttccttccttttgtcctttcttccttccttttgtcctttcttccttccttttgtcctcccttccttcatttttccttccttcttttcttatctttcatttgttccttccctccctccctcctcctctttctctctctgtctttccattccaaaagtcaagaattgtctacctcaattggttattttactttattgctgttgagctcacttacatatttctataaaagttacactttgctcaaatatagacatatatttaaatgtgtttgacttgggaaggatggtttttgctgtttcttgtataggtgcccttgtctatattcttcatttttatgaatgacaataatagcccaaatgccgaagctcaaaacctgataaaattcgttttcatgttgccttaatctctatatgtctttagatgtatctagtttattgctgttttgtttcattttatcatccccactgtctctgctttagttcagtcccttatcatctctcttgtggacaacggcaatatccttctcactggtttctgtgctttccatctgcccttttccaaacattgctacattgctgctagatttatctttctaagcacaactctgagtatgtgaattcactacttaaaacctattaatggtgtcttttcctcatactgaaaatcaaacttccttgattttgtggatttgctgagtcttatttcctgacatctcttcacacctatgtttctgcaatatcagaatatttctagtttcttgatttgcccaactgctttaggcctctattcctatatacatatcctttttctgtaaaactcttaaacttcactcttgccctatttatttgttatacctttagttttttcatactgctataacaaaatttagactgggtaatttataacaagagaaattgacttcttataattttggagactgggaagaggaacatcaaggtaccagcaaatttggtagctgccaagggcctgttcctcatagaaggttccttctatgtgtcctcatgtggtgcaaggggcaaataaactccctcaggcctcttttataagggcagtaatcccattcatgagggttaggtctaaccacctttcaaaactccccacctcttaatactatcacattggggattaggtttcaacatgtgaatttgggaaggggggaaaacattcagaccgcagcatacccatacttatgcttgaaaattcaacgtaaatattatatgtttttctaaaggaattcctgactagcccaaatctgacacatggtagccattgactcatttgtataatggctatatccacttacttttttatattcaaaccccatgtatataattcctataaccatcctttgtataacatgttctctcaaccacttattttcttcgacacttttgtcttttgaaaaactaattttctttgtttctttgattgtgacactcataattaaagacaccctaacagaaggctttctaataccataagattctttacctgagtctattcatttttttttccagtctatcaatcggccttccatgttgtaaattccttagtcttggggttcatggtggaggcctttttagaacgaatggagatcaagttggttcagtatgtagatgtcccagaatggtatcgttgcaaaaggcatgacagaaaacataagaataaagatgaaaagagacttcacaagatttagtgaagaactaatgttctagaaatcatgggaagactctggtcctaatgttgacactgacccaccagatgactctgggcacacagaataattgctctgcttctcaattctccaattgacaaaacacagggattagaatagggagttaataatgcttctgtaatctgaaattcttttactctaattgttaaattgcccaagttaaattatttgcatgaggggaggaaaaaatctttaaaaataataattgtcatgaattctataaaaattaaataattttaaatggataaatcctacttcagcaagtaaatctgtgagtatgtgagagaataatattgataaaaaacattaagctgactgtcaaaatattagagacatgggcagaaaatataaagacttcaaaatatatgttatatagttaaatatctggcagatttataaagctttgtaaaaatcagctatagaaattgcattttaaagtgtaacagtgaacagttttaacaatggaaaaaggctctgtactagcactaacaccaattagaaaataaagcattctggttttaattaatggatgttttcatggtgtctaataaaaatacaattttaaggacttgaacaatttaatctgagaaaatattgtgtatttaaagcaagtgtattttttaaataagcaaacatgtttacattcatcaattatagtaaaacaaaagctcaagaaatcccagagcatataatttcatgaaccgagaataaaatgagctctggacttacgacaaaatctgcccctgaatgatcttcagaactctgttcattttatgcagtagtttaagttttcttctgtcttggcccaacttacaaacagcagaaatctgagttgtgggaatataatttatgaacagaaaagattacttgtctgtgaattattttctgaagatgaaagtaaatatacaggaacatacggtattcctttaaaagttgccagatcataattgtgtggcaaggcagttatcagaaattaatccctctattgagagcaattgaagacactattctaatgtaggcccttttgaggaggcagcatgaacagaagaaaactcgcagcaaaggcttgaggggggaatgaatccaatccagcctgaaaaaatctgcaccaggtttgaaaaatcaccccatcctcccgtgtaagtgatgctaagaagcacaaactgcattttgaatctaagtccctgtattttctgtgaaggagctgtaagtagggtgggacagagatggcacctgggggttctgaggcacccgctcctctctgagacagacagggatcaggagccggactgggaccagaccaccagcaacacaccagaggatgttctctaaataagaccatggcacttaagaacattaactaccttctcatcttctacctcagtttctcactgcttatctacataaaaagtaagcctttcccactttgggcatttttcctggtttatttctggcttattatatttcttacaaataatggataatgttgcatgttctataaaatacaatgctaaaaaaggaagtttttatttgttttttttttaagtgtcctgtgttaaagaaatcagtgataccagtcaatgtgaacagtcagttttaagattctatgatttccaataggtattcaggtacagaaattttgtttttaacctttgtagtagtgagctggagaatgaaatggtcacatagactagaagatattttgttgtgtttacgcttttacaaaatagatttggcccttactaattgatatcctttaaaaggaagttattcataacctgtatttcattttattcccacatactatatatttatcttcacttttaaataactctgtgttgcaacatttgctctcataattaaggggatagtctcaatgtttcccagaggataatggttcaaagtgtttctttcaccagagaaatgggcttttactgttatgtgtttctgttttataaatgaagatattattttccacaaacttccccaaatagaagcaagagcaatgtttctgagataatcttgtcggttctatagcaggatggaaaatcagaggagaccaaattgccccagctgtgtgtttatgaagcacagtagctattcaacacgtttaaaacgaagacagggagagtgtgtgcttgtcaaaggggccatgtgatttgtgtctgttgaatctgaatatcaataaggcaaagcgtagagcagctgccgttgaacaagacaacttggcattagcacacagtgttggataatctgggtcaccttctgtggctgcaccagtgagattgttacttgtacggtttacagttgaacatatattagagactgagtgaagaaataagtaaatgctgtgggtaggtagctgatggcacatatagaaaaaccaagtcaaactttaaacaaatgatcagtataatacttgactgcaacgcacactcacaaaagattttttttcatatatatttactaaagagttgttatttaaatagttatttaccctccttgaaacttaatgtgggccccaggcaatgaggaatgaggaagagaagtgctgtgtttagttgtgcaggtaggagaagaaagggagaaaaagaaataagtcataaaatgaatgtgaagtgagtttatggtgcattttatggcaaacagctttgtcattcaatgtaatatatatggaaattcctggagtttgctgcagtttgttttaaaggaaatgaatgtatgatatctttaattaaaagtatagtaactatgaattgataaatatatatcatttgtttttgctctctttgagtaagtgattttattgatagattctaaatactttgtaattattttatttgttctccagcatagtatttttattcgtttaaaaaagtacatttgaagtctcattttcttcgatttttaagcaggtagacttttgtctgtgttgatatatttattggcaagatataatcatattgctttcccaatcaaaacacgtagtttagaccttgttagctgagtttttttcccacctgactttaaaacaatctagcatcagccttcctttctacccttattacctagtattcttgacacaaattctgtgttccagacaagtgaataacataatatctagcagtaaaaattgctaacattgtgttaagcattttctatatcatatatgtcatttacttcttgcaacaaccctataagatagatactatcatagtaattcacattttatagaagatgaaacaaagattcaagtcactataccagtgtacctcaaactttgaggcacctcagggagctggaatgcctggttaaaatgtgcagcctctcaagtctagccccaggtacttagtagatcctaggaaactataatttaattagctcttcatttcaaatacaggtaaccagaagctctgagctatacaataaatctttattaagaacctactacataatgatgctaggaatcatcagaatagttaaatataaacatatctctctcttcaatgagattatttaggagaaaagataaacactatgagctttataactgttgtcactcttatatacataataaccctgtcaagtagaatttattattaattccattttgcagctgaagaaactgaggcacatagaggtttattaatttgtccaaggccatactactagtgaatggtagatctggaatgtgaacctggagatctggctctggagtgtgggctcttagcttgcatgtagttattcccatgaagtgataatgcataaggactttaagtgataatgcttaagcagactttattatgttctgcttggaacataatagcaaacaaagaaatgtccattatccaggtatggtggctcaagcctgtagtcccagcactttgagaggctgaaatgagttcacttaagcctagttcaagaccagcctgggcaacataacaagacctcatttctacacacaaaaatataaaaaattaatggggcatcgtggtatgtgcctgtagtctcagctactcaggaggctgaggtgggaggatcgcttgagactggaaggtcgagactgctgtgagccatgatcctgccactgcactccagcctggtaaaaagggctacaccctgtctcaagaaataaaaagaaagggagaaagaaatttcagttattaatatcatattaattgaaggaatcaatgattctttcttcgaactttgaaatatgttcccttaaatttaagagaaaataatcacctccagctccatactgtattttgtatctaaagttctaccttgctcagctaccaggggaacgctgtttatgttttgatcaacctttatgtccttccagttgaggacatgtgacatgaggaatattagagcagagttcaggaagtgacattccctttctgttcctgagcaggtagacattctcctaacttggagttgcaatgaatttgtcctgattgtttttatacctgttccttgattttgcaaaactggttctaatgtgtgggaccaattaaattttaataattcaagaagagctattattttttgcttctgatgtattaaaagagaaacttattagagtgagactctcctgtgatccattattcagagactgttttaaataataacagtactttataataaactctttttgggaccttgatgtatgaatctgttctgaagggttttaaagaaacaaccataccatgaattagaaaagtaatgtctatctctctagtcctttataaatttgggggtaaacaatattttcaatgtaaatgccacatcgagattaatttaaaagtaactgttttaatctacgtttaaagtatgatcacaacatgtaaaaaaaatgtggtttgacaaaactactttagagttaccagaacaatgttaaagagtttggggtagcatccagtcttccaaaaaccattagcaattattaagtaattgatttgaatggcattattttaaaaagtactttctaaagtactaaaagaatgaagaacaaatagagattaaataagaaataattgaatttgcttaatatgtcagagaaggctgatgttattcattagggagtaatcacatactcttaaaattctacatgtgtagaaacattgaaaactttgatcgttactgtgcaagttaatatccttgcagtggcattttgtaaagtgcctacctaattattagtgtgagaaaaaggtatctttttgcttcctcataaatgaaataatctcatcagtttacagtaaaatcatcactactccatgaaagttacccagggtttcctacattacatagcagagttaactgtggcttcttttattagatacttctcttagcaaaattttctggagaattgcatgcttttttttcatcattggtgattttcaaaaattatcattcatggtctcacaataacaaatactggaattcaagtggacaagaaaagttagagtgagtgtttaagcaaaccgtgctacatctatataatggaatattactcagtaataaaaagaaatgaactatcaagtcacaaaagcacatggagggagcttaaataaatattgctgtgtgaaagaagctcgtccagaaaggctacatattgtatgattccaattttatagcatcctgtaaaagacaaaattatagagacatggaatgatcagtggctgccagagaatcaagggtgtagagaagaggcacaggggacttttagaatagtaattattctgcataatactttaatggtgcatttgtcaaaatgtacagaattttacagtacaaagagtcaatctaattgcatgcaaatttataaaatcatttaggaaatcaaggaaatcccaggaagtaattcagactctgactcaacaatctaactgcattacaaatgtatgagataatctcacagaaggggttggggaaaaactgttcacctaagtagtttatgtacatttccttagatattacctgacatgctttccctgttctagtatcccatccaagatatcacagtacattttgctgtcttgtattttgaggttcctcttggctgtgacagttcctcaggctttccttgtttttgatgaccttgaaggttttgagttctggccaggtattttatagattctcccaatattggagttagttttgtgttttcctcatggtgaaactggagttatgggctattggaatgaagaccacaaaggcaaagggttatcctcattacatcatatctataatattatcaatgatttatacaatcaacatgatatgtgactgctgatattgaccttactcacctgggaggtggtgttatcaggtttccctgataactataaagttatgtcttttattcttctccatactgtactcttagaaaaggaagtcactgtgtgtaacccacacttaagaagtttggagttatgatctctctcctggagggaaaaatttacataaattattcgaaattcttctgcataggagatctggctcttctctttcatttatttatttattcaattgtttattcatatcagtatgaatctattgacatttattttatactctgggttataagtcaatactattttattttgttactcaaattattccatctttggcctgtgggagttcttttcagttggctcctattttcttttcacgtactccccatcaatgtggggtgctttttaaaaaaggattttcttcctttatggctctacaatccctttcagactgatcttgtgtatttcctgacccaatcctagcataaatcaccatttctccaaggagctctgtttccttttattagagaatggtaaccaaaaccaagatctggatgtgaggtgtgcttgttgctgctggggtgtcaggtcttttaggcaatctcagctgaaagagcacagaaatatgtctgtgtactagtccgtgtatatacatgtttctatagatatctctatatgtaaatctgtgtctgtctgtattaagctaaatatgagttcatattgatgcctctaactccatttccacatggatcattctagctgtctccccttgcttatctgtaaatttcaacagtgagaaacctgatttccactatctgccatttattcacttgtttaaattcagtatacatatatagcggtattggactgttaacccatactcctatgggaaacaactttaactgtttaggtacagtacttatagctgtttcattttgtttttagtttttcagaatccacttgtttccaaaactacttaggtgaacagttctcccccaaccccttctgtgagattatttcatacatttgtaatgcagttagattgttgtgtcaaagtctgaattacttcatgggatttctttgatgtcctaaatgattttataaatttgcatgcaattggattgactctttgtactgtaaaattctgtacattttgacaaatgcaccattaaagtattatgcagaataattactattctaaaagtcccctgtgcctcttctctacacccttgattctctggaagccactgatcattctatgtctctatagttttgtcttttataggatgctataaaattggaatcatacaatatgtagcctttctggacgagcttctttcacacagcaatatttatttaagcttcctccatgtgcttttgtgacttgatagttcatttctttttattactgaaaaatattccattatatagatgtagcacggtttgcttaaacactcacctactgaaggacaactttgttactttcagtttggggctattagttcctagggctactgtaacaaagtactacaaactgggtggcttaaagcaacataaatgtattctctcatagctctggaggctagaagtctgaaatcaaaggtaagaagccccttgcttccactgagactccacttggaatccttacctgccttttcctggcttctagtggtgtcattcagtcccgggtgtttcttagcttgcaactgcatcactccagtctctgctactatcacatgatattctcactttatctgtctacctctcttctattcttcttataaggacgtcagtcatattggagtagattcaccctaatgaccccatgttaacttgattacatctgcaaaaaccctatttacaaataagggcacattcacaggtactgagggttaggactctgacataccttggggacacaattcaacctataacatctactatgaataaaactctgatatatgatttaaaaaacacttggttaataccacttttattgggtaaaattggtttacaattgattttttaaacatagtaagtgcttggtaaatatttgtggagtaaatagttgttatgtttcaagagacattatatcgatatccttgtattaacatgtggtagaagaaagattatgctaaacaatgtgcccatattgttctcttattttccccctctttacactgtccctaccttttacatattcagcctttcactttgaattaagtgttcagaaatttcctcctatgtaaatttgccctatgaaattaacttagagtctgatcaatatgtaaaatagcactagaattaggtgtaaacatgcctccatatttcctcgggacaaatagtttagctgtcttccatatgtgaatgttcaattttttaacctactttttttcacaaactgcattcattacttggggcaccaaaagattactttcctttattattgattcaaaacagtgattgcaagttattttactgtgcatgtgttatttgttgtgcttattaataaaatgtcatcttttattttatgtacatatttttgacttaacaataaacagtaaaatttctgaaaggaagaaggtactcagtcatctagtattagatcctattggttgctatggttagcaccctttatcagtcatctagtgtccttcctagtttaataaaaagtagtgattccttcaaagtttcgttgcaacatgctaagtagattgtcctatatttcctagtttttatcttcagaaaagttttattaaaagcaaaaccaaaggcagtgtacttttaataataacactatgggattcagtcatgctgtatcccatactgctgtatcccatactgctgtatcccgtacatgtaggaattagcatgactatttggagttgaatggtttgacgggaccaaaaattttactggttttagaggcaaccaatgtaaagttagttgtccctagccttaagataggataattaataaatattaaaatttactatttattccataatttttttatttacttatttatccaataagtatttattgagggccgtaaatctatatatctgacactgttctaggctccaagggtacagtagtgaatagaagagaccacaatccttgatattgtgaaatttacactttagtggggtaagagagacaaaaaccaaataaataagtaaattatgtaattgtgagctggcaaaaagtgctatagaagaaagcaaaagatgagtaacagagagcagctggaccatgaggatatcacagtgaataatattttgataaagaaaatagcaagtgcaaagaccctgaagcaggagcgtgcctatagtgtttgagatactgtaagttgtccaacataactgaagtggattgagtaaaacagggcaaattaggaaaggtgtcaggggttttacaataagtatctctcattcttgcaatcatactacatagtagctattaagaccattaggacaccttaagcaaatgacagcctagggtacatactaaaaacacagctacaaggggatacaactgagatttaaaacaagtttgtcagattctaaacctcccacaagctcacaccagcttatttattccaaaagataaacattgaggaatttaaaaggccagttattaaagcgttggtggcttaaaatcagccacggtggaagtaatttcatcacagaatttggcaaacactacaaatcagtgtttgggaagatttatttttttaaaaaaagttagtcctaaataataaaagttttcattctacctttaaaattttttcagggtaaaatgtttatagtttcaaccactatcccattcttgtgactaaaatctgccaaagcaggaatggctgatatgtaacctagattaaccgcattgtgtagtctttttggttctccacgtaattgtcctgataattcccagatggatgactcttttctctacattcagaattcttggaacctttaaatacttattttactttctgcaaattagtgagagcagagtgctaatgaggctgagtttacggttcaatctcaacacaattcagtttgctttgcacagagaccagctctgtacaacaagcaattatgtctagtcagatggtctcaaatttgtagtttttaatacaaggagagaaaatgaaattaactcaacaaattaagcaacaccattgaaataatcagttgcgggtttgcagcaataactttttcacataggtgatgcattattattattgtgtttctgtctataattttcattatctattcttttaatatagctgaagaataaatatttatattcagcattaatttttatatgagttgtgtcagtaaatacagattctggctctggcccacaattagttgtgtatctataaatgcatcatttaaactttctaggtctccaatttctcacttgtaaaatgagggggttatattatctaattaccacgttttttcaaggcctacattttatgatttcatgattattctaggtaatcgaatcatagacattgatgagcagagtgtttttagtgaccagtcactctacatgatccagcttccactaggttatattgcaacaaaaaacaaacccaacatcttagtgttaaaacaacaaggtgtatatcttgttcccaccacgtactgtgtgcaagttggctgcagctctgcctcgtttgtattcttcattgctatagtgaatgtttgtcccctctccccaaatgaacatatgtatattgaagccctaatctccaaagtggcggttttagggggtggggcctttggtaggggattaggtcactagggtggaggcctcacacatgggattagtgcccttgtaaaagagacctccaagaaattccttactccttccaccatgtgaggacatatggagaagatggccctctacctatgaaccagaagttggccctggacagaccccatatctactggtgctttgacctaggactttccagtctccaaaacaagaacaacaacaaaaattctcttgtttataaagccacttagtctatgatagtttgttttggcagcctaaacagattaagacattcattttaggacacaatctgcaggggcattcccttttagagaacactgttttaatggcagagggaaaaaggtaatggaggaagcatacaatagctcttaaaagcttcagctcagctttgacatacctcggtttggctcacatttcattaacaaaagcaggtcatgtggctaagcttgacatcaatggactaaagtccatattcaggcataaaatatttggaacaaataatgttttctactccatcttttttcctctttccaacttccagggatcaatttataaacaaatttctttaaataaccattaaaataaatattagaaatttaaaagacttgacaaaactattatttcagcaactatatattaagcagttaaaatgagcaaggtccactgttctccaggcacgtacactgtagtggggtgggcatatgtgtaaaggctgtccagacatttttgcctaagaaaatcatcacactttttaaaataatgtcagaagtctgtgcatggatctggctactattttcacatgtagatagaggtagaaattttattccgaaaaataaaactagtcttgtgtatgaagaaatgttttctgaaagaaaatataatcaagcttgcttcgaaattattagccctaatgaaagtagttatattttgaggttacggtcaactcagatttggcaaacagcatatacagtttgtagattaggaattcctatttctctttaacctcatttcacttatcattagcacctataccagaggttgggtaaggaaagagaggaaaaatgaaatgtaaaattttacattttatatatcaatgcctgaaaattacatcaaacacaatattgcaaggagctacttaatactttcacagactaggagccttaaaagaagcctttacagcctactcattatagtattgactgtatttctacaatttctcctaaagtaatcttaaaataattaaagcattactttctgtaattataaactcaaataattatagatgtaaatataaattgctttctcttcactaacctcattatatcaaatttttttttgtttgttttctggctttttttttttttttaacaacccctctatggagcaactgaaatcaggaaatgtatgtgttgtttaactctttctactcagctgcttcagttagcaggctagctatatgaactacttgaagttcagaatagccatagaactaaggcaaagtttgcataaacgtagttttttctgtaggctggtaaatagcaattgtgtccatgtagagggactcaatgtcaatagtgaaagcagcccactaccccctacccttttattctcatattccttgtttttggagataatacatctctaaagcctttttttttttttaaattagaggagtctatgattcatgttttccttgcctaccagatacaaccaacctctgttacccaatttctctatgtcagacattaggctgaatgtttttacatagtttatctcatttaattgaaaccttgtgatgaagattttattattcccattttgcagagatatctaaggcttggagtgcacaagtaaagccactaaattgttgatttagatacttaaattattttttaatatgagtagttttcacacaaccatatcacacggtcagaatttggaaataccagcgtcaccattcataagaccatggacaatttaaaacttttggtccttctgaattaaacagtcttctatagatacagcatggaaactctgcaaacagacttttggctttatgaagggaagcattaatgtaaatataattgttaatcgtaaatcagaaaaacataagggagagagatgcagtgaaaagatcgtcaatcaagcttgtaagtaggttccacctgtgaataataatctattgctcaaaccataagaaatacaggtattaaagataatttatcatgtattcatcaccagctacatgtgctacaagtataattttaaatatcaacatactgtatgccctcaaagggaatttgttgtgtgactgatgatagaatttcagagagccaagagctttgggaataaactggttttaaaaaatccagatatcataccaaacatgtattctatcaagtacatttctttaaggtattttttaaaactctaataggcagtaatgcgtactggaattgcctaggttacagattgtcacaaaaatatgttttattaattcttagggtcagttgtagtccttgccatcaatataactattttttaaaagaaggatagtttttattatgtcctttttctagtagatatttcactgttaattgttcatggctggtaaactcatatttatgaagactcaaacatttatttaactcaatatgcttttgtttcttcctgacatgtatgtaatcatattttataaagtacattggtcagtgagattgtatgtatgacatcggattaaaaaatttaatatgtaaaataaacacatcgggggcggtcattaaatgatgggtttctgtgctacaactcctgatgctatgatttcactgttcctgtgtaggaccaaaaaatcaatttaaaaaataagtcttagtaattgtgatgcatgtcatttacagactaggttttaagagacactaatccataagttaacaaagtgaaagttggtcgattattgattcttaaagtgtggcaaagactgatgtgagggaacaggcaagaaacaaccaagggcacagtgcatttgggacttaatagaaaaatgaagcagtggggagcgatgtgagatgagggtgtaggggcagtgtctgcataattaaaggctttaaatgctataatgaattatcttatactagagttttcttgtagtcagaggttcccaaatgttttcacactgtggcctgtagagagaggataatatctgtgcaccatacttgctcatgtagtcaggactgttgacaaccagaggtgatcacttggtggcttttgcagctctggcaccctttagcctactcttcacgtgttgggaagtgccatgaaggggggttgaaagccactgaaggactttaaataggaaccctggcatgctcagacttggccagaatgagaagggaataaagaagggaaagcaaggctgtagttagagagacctagcatgaaatgatggagacctcaaacagcgtggtcctggtaaggaagaagcagagtgggcttagatacttcaggggaacattaacttattgtttaatgagaaatgggtgagagcaaaagggaggatagcgaagaatgatttccaggcccctagtttatgtatcttaaataatggtatgactttatctaaaatagtaatgcacggaaaatataggatgaattgttacaatttaaatctctttattttgaaatattggagggactttcaggtgaaaatatccagcaggcagttggatatatccctccaaagttcaaaggggagacccagttagaagataaagagtataataaaaaaaattatagactatataaaacttgcgatataaaatattaacttgctgcttgggttaattacatttttataaataaaatataagctattcataaaaatgaaaaaaaaaagaaaatcaagtctctgaaatttctactgaggtaagaaatcataatcattccttttaaaaataatttattcctttaaaaaataactatgtcacataattgaatttaaaatgtatttgttagttgttttttaaataaaatttcagaataataataaaaaaagaagataaagagttgggtccttacttacaaattcagtaactatcatcaagtccatcctctggactacttattagaataagaagagagaacacaaaaaatctagagcgaagttctataaaataattttacactatggattcaaggcttaaatatgagtgttcctactcattggtccagtaactcttctaggagaaatagttgaaaatgagagcaaaaaatagcatgtgaaggaagccgtatgttatgtataatagtgaaaaattagaaataaccttaatgttattaaccaaatttgcacgtttatactaataaaatgtttgaaacataaattgtgttgctttgggatcaaagaaataaacacagtccagtaatcaaaagtaaattaaagcaatttaaatatttcctgcagtctcttaagaaacgcacacatatacacacatatacaattagaatataaggcacagagaaatattatttctccattttatgttctcaatgtcttgtaaaactattatttctcaattgttatgttctcaatgtctctcactacttcctaaggtctaacctctgaaaaaggttggacctttctcttgaaattctcataggttcttttcttctctcagaaataaatctctactctttcttatataagtcccctctcctgggttcccaaattttgtttatttctttctggttgtcttgattctgcatcacaaaagcccaggaataaagctagtgaaggtacattttttaatataggtgtatggaagatgagcaatcagagccaaaggtacaccagtgggcaaggaagggggaaagaatctcaacacttagtcaaaaggtcatttttgttttccaaaaaggttaagcaaaaataaaaaaaataaaaataaacacatcaggatgtcaaatcttatgtaatctacaatatgcaatttgtggtgtaaaaaatatgcttggaaaaaacaaagaaaaattctggagggaaacattttagaatttttttttctttttttttcctatgttttttggggggaacagatggtatttggttacatgagtaagttctttagtggtgattgtgagattttggtgcacccatcacctcagcagtatacactgaacccaatgtgtagtctgttatcccgcatccccctcccgccctttcctgccgagtccccaaagtccgttgtatcattcttatgcctttgcgtcctcatagcttagctcccacttatgagtgagaacatatgatgtttggttttccattcctgagttacttcacttagaataatgttctctaattccacccaagttgctgcaaatgccattaattcattcctttttatggctgagtagtattccatcatgtatctatctatctagatggatagatatatatcgatataccacagtttctttataccacagtttctagaaatttaatagcaattatcactggacattgaaattacaagggattgcaatatttttctttaattttgttataggttctacattttctgtaagtaggccaaaaatcttcaataaacataaaacagattattatttatattaaaataaattttattttaaaaataatttagttattcaaacaataaattttaagtcacagagctactaacagaagtagctatatatagacagaagtattaagtaaatatttgctatttttaaatactgaaaagttatattagaaaaataccagtttcaaaaatattcaagaaacgaaagatagtttatttcaattataagctatgtgggtttgaatcattttacttaaattctatgttttctcatctgcctaatgggaataattattttaaactgcataggagtgttgtgaggattaaatgaaaaatgaatgtgtgacactctatgacgtcttaacttgatttgatttatagtcagacttgagattcacaatagacttcatcaagcaccaattttacttgtcttgaagaaaatgcacaggaccagtgtcatagcatgcacaatgacaacacagcagaggtctcctgattctcagacacagctttggatgtcccagtcattctgcaccctgggtgtgtgtggccacaaggaataaagctgattgaatacaacttcagctcgggaaaatcatcagctctgagatcctcccttcagtttttatatcaagccatgtgtttgtgactgagtagtcacatctaatcaggtttatgtgattagccctatttcttcagggcagctccatttcattagttcccaattactcgttaaacaaccttgacaatgagttacacatgcttagtcatttccatggaactctcatttatcttgcatcaatataggtaaatatctaactattcctcagttgctgctgcaaatcagaggtctagtcttcagccatttccagagaggaggccaaagaaacagctgttagtcctttttcggtatataaaatgctcaggatagtgcctgacacgtagtaagcaaacaaaaacttcacagaatcattgaatttgttttttcaaaattgacaaataaagtgcatattctgatattgtaatttaaaaaaataatagaacaaaggaatccactgcttggttgtaatatcttttcttcattgataattttcaaaatgattgttgctaaaatcatatgcctctgtcaaattcctttcacgtcaaataaaattaaatcctatgatgtccttgaaatcatgttgtgttacaggtcagtggttatcatagatgactttaaatattcattacaggaatattgagggatgatggcaagtcatggtcttgagagtcgttgctgaaataggctattggagtgtgagttggtcattaaactgtgaaggatcattcatgtcaacatgaaagtccccttgattaggaagttacctagttggtaactgggaatattggttgaaggaagtgaaagtgtagtgaaaagagaagtttgtccaagagcacggcttataagagggttatgcaagaagatggtagctaaactattttttataataaataaccatgaatttgggggtcagagagtgaaaatagagagatgatggggacagaaataagggataagagaatagatgaggcaacttgttagaaggccttgccctttagagaaaaatagccagtaaaatactcctctcagtgggatgtacaacagactagttagaagaatgtcaaattctcatttttaacacatcagtgttactacttataaagcctctctgccttgccagatcttcagttcgattttattacttttatagcttagggagtagaatggtagcaaatattacaactgggctatgaacagatataacatgtcccacattggcctctctgttgaagccaatgtgatagaaacaactcttcttgaggcatcgcagtccagacgtttgatgtggtgactgacagcaaagtgaggcttaacctgtggtgtggtgaagcattctgtgcagcagtggagcacaggtggatgactcaggagactaagctccttctcccatatttaccaaggaaggccatgccaggggaaacacacatgctgagtaaataatgaaagagaatcaactggatagagttgaaacattctcaataaatattaatttttaacaattactagttaatttatttagttattctttgaatttgagcagaatctctttctctcctttttttaattccttgggcttgtgtgtgctctcaagacttagaatgtgaggtcacaacgtttcctgtgatacagacttgaaagagtataggcctttctctgtactcattgtagctcagtactattcctagcttcttagccccttcatggctttttaaaggaaggaaaagctaattattggtgctccaggactgggcaaagccgagaaaaaagagatttttcttttccttcatgtggcatcagtttgattgcttgttttctagaaaatagagagaaggttacctatcaaagggcacagtcttttcccaatagcaatcgtaacaacctcatttattgagaaccgaatacttagaattgtatacaaactctgaatcgtataaaactcctgcaatgtacctgttatctatactttaaaatagcgcacaattattctcatggaagttaagtgatttgacaagttggcaaagtaagtgacagagctagaacagaattaaaacttcttgttattcccactaaaccacctataggtcttgataaccatagaccttagaaaactaaacatttactaattgtttatttgtaatttatcttcccaatactaatgtaacagatttcaactttctgtccaaattaccctaattactaaaaggcctatacacctgtaatgaaacatgaattttgaaatacatttgcacagaatataataaagttttcttagagttaaacttcagtactattgtaggcgcttagtgtctgaagaccactggctgccttggatgacctctaaatgcaccctccagctctgtgatttaatgaagaaatcactgacatagttcccatgttttgcattataatttcataaaatttttgtttatatctgtaatttaatgcaaagccatatggttatcagaaataatggatatttaatttgattatttaagcatttgacttattttgtttcattcaagggaaaaagaaaaactattttgaattctattaattttctgcttcatagagaattagacatttatgaaaaaagttcataacagaagttctcaaagtaaagttaggttgatagattcatttaatgcacaattcttatacacttataaaatttcaaaaattcatatttgtatcatatattcataggtcacaggagaggtaaaatgagtacgtggaatatggcctgaatatataggagctaattagaaaataaagtaatatgctatattttagaaatgagaaaagcagaacttggtaataaagggcttagtttgataaaccatgagttgagaaccaaaagtggttctggcccttggaactgcaaaatagtttcacctactgtaaccaggctaatatattgctcctggtagcctgctgccactccaaaattttctcctcagagtttgtcatttttgtgaattcaagctcttcagaatgtttcaattacaaaaggacaattttacattaacccatcaacatagacttactttcagtttcctaacttaaagtagggacttgaaagaaaaagatctaaaataggtcaacggtagagagtttgtgggggattgtaagcatgtgaaattgatgatggtggtctctgtaacgggatccctgatggatcccacagcagcatggaggctctgacttcttgcaagggagagaggcgctagggaaagaagatgttagagacagtaacaaagcaaaatttcctcatgtgcagtttatccaaggatggctcacaaatagaattattctactcatgaaggaaaaagaaatacaactagccaaatgatccacctggaattatttcctccttagctacacaaacaggtaaaaacaaatccatacattacattttacaattatattctgaagaggtgtccacttctgagcaagatggagtaggtgggactggattcaccctccagcctgaagcaataaaaaaagcaacctggcaacacatatgaaacaatggtttccgagacatcagctatcagagaatgaagagtagtcatccctaagaaatggaaaacaaacaaggtgagccctattgcttgaacttactaccatgagagagtttccgggcaacagcacagggagagggattcatagagagccgagtgtttgaggagacccagacagatgaaattcatgagacggagtacctgaggggagagctgcacagagacagaccagagatctgcagaagctccttttagtattcagctgagtttatatcagcacatgcatgtaaggaaagttcccaagacctgggaaagaataaagctgaaatgattagagataataatgcccagcactcacagagggccaagaattgtacctgtgcccagtagccagactgaataacttcatgatttatgaaacatttggtaggatattgcttcggtagttacaaatattctcctccagattcgatacggtcttgtgctgcttaacaaatcttaaaagcaagacttaaaagaaccaaactgtttctaaaaaactgcattgcagaacacagctcaagaaggcatgcatagaaacaggaaaataagacccaaatgaggagaaaaataaatcaatcaaaacagatcataaattgatccagatgttagaattaccagataagggcaccaaaacagttattacaactgtattccagatgttcaaaaagttaagtagaattatgagatatgagaaagattcaaatcaaacttatagagaaagaatctacaaggtataagacgaaaagtacgttggaagagatgaatgacaaattagacgttgaagggaaggttagtgatttgaagacatagcaatggaaatgatccaaaattaaacataaagagaaaaaaggattagaaaacaaaacaaagcaaagcaaacgaaacacccacaaaactgtgacaactttacaaagtctaagatatgcaaaattggactccctgaaaaagagagtgagaataaaaagttttgaagaaataatgcccaaacttctctaaaaaggatgaaaactatgaatacataggttaaaaaaaaaaaaaaacttgaatttccagccaacagcatgtggagagtgatccatgtagagcctaatgtttgaggagacccggacagatgaaattctcgggacagagtacctgagaggagagctgcaacgggacagaccagagacagaccaaaaaaacaaaagcaaaacaaaacaaaacaaaaaacaaatcccaagtacaagaaacacacacacaaaaccatacccattttctttcttaattatatctcttacttttctctcattctgtcaataagcaggaaatgttttcctgaaatataattatcttctctaattcttgaataatattttgtttttgaaaatattttgtctgtcttttttcttctatggaaaattgtgctctcatttcactctaattttggttcctctgcaggtgctccctattttctttctggtttcttaatgcattttctttatcttcagtgtattgtgatgtgccttggttggggatttatatttactgtatctttattttttcaaatgttatttatgattcttaagactttttgagcttcttgaatgtgaagtttcacaaacctcgtgggtttggggaaaatttgaaccatttatcactttgaatatggtctcttcgccattctctctgttctgtctcagtattcctattagatgaatatcagaaccttttcttctatcattgttgtctattaatcttactaacatattttcctttcatctatttcttttcagctatgtctaatatgctctaatttgttgatttagttttaaatgtcagtgcctacattttccttttcaacagatctgtttgccttttaaaatggacctattcttttttatataatgtgctttatttttcatattacaatttaaaattttataaagatatatatcttacatagttatatatcttctctaaagttatatatcttatgtagatgattatatatctgtagctatttaagtatatagttgttatatatagttatttttatctagttatataaaagttatatttgtcagtctatcttaagggttggggatctaatctatctatggtttctgctaacttgttccttgtttgtttttcttatgacttataattttttattttgagtctttcttcaagaggtttttaaaaacatttgttgtatttatcctatgagtaccttttggaactgcatcctggtcatatccctgtagaacattttttgctgtgcttttgcaaagtagccaaggataccactggctcaaaatcagttttttatgttccctttcgtgtgtgtgtgtgtgtgtgtgtgtgtgtgtgtgtgtgtgtttgaagagaagtggatctcagatcatatgggtactgtaaatgggatagatgcagagtctcagggttttgatttcctggaggtaggatgtgaaaggacaggaagtcattagcttcattgttgctcaccacatccctgacagtaggaagattattttttaggccttctttttccctgaacagctcagtttcacatccccccagctcctttccatgaccattaaaaaccaaactcttgatgcaagggatccgttttttcttcttctctcccctctatcagccaacaggacagacacagtatgaacgtccattgagtgtcatgctgattttcagctctttcatcccctgtgttacctggtgatctccctttccttcacttacatatttaaataatatttgttgtatttgattcattatttctgattatttgtaatgggaggattttaagtttatgtacatttgccctctcactaaaaatagaagttaattatccattcactaaaataaagatatctgtgttaaaatgacatgctttttgtccatgcttttgcaggacaatttccatgcttttgcaggaaattgtgtttcttgtgcctggctctctggtactaaatgtatttttaattgtaatgagctctaatcaagaaagaatttttctttaaaataaatggctttcaaaatgagaaatgaaactaaaatatactgtggacattaatcttctcgattttatacttatatgacaatctcacagactagttcaacgtttgtaaacttgcatttgaataggtaataagtactaaaaataataacttcaagagctaggatgatgacattttaaaacttaattagtaatatttaaatttccatgcaagataattcatttcttggacaatatagtctttaaaaacttcatttaaataaagatgttaataatgaaaatacttaaatatataagtgagtggacatgtgtcttttatcccattctaacgaattgatttttactttattcaacactgtgggataataaacatacggcactttgcaagtattttattttagcttttaattacattgggaaatttaatatttcagtatttccttaattttctaagattagttggttacatgttttatcaaattaatgtttgtgattactgcgaaaatcttatactcaaagtagcttcaaattactgttcatgataaaatttcatttgattgacttttatctcaattcaataatcaaaaattcatgacactgttggattttagttcatgctgttatctttctacagtaaaagcaaaattagttagagattttatatttatttcaagatgtcacatatatttgtcttttcagtttccagagtccttagcatgcatagtgcttaatagagcacattcctggacagcctgttattattcattgaaattttagattgcatatataattataatgcattatatgtacatacatgtgtacatacaacattgcaagtttcattccataatgctctttgctttcccatctatattctccaggaaggcttgcatttaagttaagatctaagtttacaaagacacaacttaccagaatctctgggacacatttaaagcagtgtgtagagggaaatatatagcactaaatgcccacaagagaaagcaggaaagatctaaaattgacaccctaacatcacaattaaaacaactagagaagcaagagcaaacacattcaaaagctagcagaaggcaagaaataactaagatcagagcagaactgaaggagatagtgacacaaaaaaccctttaaaaaatcaatgaatccaggagctgattttttgaaaagatcaacaaaattgatagaccgctagcaagactaataaagaagaaaagagagaaaaatcaaatggacgcaataaaaaatgataaaggggatatcaccaccaatcccacagaagtacaaactaccgtcagagaatactataaacacctctatgcaaataaactagaaaatctagaagaaatggataaattcctatacagcatcccaagactaagccaggaagttgaatccctgaatagaccaataacaggctctgaaattgaggcaataattaatagcctaccacccaaaataagtccaggactagacagattcacagccgaattctaccagaggtacaaggaggagctggtaccattccttatgaagatattcaaatcaatagaaaaagagggaatcctccctaactcattttatgaggccagcatcatcctgatacaaaagcctggcacagacacaacaaaaaaaagagaattttagaccaatatccctgatgaacatcgatgagaaaatcctcaataaaatactggcaaaccgaatccagcagcacatcaaaaagcttatccaccatgatcaagtgggcttcatccctgggatacaaggctggttcagcatacaaatatcaataaatgtaatccagcatataaacagaaccaaagacaaaaaccacttgattatctcaatagatacagaaaaggcctttgacaaaattcaacagcacttcatgctaaaaaaactctcaataaactaggtattgatgggacatatctcaaaaaataagatctgtttatgacaaacccacagccaatatcatactgaatgggcaaaaactggaagcattccctttcaaaactgacacaagacagagatgccctctctcaccactccttttcaatatagtgttggaagttctggctagggcaatcaggcaggagaaagaaataaatggtattcgatcaggaaaagaggaagtcaaattgtccctgtttgcagatgatatgattgtatatttagaaaaccccatcgtctcagtgcaaaatctccttaagctgataagaaacttcagcaaattctcaggatgcaaaatcaatgtgcaaaaatcacaagcattcttatacaccaataacagacaaacagagagccaaatcatgagtgaactcccattcacaattgcttcaaagagaataaaatacccaggaaaccaacttacaaaggacgtgaaggacctcttcaaggagaactacaaaccactgctcaacaaaataaaagaggacaaaaacaaatgaaagaacattccatgctcatggataggaagaatcaatatcgtgaaaatggccatactgcctaaggtaatttatagattcaatgccatccccatcaagctaccaatgactttcttcacagaactggaaaaaactactttaaagttcatatggaaccagaaaagagcccgcgtcgccaagtcaatcctaagccaaaagaacaaagctgaaggcatcatactacctgacttcagactatactacaagcctacagtaaccaaaacagcatggtactggttccaaaacagagatatagaccaatggaacagaacagagccctcagaaataataccacacatctacaaccatctgatctttgacaaacctggcaaaaacaagcaatggggaaaggattccctatttcacaaatggtgctggaaaaactggctagccatatgtagaaagctgaaactggatcccttccttacaccttatacaaaaattaattcaagatggattaaagactttaatgttagacctaagaccataaaaaccctagaagaaaacttaggcaataccattcaggacataggcatgggcaaggacttgatgtctaaaacaccaaaagcaatggcaacaaaagccaaaattgacaaatgggatctaattcaactgaagagcttctgcacagcaaaagaaactaccatcagggtgaaaaggcaacctaaagaatgggagaaaatttttgcaatctgcacatctgacaaagggctaatttccagaatctacaaagaactcaaacaaatttacaagaaaaaatcaaacaaccccatcaaaaagtgggcaaaggacatgaacagacagttctcaaaagaagacatttctgcagccaacagacacacgaaaaaaaatattcatcatcactggccatcagagaaatgcaaatcaaaaccataatgagataccatctcacaccagttagaatggcgatcatcaggaaataacaggtgctggagaggatgtggagaaataggaacacttacactgttggtgggactataaactaattcaaccgttgtggaagacagtgtggaaattcctcaaggatctagaactagaaataccatttgacccagccatcccattactgagtatatacccaatggattataaatcatgctgctataaagacacatgcacacatacgtttattgcggcactattcacaatagcaaagacttggaaccaacccaaatgtccatcaatgatagacaggattaagaaaatgtggcacatatacaccatggaatactatgcagccataaaaaaggttgaattcatgtcctttgtagggacatggatgaagctggaaactatcattctcagcaaactgtcgcaaggacaaaaaaccaaacaccgcatgttctcactcataggcgggaattgaacaatgagaacacttggacacaggaaggggaacatcacacaccagagcctgtcgtggggtagagggagaggggagggatagcattaggagatatacctaatgtaaatgacgagttaatgggtgcagcacaccaagatagcacatgtatacatatgtagcaaacctgcacgttgtgcacatgtaccctagaacttagagtataataataaaagaaaagacctaagtttgttttacttgagtgtttgggaggcaagtattttttttcataaatgatatgtaagaactctaaattctcataaaatcataaacatttttcaacctcttggcaggctatagaattgttaatcctttttcaatggtctttaaatgttgtcatgttgccttctagcttgtagctggcccaaggcctgagtgagggtggtgctggattgtgtcgtcagggtactaaacacctgagtcctaaggatcaaagctgaaaaccaaagtagtgtgtcaaaacccaagaggcaggcaagagcaagggtcagaagcaaaataaggacaactgagagcaatgtgggatatccagcaggttagagcaattgaacttgaagaagtaacttggggctttgtcttgtaggatatagattccgcaagtaaaaaatttttgagccaaagaaagagaggaaccagacactcaagaacttcacagtatcactgagttgtgtgtctcatcatggtatattttgtagtttatatttcactgataatggaatgacacaactcaagcctttgtgtctgcagcacttcagcatttaatagctgaaatatatttgagcagctttattttggtcaccctcctttcttccacccacatgattaagatttgttaatggagatatttgtcagactgtacaagattgtgaattagatcttctctgaagtgcgacatatggctgaggatctaatcttatttctgcctgagaccttgtgtacctaggatgatcctaataaagtattatgtcttcataaagacaaaagccaggcttactgtgaaacacagcatcacatagctggaagagagctactttggtctctactattagatctaagaaagatagcatcttaactcttctaagatttaaaaaaaaatttaagacaaagtaaggcataatccttcattaatagattttatagacagaagactataaaaatatgagcactagacttgagaacctgagttctagaactgtctaaactacaaaatacaaattgtttaaatctctcttggactatttttctatctgcaaaatggagacacaaataatgttcatagtatattaacaagaaacactttttcatcacaggtaaaatcaggggctctagagccagactgcaggccttgaattctatctccactacttaccagatgttttgcctcagaaaattacctttgcaagcctcactttcttcatctataagatggaaataataatggtacttacactattttatgaagcttaattgacatcatcatggtaaatgatttaaaaagtgccaaactgtacctggaatatagtaaacagtacatttaaatttctacttgtgttatccaactagatcactgaatttccttcatattttcttgtatcaaaactgtcttgctacagatccagaagtcagttgtatctccaggtaagaagagagtgatagacttcagaactaaagtgaagtgatttatcattgagatcccatttatccgatattggaactccaggcttttaggaactgatctgtctggtaaccaagttgatatggtttggctgtgtccccacccaaatatcatcttgaattgtagctccgataattcccacatgttgtcggaggggcctggtgggagataattgaatcatagaggcagttcccccatactgttctcatggtagtgaataagtctcacaagatctgatggtttcataagggggaacccctttcacttggtcctcatttctctcttgccagccaccatgtaagacgtcccttttgccttctgccatgattgtgaggcctccccaggcatgggaaattgtgagtccattaaacctctttttctttataaattacccagtctcagttatgtctttaccagcagcatgaaaacggactaatacacaagtctcctccttgattgacttcctctctttattctctagtcctattaggtgagtttgttcttattatcttgttcttgctatattgggcttttctaatcctgagctctagttttcctatgactgggccactgaatcttgtggcatgggtcatctgaaacgccatcaactgcttgccataatctcaattctgtcccgtgtttgcaccttgtccaacactcctgatatccatccccttctaatgattttcttcatgttgattatctgctcctaattgttcctttctagacttgaaaaatattaaattgtgctattatacatatattagttgtctttgggagttagagtccacaagattttttggttaattgaatgtgttaggaaaagatgaggaaggatccacgatgaacctgaggattctggcttgatcaattgtatggccagtacttccatcaactttctagctgaggtatggagtatggcaggaggaaaagtactgcatgggagtgcaggatgaaagatgaccagtagcgttgctatgtttgcaagttgagttagaatggagatgtcagatagtgtgatagccttcatgctgaggaaagagggatgtgctagagattacaacttgggggatatcaatctatacgtagcaagtagagatctgatgattgaggatcacccaggtgagagtccacagggaaaagggaagagggcccctaaggtccagtcattttaaatgacaactgagaaaagagaattcacaaaggagcctatagaacttagaggggaaaagaaaaaagtcagaaaagtatgaagctataaaaaagaatagcttttaagagatagagagataagataattcaaatatcaagacttcaagtaagaaaatgactccaaatgtgttattactggggaccctggccagtaggttcatggggtggtgaggacagtagccagatggcagttggctgtgcactgagtggaaactgagtgagaatagatggtgaacatagacaactgttctgagaagtctggctgtaaagaggggaaggcagatactacaggagccatagggaaataaaggagagataaagagggttatgttatgtactttgcttcttttcttttgttctatttttagcaaaaatgtgaacatgcttacatacttacagagaaaagagaaattgcagatggaaaataaagagaggcaagaccctacagggaagtaaaagaatcttattctgagcacgctgaaattttatccttggataaagagacaaaacctagtagcctggttaataggaggaaaacaggaatagatgtatatggatgtagataagtctatatcactggtacagggaaattaaagaaggtacctctaacaggttctatttactctgcaagtaaattgcagacgatgaaaaagtggggtaagaggattaaatgcttcaggcgagaggaacctttaagtagtagttttctccacaaattttggaggttaataattttcagtgttttggacaaaatgaacaagttgattctaaaattgaggagaataacaaagaataaaactggctaaaacactcctgaggaagaataatgacttggagggaatatgtcctaccagataatatagcaagaattattataatgctataacaattttaaaaggatgacattggctcaaggggtaaatatataaaacaaagactcagaaacggccatatataagtggaaaattatacataagagaaatggtattgccatcattgggaacagaacaaatggcattaaaatttttttgcccaattatttattgatattgaaaacatagagttgatcttcttctcatttatacataaaaactaattccaaataaattaattacatgggaaaagcaaaaactttatactttacaaaagcaaaagaatatttcattacctcaatgtaggaatacatttatttaagacaaaagtggtaattatgaaaaaattaaggataaattcaattacattaaattaactataatagtcaaaaatactgtaagtaatgtagaaaaaaaatcaacaaactgggagaaggaatttgcatggcatacagtcaacaagataatgatgatcttagtatgtaaagcactccttcaaatcaatgagaaagtgacaatggaccaattaataaaatggaaatgagacatgaagaactatttcacagaagaggaagcacgaatggtcaaaaacataagaaaatgcagtccatctcactagttatcagggaaatgcaagttcagatcacagataaatgccattttgcatctagattggtaaaaatgattacatcttacaaagccaacctgacagacatgtggaacaacaagtaagagtgactcttacatagaactaatgcatgtatccattggcataagctctggaaagcaatttgaagttattttataaatttgaccataaatttactctaaattgactaagtaattccactcctacacacacactaaaggaaaaatcttcaatgtgtatgtgcaatcgtgtacaaatcaaaatatgtaaaaaaagttcatacagcaaaaaacttgaaaaataaaagtatttttgccttgacaagaaaaggaaaaaaaaaactgtagtatatttatataacaggttgttagagaatattgaaaatgaatgaactactgttatgtgcaactacatgcataaattgttaaaacctaagttgaaccaaaaaaggcaggactccatagaccatgatgtgctatacagacgtgcctcattttattgtacttcacagtaatgtgcttcacagatactgcattttttttcacaaattgaaagtttgtggcaactcagcatcaagcaatagcatgtgctcagtttgtgtctcggtgtcacattctgataatttttgcaatatctcaaactttttcagtattttgttacatgtgttagggtaatctgtgatcaatgatctttgatgttcctattgtaattgtttttgggcaccacaaaccatgcccatatggcaaccaacttaattgataaatgttcagtatgtctgactgcttcactgataggctgttcctctgtttctctccctattctcaggcctccatattccctgagactaaacaatattgaaattaggccaattaataacgctttcaatgttcaagtgaaagtaagggtcacccaactatcactttaaatcaaaatctagaactgattaagcttatggaggaaggcatattgactaagataggctgaaactaatcctgttgtgccaaacagccaagatgtcaatgcagaggaaaagttcttgaagaaggttaaaattgctactccagttcacacacaaatggtaaaaaagtgaaagagcctttttgctgagatggtgaaagtttgagtggtctggatagaagatcaaaccagccacaacatttccttaagccaaagcctaacccggagcaaagcccctactctcctcaattctatgaaggctgagagaaataaggaagctgcagaagaaaagttggaagctagcagaggttggttcataaggtttaagggaagaagccatctccataacataagagtgcaaggtgaagtagcaggtgctaatgtaaaggtgcagcaagttattcttaagatctagctaagataattgattaaagtggctacactgaaaagcacattttcagtgtaggcaaaacaacctcctgttggaagaaaatgccatctaggactttcatagctagaaagaagttgatgcctggcttcacagtttcaaaggacaggctgactctcttgttaggggctaatgcagctgatgactttaactgaaactagtgttcatttatcattcagaaaattctaggccccttacaaatggtgctaaatctactatgtctgtgctccataaatggaacaataaagcctggatgacagcacatctgtttacagtatggtttactgaatattgtaagcccactgttgacagctaatgctcaggaaaaaaaaaaaagatttatttcaaaacattactgctcattgacaatgcccctagtcacccaagatctctgatggagatgggcaaggatgtgaatgtttttatccagcccatctatgaatcagggagtaatttcagctttcaagtcttttttttttttttaagaccgagtatcactctatcacccaggctggagtgcagtggcgcgacctcggctcactgcaacctctgcctgctgggttcaaatgattctcttgcctcagcctcctgagtagctgggattacaggcatgtgccaccatacccggctaatttttgtatttttagtagagacggggtttcaccatgttggccaggatggtctcaaactcttgacctcaggtgatccacctgcctcaacctcccaaagttctgggattacaggtgtgagttaccacacccggcttcaagtctcattatttaagaaatacattttataaggtgaacactccgtagatagtgattcctttggcgattctgggaaaaatccattgcaaaccatctgggaaggattcatcattctaggtgccattcagaacatttgtaggtgcctcattaatgcagtaggtagcatggtagtctcataatctgaagaaacattcatgattcatgggaggaggtcaaaatagcaacattaacaagagttggaagaaattgattccaacccttatggatgactttgaggggttcaacacctcaatggaggaagtaactgcggatgtggtggaaatagcaggagaagtagaattagaagtggacctgaagatgtgactgaatagctgccatctcatgatcaaagttgaatggatgcaaagttgcttcttatggatgaaaaaaaaaagaattttgtgaaatgaaatctactcctggtgaacactgtcgaaatagcaacaaagattttagaatattacataaacataactcataaaacagcaatgaggtttgagaggattgactccaattttgaaagaagttctattgtggttaaaatattatcaaaaagcacagcatgttacaaagaaatctttcatgaaaggaagagtcaatagaagcaacaaattttattattgttttgttttaagaaattgccacagccatctcagccttcagcaaccatcaccctgatcagtcagcagctgtcaacatggaggcaagaccctccaccagcaaaaagattatgacttgctaaaggctgagatgatcgttagcattttttagcaatacaggtttttaaaattaaggtatgcacattgtttttgcaggcataatgcaatggtacacttaatagactacagtatagtgtaagtataacttttatatgcactaggaaaccaaaaatattgtgtgtctcatttcattttgatatttgctttattacagtagtctggaactgaacctacaatatctctgaggtatgcctatatttgtaaatcttagggataaataaaaagtaagcaatataaagacctaaaaaaggctaatatacacaagatggggccaaaaaatggaaggcaaagcctgcaatggtgagctaaatgttaggagtgaagtctgagtctgttcaactgtctctgatagagtaattgacaaaataaagaatagaaaattcagaataaagttggccaaagaataatatttatgccataaagtcgatgaaagaatataagacaagatctcatggcaaaatgtgggggaatattaactagggacacaagagcccctttaggtcagcttgggctaaaatctgctagtgttagaaaacacatcaaattaaaatcagaaaaaacaaacacatttgtgaaactaaatactcctgtatgcaactgaagggaagtaagaaggtatgtcaagttctctttaatagttccagatactttcccaaggcaccacaaatcacacatatttcctgaatgtctcatctttaatgaagctgcactaagtagaagcattttgtgtgtcatcaacttggtttccagccattctacttttccattatcagttatttgctaaaataagacccaggctcaaattaagaggccaattattcttttatttatttatttatttatttattattttattattattatactttaagttttagggtacatgtgcacaatgtgcaggttagttacatatgtatacatgtgccatgctggtgtgctgcacccattaactcgtcatttagcattaggtatatctcctaatgctatccctcccccctccccccaccccacaacagtccccagagtgtgatgttccccttcctgtgtccatgtgttctcattgttcaattcccacctatgagtgagaatatgtggtgtttggttttttgtatgaaaagaagatcttgttcatttttcctgtttctttttactctgaagtaaaggagatattactagtagcagtagaatataaaaataacaaataattgtaccatcagatgactgtatctagcttttgacattgtttaatattatctaccatctagctttactctccccaacaagtctattaagtgtcaagtcatctcaaagtcaaatatcatgaaattcagaccctgaaaaaaaaataagcgacttgtcctagctagattgatgatagaatcaaaactaacattcagatcttttgactcatgctttccttgaatcaatctaaataagccactttagatttcacatgtctagtttgcctttatctaatagctaaacttatttttattctaacattaaaagagaatattatgcatttggaaaaaatgctgttgaaaacatacattgaagctgagagtgttggtgtgtgcctgtagttccagctacttgggaggctgaggcaggagtgtagcatgagcccaggagttcgaggttgtaatgaactatgatcatgccattgcatgccaccctaggtgacagagagagacgccatctcttaaaaaaataaaaacataatattttaaattagacattgtgttttggaaaaatggaagagttatactctaaagatctttcaacaaatcttcagtatgcctttactaaatggagaagctatgtattgatatgtggtaatactattggtggatcagaaagtattaggtaattctaggtcattatgaataccaactgaaacagttcttccccaaaatcttcatagcacatctctcaaaaatggaatataatatactctttaataagattattgtctaattttttaacataagttaaatgcaattagatatttgattttctaatggttacattttaaaatatattgattttgattttgaataacattaaatgtttttccacatctagggaggacacatctatgactagcagtggcatgtgctcaggaaaggtaaatgtatgtcctggttcaggtgtattctcacttaacctctatgattttcatattcttcatctaaagttagaggagtttatttagatgcctctgtggtagatactatgggttgacttgctcagccttcatcccaccctccacctatgtggttttctatattgtagattctggaaggctaaaactacatttctcactttccttgcagtagggttctacacataaattaggtttcaccaattaaaaacacttggaaggcagaagtgaagtggaaatcattttcctcttttggctacatctacaggcttgcacagttatgatgacatgaggatcttggcaacagcattccattgtccactctccagctacctaagtgtcaagaggcagttttgacaaaggcagtgccaatcctacccattcaccagtgttcattcacttgctttgtgaatgttcagggaccatggcaatggtggcagtgacacagaggcagtcctaatccttggatcatagctatgaccttgtgttttgtattcgacaattccagcttcagcctgagagttctgtagtgttctgttagtcattactggaaggccctgcagagcctattctttcagccattccagggatgccttttgcatcttattctcaatactaaatttatttctacttaaaatacttagagttggtttttatgtcctgctctgaaacctgatatctaagtttgctgtgtgctctaatgttcttaggttactggggaacttggtgtgttttctaaaacatagtctccaatatttatggtaatttcttaaataatttaagtttctttctatgtagagtctatttgtaatgtaattttattactatcctataattatccttgttggtgttgagtacatgggagtcaagtgtataaacatatttgttaatgaatcaacagcttatattttcaggaattaggatagctattaggtgctattaaaatagagtatacatatatgttccaaaaaattttatgtactgatacaatgaattagaatgtctgaagtagatataagagtgtataattaactgtattttctaaaaggattttttgtatgaatatgaaaaaatattatttatatatacatatatatagagagagaagagaaataattatgcggatgactgctaataatctgtgatttttttatgagcgtccttttacagcattcatcttgggttaaccattacaacacctgaataactatttgatatttgccgtcacctccttaacgtcttgataatcaatattaactgcacatgaacactttacattcttcttgagctaaaactattcaaataccttcaatccttgtgaatattttcccaaattgcaaggagttcttgcaattcctctattctttatattttaaagaatgtaatacagaaagatctacataatataggtgataaattactcactttggaaactgatatttgagatctaattgaaaaaaaaaaaaacaaaaagcaagaactgagcaagcctgcaacattatcagtctcaattctgggaatatctttgttactgaattgtaaggagtgcaaccaaggatggatgataggtggggaaaaggaagtatagtgttcagtcctaatattggtaaagagtgcctggaaacgaacagcaccaaggaatgtaagcagaggaataggtcagatccaggaaaggaagcagggtagggcacatacaagaacatgtttcagaggaagcagctggccagcagctgctgaacactccagaaacagagagattcaaattgctatatagcaagctgtaaagtccaaaatgtaggagaatgggtgggtcccaggtggtctgagggaaattgaatggtcaaagaagaaaagtcgtgaaaacagtccagccaataataaaaaggataaattaggataaaacaaagataagatatctgaagtatcaggaatgagtatctttttgatattgaaggcagatatcctgtcctaaattttgggttttctattatactttggaaggaagaacttatcctacagtaaacagtccaggctgagcagaaaactgaaagtactacgctgagatggaatatatactcagaggcaaaaagcctgtcatatccattgggtggcaagcttaggattgtagtggagtgttatgtggagcagtcaggctctgggaagataattttgtgctgagagcaagacttaggcacagaaacctcaagggacaaggatcaaagaagagagaaaaattggtcctttgctgaaaattcacttgcaccaaaaagaaaatcacacagaaaggcatgaagtaaacatccaaagtcaagtagagaggggtctctgtctgtgctttcttgccatctacagtcattttcacagcagacaaaagcccacaggtgctcatttctgaagcagggcaaatgcaattagctattacaactcaatagaatgatctgtattctagtcacatcatgttgttagttgtgtttcttagcagcacactgaaaaaaggagtcgatttgtgtggcctgaccatttttccctcttatagtaaaaacaaatgttatgtctgaaaatttagatatttttacctttattttatttgttctattcaaagatattttgaatataagtggtacctgtaggcaaaaatcaactaacatttattaagcacctttttgcttgcattttacatataatagtttatgcagaactatatagttttcacagaacttagtaagttctcatagaactgatagtaaaacttcagactaagaatcagtattgcagagttcaagcttcagatgtatttctaagcagctaaaaccttgagcaaattacttccccagtcattggtttttacaactgcaaatgaggatgttaaaagctgttttacagcttgtttggacaggattaaaggggtttacatatgaaattctgttaagtttaatgaatatttattaacaaaataatgtttgccaaacagcatgcaaaggcttttgggatgatacaaaggaaataagctgtggttttggccattgaggtctgagtctaaagagggagactgaaatatacactttaaaattagagaaaatgcaggaactgtgagagtacagagaagttcagtatgaaagtaactaaaataatagccacatccaatcactcttgatgttcaatgagttattttctctttttgtttaaattatttctaatcaaaaggcaaggaacagaaatgtccattatcactgacaggtagatgatttacagttgtgaatgatgagttactcattaatgtattagtactggaggtattacgatgcagtaggtcagagccccaaggctcacagcaggctcttgtccattgtaacttaactatataacttggaaacattccagatcctctctctccctggtccttccacttactagctacgtgaccttgaacaagttacttaaactctcttttcgagctaccatttaacccagcaatctcattactgggtatatatacctcaaagagaataaatcagtctaccaaagagacacatgcacttgtatgttcattgcttcactattcacaatagtaaatacatggaatcaatccaagtaccattaatggcaaataggataaataaaatgggtatatatataccatggaatactacacagccattaaaaatgaaatcacgttatttgcagcaacatggatggagctggaggccgtaatcctaagcaaatgaatgtggaaatagaaaataaaatactgtattttctcacttataagtaggagctaaacgttaagcacacatggacataaatatgggaataatagacactgtggactacttggaggggggcatgggctaaaagctacctattgggtactatactcactatgtaggtgatgggatccttactccagtcctcagcatcacggaatattcccatgtaacaaacctgcacatgtactccctgtatctaaactaaaagttaaaaaacaaaacctctctgttctaatttatcatctacaaaataggagtaatgataggttgtacattgtaagattattatgaagattaaatgagctaatctatataaaaatttttaaaaagtgctagtaaacagtttggacttaataaatgttatctatattcatgaatgtcatttttactataatgatggtgatgatgctttggcatatctttttgtaaaatagagaataaaaagatttatctattagttgtatgatgaggattaaaatttaaaatgtctggtttaataggtccttaataaatatgaactattatgataatagtgattactactaaaaatcattccctatatatgtttagcatttcacaatataataaatgcttttatgtaaacaaataaataaaaaatataaatttataaacatataaaaatgtgtgtgtatatataggatttacagtatctacatatatgtatatatgtgggtatatatatgtgggtatatatacatatatgtgggtatatacatatatgtatatatgtgggtatatatgcatgtatatatgcaggtatatataaatatacagtatatatgtatatacacaaacgtgtatatgtatatatttatgttacatgtatatactgtaaatcatatatacacatatacacacacacaatgacacacatatatttatatatttatactcacatatattcatcagtgtgagtatatatatttatataaataattcacaattgcacaagagatgaacaggccagattgttctattcctatgtattattcacatttcatagtttgttcattagactactgtggtcttctacagaagatctttgaatttgaatgtcttactacgtctttgctgacacacacacacacacatacacacagtttctggttggtatgtggactaacataacaccttctgtttaattaattctgcattcttttctcctttcgtttcttccattgctttcctacttccataagtataacactggaatccacatatttagagaaatttacggccaggcgctgtggctcacgcctgtaatcccagcactttgggaggccgaggcgggcggatcaggaggtcaggagatcgagaccttcctggctaacacggtgaaaacctgtctctactaaaaatacaaaaaattagctgggcgtggtggcaggcgcctgtagtcccagctatgcgggaggctgaggcaggagaatggcatgaacccgggaggcagagcttgcagtgagccaagatcgtgtcactgcactccagcctgataacagagcaagactacatctcaaaataaataaataaataaataaataaataaataaataaataaatttacttatgtactgtagttgttcaagatgaaggttacacacagagaactgggtatgttatttatgagcatatttgcattcatgtagcatcttaaatgtagttggcaaccctcttctagcacaatggacacctgctggactaacaatatgtttatacaaggaaagtgaaaaatatctacgtttgcacactggctgatgaaatgaaaatagtttaaaccagtgatttttgtgtatagctttcttttaacttttttatttgggctgagaaccatgtgtgcaatggtatgatgtttataaacatttgaatgataaatttctctatgcacagagttacccaacagtgtaggtttacaagaagacactacattattgaaaacaaagtaattaaattttcgaggtcaaagttcaaggaggatcctgcccttgagactctctttccctcctcaaggagaatgagaagcctcactgggttggcaattttcggaatagaaaaatataaaaaaaaccctgacatcttccaggcctaggaacacatcgtcttttgtcttcgccctcaccaaacctatgcagaatgttgtggcacctaaatccccgtttctgggctggagactcagcattatctcttgtcaggaagttgtcagatccctgcatctgcagaccacagataatagggaaaaggaacgtcaaggtaagatctgtgtaattaattagcttgttgagcaaacagttgaaagggaaatgaatttattaatttttgaaatgtatttttaccagattaagagaagctttagagttctatcaaaaaacttccagatcaatcaacaagtgatacatatctatatctatatagatatagatatagaaaattcagtgaataaaaaagaagttacatactaataaatatattagcatattctatctggttcacctgataaccatatttgcatagtcatattagttcaataatgacttttgtttttaatagaaattaaaattacatagggcagtttaggggagtaggaaatatcatatgcttctctttgcattatgtttgttaatatcccattggccaaagcagtcatgtagccaaacctgacatccacagggtagagaaatatattctcccatggagatgaagacactaatgaatattttgatgaacaataatctcacctatgacacctgccattcatctgacatagaaatttccgatgaattaaaaatctaaacttaaaaagctaagctaacttttaaattttaatggttttatactgacacaatttcagacttctaaagttgttgcttgcagcattagtcacagtagccaagacatggaaataacttaaatgttccttgctggattcatacagaaaatatgatatacatatgcaatgggatattattcaaccatcaaaaagaatgaaattctgccatctgtgacaacatggatgaaccttgagggcattatgctaggcgaaataagtcagaaagagaaatgcaaatactatatgatctcatttctatgtggaattttaaaagtcaaacccatggaacatagaatagaatggtgattaccagagcctgcagggtgaggacatttgagagatgttgatcgaggaaacaaacgttccgttgtaagatgaataacccctggaaatctaatgtgcaagaataattttgctttccaagattatacaaaatatttcttgtatttcattaaaaattcatagtttttaactcttgttgcaactactttatttttttccggatttattgatgtacaattgacagataatattgtacacatttaagatgaacactatgatgcttagatatatgtatatattgtgaaatgattaccacaatcaagttagttaacacatgcatcacctcatatagttagtgtgtgtgtgtgtgtgtgtgtgtgtgtgtgtgtgtgtgtgtgtgtgttgagaagatttaagatctactctctctggaaatttcaagtatataatacactattaatattatttatatcttttaatgggaaattccccaattaccagtgcttatctgtttcttatagatttgtaggagctctttatctgttaaatatgctggattcttttgctcatcttttaaattttgagtgatatatctttctttgtacagaaacttaaatttcatatagccaagtgtaagtaaaacctaaggcttttctcatagtttctgctattcttttctgtaagtcgtaagtaaattatcacatcatagattttcccataaacaacataacttaggcatgttgctccagatttgatgagatgaaaaaatttttaatgtccctgaaaaaatatgtgtatataatcaatatacaaataaaccttagcaaggaaagataactacatagtaactgtttattagttgctattcactgaaacaaaagaaatcatagaaactgaatgaatatgcaacctctgtcagtcataaaacattgttaacaggctgggtgcggtggctcatgcctgtaatcccagcaatttaggaggccgagatggatgaatcacctgaggtcaggagttagagataagcctggccaacatggtgaaacccagtctctactaaaaatacaaaaaaacaaaacaaacaaacaaaaaagctgggcgtggtggcaggcacttgtaatccgagccatcaggaggctgaggcaggagaactgcctgaacccaggatggggaggttgcagtgagtcgagatggcaccactgcactccagcctgagggacaagagtgaaactccgtctcaaaacaaacaaacaaacaaacacccaaaaataaaaacaatctgttaagatagaaaaaatataatatggctacaaaataatgacaattatctattcaaataaaataaaagagagcacttttatattgtgttttttacacatagcaacatttaatattattcttgtatttttcattatctgtaatatatcaactgcattaatccctttccacaatattttatccagttaaatttttttacacatagcaacatttaatattattcttgtatttttcattctctgtaatatatcaagtgcattaatccctttcaacagtattttatccagttaagtttttttattttttaaattgacacatcattgtttgtattagtccattctcacactgctataaagaactacctgagactgggtaacttatgaaggaaagaggtttgattgactcacagttcttcaggcttaacaagaaacatgactgggaggcctcaggaaacctacaatcatggccaaaggtgaaggggaaccaagaactttcttcacgtggcagcaggggaaagagaatgtgtggtggaggggaagtgccacacacttttaaaccatcagattttgtgagcactcactcactatcacaagaacatcatgggggaaatctgctcccatgatccaatcacctgccaccaggtccttcccccaacactgggaattacaattcaacataagatttgggtggggacacagagccaaaccatactgttgtacacattttttgggtgaatgtgatattttgatacatgtatacaatctgtaatgatcaaattaggccaattgagatatacatcacctgaaacatttatctcttctttgtgttgggaacattacaattctttctcttctagctatctaaaaatatgcagtaaattatggttaattataatatcccttatttactatcaagtactagaatgtattccttttatcaaattgcgtttttgtacccattgaccaacttctctttatacctctttgcttcctttccctttccagcatctggtaaccatcagtctacctccatgatatccacttttttcactcccatgtataagtgagaacatgtgatatttgtctttctgtgcctggcttctttcacttaacataatgacctccagttccattcatgttgccgcaaatgacaggatttcattctttttgtggtatatatactacacttaaaaatccattcatctgttgatggacacaggttgattccatatctcgcctattgtgaacagtgcttcaataaacgtgggagtgcaaatatctcaagtctttaatctattttgagttagtatttgtaggtctggttaaattttaaaagggtaacagattcattaactagcacagttaaaaccagtttaaaaacgcctggctaagatttgctaaaaacctgactaagatttgctaaggttcttggatcgacatcttccaccaaatttgggaaatatttggccattattaattcagaatatttttcctccctgttctttttctcctctccctctggtactgcaattatatgggaacctacttggaattatcccacagatcactgcagctctctgcagttttttgaaatattttttctttccattcttcagattatgtaatttctgttaatcgtcttcagatatgtgaatccttccttctctggttccaatgtactgttcagcccatcaagattattcttcatttcagatattttacttttcaattctgaaattctcattgggtccttcttatagttttcatttctctgcaaagttttctcattgtttactcatattcattcttttatttaagtccttgaaaaatattaagttcttgcaagctaatttcaacagttatgtcatttcaatatttatacttttttcttgattataggttagatctaataatttttattgtatattggacattcagacgataattaaaggggttcctgattatgttaacttcctttaaaagatttggaattttgttctggcaggcagctaaaatatgttttttccctgtaaatcttgattttattctttgaatgcttttattttgtttttgaatgtatggcatctttctttctgtataatgtggtctctactcctaaagaaaggcctttctggtttctcaatgcttgagatgtttagtgtcatgtctctccctactggctgagctggaactccaactctctaatttctgacagttttgtttatctctcaatctctcagcagatgatatctgctaggcccctcagagacccatgatgattaatgagtcttttgagcccatcctctgagtggctctttcttctctggtgctctggcctataaactctaattgcttctgctgcctatgactctgacctcatcctcttcagctcagaaacattgctgctcatctcattgtattccttctgtctgcccacagcacaaaagccattccaaatccaaatcccaggagatcactggtgtatttatgtgtgtttcacatctagcaaaaatcatagttctgcactaacagtgctcagttcccaaaaatagaaacctcatttatttcctacctttttttttagttgtttacatcaggagggcgagtcttgtactagctaccctgtcattccatcacaatggccaaactagtttggtttcacaaaaggcatcaaatatttcctgtgtgtctttgtgttaagcactattttacacatatgaactatttattatctcatcataacaaatttcggaaaagcttggggttgacggtaaatgctatgtcaacacagatcagccaaagacacagtttcagacactttctttctctcagctccaaagctgtgcctgcataaaactaaaataaacagatggaaagcaaaacatgctgaggggtacaaaaatccacatgtgtggagaaaagtaccagaaacaacatctaatttttccattcatatagactctctaagagtgaaattatacttcatgaatataaatatccaaacaaagacaaccagctgaagcaaagtagtgtttgcatcaacttccacatatttgtttagactttcccaaataatgtgcttaattaaaaataaccttcaggtgcaatgagttgagttgttcagtttattcaaagtaacttgctcttatttgagtgactagatgcatttttatttttgttttgggtgaattcagtatcctgaaaatggccaacacttatttgaataatttaaattatttcttttcaaataaaatgtttaagatataacaattgcttcttacactaacattctaaaaggataatcttagaggtgaactgaggtcaattgccatgtataaagcttattctgacttcatatttttgaagattagccttttatttacaacaatttttctactcaatgcatcattgctacaggttttggtttaagaagtaaccctagatatatcttaagatcttcactaggggacaggggttttaaacatcattgccatcatcattcttgcatcatatcctcatcacatgagctttggttcaaaaatcagattttaaacgatttcaaagtcagacttttttttttttgagacggagtctcactctttcgcccaggccggactgccgtggcatgatcttggctcactgcaagctccgcctcccgggttcacaccattctcctgcctcagcctcctaagtagctgggactacaggcgcccgccaccgagcccggctgattttttgtatttttagtagatacggggtttcaccgtgttagccaagatggtctcatctcctgacctcgtgatccgcccgcctcggcctcccaaagtgctgggattacaggcgtgagccaccgcgcccgtcccagatttttatatgtgtctgttggaatataagaaccaaagcaccataaactccagctataaaatttgcttgttattaatacacaaagaaagtgaatattaagagacgaagtctgagccaagaaaataaaaaaagtaattatttttggtttaatttatacatgccatttttgcacaaaatagtgccaaaatttaatgtcacattcaaactttaaaattcattgaagcaaactctctctgtttagagatgccatgatattacatggagaacaccccaatgacttcaccaaaaaaccattaaaattaataaacaagttcagtaaagtttcaagatataaaatcaacatacaaaaatcagtgatgtttctatacaccaatagtgaattgtctgaaaagaaagcaagaaagcaatttcacttacaatggctacaaaaaaaaaaaacaaaaaaaaacccagaatgcctagtaataaatttaaccaaggaggtgaaagatctctgcaatgaaaaccaaaaaacattgaggagagaaactgaagaagacacatatatctcatgttcatggatcagaagaaataatattgttaaaatgtccgtacaatgtacacctctgcacctgcagattcagtgcaatctctatcaaaatagcaatgacaggtggggcacggtggctcacgcctgtaatcccagcactttgggaggccaaggtgggtgaatcacccgaggtcaagagttcaagaccagcctgaccaacatggtgaaaccccatctctactaaaaatacaaaaattagcttggtgtggtggcacatgcctgtaatcccagctactggggaggctgaggcaggacaatcacttgaactcgggaagcggaggttgcagtgaaccgagatcacgcctttgcactccagcctgggtgacagagtgagactctgcctcaaaaaaacaaaaaacaaaacaaaacaaacaaacaacaaaaaaccaatgacaatcttcccaaaatgagaaaaaaaaaatcttaaaatttgtgtgcaaccacagaaggccccaaattacccaagcaatcttgagcaaaaataacacggttggatacatcacatgacctgacttcaaaatataccaaaaggctagagtaaccaaaacagcatggtaaatggaataaaaatagacacatagactaatgaactgaatagagggcccagaaataaatccctgcatctacggcccactaatttttgacaatggtgccaagtatagacaatggggaaaggacagccttttcaataaatggtactgggtaaactgcatatgcacatgcagaacaatgaaactagactcctatctctcaccatatacaaaaatcaactcaaaattgattaaagacttaaacataagacctgaaatgaaactactaacagaaaacataggggaaaagctctgtgacattggcctaggtaaggattttttttttttgtaaaaaacctcaaaagtctgagcaacaaaaacaaatatagacaaataggattacatcaaactaaaaagcttctgcatagcaaagggaacaatcaatagagcaaagaggcaacctatagaatgggagaaaatatttgaaaactctacatctaataaggggttaatatccaaaatatataagaaactcaacaccaacaacaaaagtaaacccatcaaaaaatgagcgaaagacttgagtagatatttctcaaaagaagatatacaaatggccaacagataaatgaaaaagaagatgttcaacatcagaaatcatcagggaaaggcaaatcaagatgacagaaattttcacctcattccaattagaatgactactgtcaaaaaatcagaagataacaagtgttggtgaggatgtggagaaaagagaaattttacactctgctggtgggaatataaatgagtacagccattttggaaaatattaatagtttagagtttcctcaaaaaataaaaatagaactactgtatgatccagcaatcccactactgtgtatacatccaaaggaaatgaaataggtacttcgaagagatatctgcactcctatgtttattgtagtaccattcacaataaccaaaatatggaatcaacctcaatgctcatcaatttttaaatggatttaaaaagtactatcacaagggaatgttattcagtcataaaacaataaaatactgtcatttccaggaacatggatgaacctggatgacattatgttaagtaaaataagtcaggcttgggaagacagtgcatgatctcactcacatgtggaatctaaaaagttgttcttgtggaagtagacagtggaacagtagttgccacaagatagggaggttagggaacaagtggggataggagagattggccaatgggtgcaaagttatagttacacaggaggataagttctggtgttctgttgaatagcaggatgactagagttaacaacaatgtattatatgttccaaagagaagtttttgaactcattacaagcaaatgataaatgttatcagaaattgactttttaaatatgagactataataggacctgataatatcttctaataaatgaatataggaaaatcaccttgatttacactaaaaaagacaatattaaacaaaggtatattattgggaaattctctaaaatgctcaatgatggctttaaaaatagaagtttggggggctgaggtgggcaaatcatgaggtcaggagtttgagaccagcctggccaacatagtgaaaccctgtctctactaaaaaaaaaaaaaaaaaaattagccggacgtggtggcgggtgcctgtagtcccagctacttgggaggctgaggcaggagaattgcctgaacctgggaggtagaggttgcaatgagctgagatcatgccactacactacactgcagcctgggtgacagagtgagactccatctcaaaaaaaaaaaaaaaaaaaaaaaaaagaaagaacggagaatattttttaaatattctcctatttgaaaatagaatttcttaatacttttgagttcaaacaatggaagtaaagagatttggtcaccaatttaaaaactagtttgtctgtgtaattacaatttcttttctctctgagtgtaaacaaaatatttaggatcagtttattgcttgtaatgtgtcatcatttctctctttctttttttttctcacccatttaatttgtttactcttttttcccctgtgtttccagcaacataggaggatttagaaacaaaactgtcttgggcagagggagatgatggcaaatggatgaaaaactggcttcttgtttttggtggttactatagcaataatcatgatgggagatttttagccgcaagtggtttctataacaacatgatagggtgctttagaaatagacctgaggtaaacagattctttaagggcctcttaaccccttttatcccacaaaattagcatcctcttggaggatgaatattagttggcttatttgatgaaacgcttaaaatcttgcttttgttttgtaaagattaaatggttaattattctataaagacctggccttagccaatcagctcttaggctccttcacttcaggaaataattgatagcatccctactttatttctgcacagcaaattcaaatagccttaaagatatgcatttcatagtattcaccaaaaattggaaaaccataaatagtcctcgtgagaaagtgtgttcactctgacatagatcactcaagggctcttgctttactaatacttcatatacactatgatttcacctattgggctccctgacaggtggagcttttcctactctaactaatggagtctgaatactcatcctttattaggctattcagtgtgtgccagaatagacctggtccctattgagttataattcactaggtattacatggggaagtttagtaattttttgaatttattaaattttagtatcataaaaactgacatagaaaaaagcaaaggcctccatttcatacataagcatccttcaggagcccttataagtgaaagatcaaggggaatttatgacaggaatgtggtacaggagtagatggtggtaggcaggaaataatttttcaagagaaagaaagatggaaggcttaaatttagttaagtagttaaacagaggaagatggggatcaagtttggttgactttaatagtgagttattgattatctactctatgttgtacactataggtatatacaatgttgaatagtatatgggatttattttaaaaactaaattatcatatcaagtaaagcactcttattaaactattaattaaattaattgatttgaagtggccatatatttacaagaatgatttcatttatgttatgatgtctcatgcattttctacagtagagccatccttatacttttattcttttctattcagttaagctgccaattcaaaacatcagatattctctttcaaatctcagaaggatgtcagcaaccatgcatctccttctctctgatttcaaacagtacaagctattcccatttccctggtgttttgtgctcagcaatgaagcctcggaattcattacgtaatcacttgccatagccttctggggtggagtttgccaaatggatccctgggagatcaagacccattctccatgtgtgccatagggctatgcacatgagctgaggcatgtctgtattcaccaaggccctgctcagaacagcatgtgccagaatacactgggcaaggagccattcataaattcttgaaaaatcttatccagaccaaaggcacaatggcattgtagttgttgtgctcattgccatggggcttttagctgaataaaaagaaaataaaaaatatattcatgatgacttccaagttatccagtaaccacagtaacctaggttttccccaaatttggtccacaactttgagtcacctgacagaaacaaatcattctgtctttgttcaagcatagtgagccatagagtgagtgaaacaaatttccctgggataaaaaccaatgaatcagcaaagcaaacaatcatcatatatttattttactattagaaggtggtattcaaaatgtcatcaaaaccaaatacatacctcatacatacaggcatactgaaaagcatatattatagttcctgaacttaaagagtttgtttgctaattgtaaggacaagtcttcatatatggcatgaagaacactttaggttgcatatagataagtgttcaattgtatcttaacaataataaattctgtggctgctcaggccaggagctcaaggggtatgtaaaaatatgaggaggattaatgggaaaagtacactttgcattggacttctaacaatttgaatatacatcacagttaaactctcagaaagtattctgagatatttttattcatggctactataagaagaatgtcataaagaagataatttaaattctggaggaataatgtcttactcataaccacacattatttttctagactttagttctctgtacaaaaatgcgagaaaactgttgagagttgcactatccaacacagtagccattaatcacatatggcttttgagcacttgaaatgtgactaaaattaagtgtgctagaagtgtaaaatacactaaggatttcaaaggcttaatgttaaaaagtgtaaatatttcattaatagtttttacactggccaggtacggtggctcatgcctgtaatcccagcacattggggggccgaggtagacagatcacttgaaaccaggagttcgagacaagccccatctctactaaaaatagaaaaaattagctgggcatggtggcacatccctggaatcccagctactcaggaggctgaggcatgagaataccttgaacccaggaggcagaggttgcagtgagccaagatcgcaccactgcactccagcctgggtgacagagtgagactctgtctcaaataataataataataataataataatttttataccaattacatatttaaatataatgctttatctatatttggttaaatatttaaaattaatttgcctgtttgtttttcgttgttaacatggttacagaagacttaacattccatatgtagctcacattatacttccattagacagcactggtataggtgcttgctatttaagtgtagtatgtggaccaacagcatcagtattacttaggagcttaccataaatgccaagtctgaggccccactcctcctgactctgcaaggttaacaagatcctcagcagttcatatgaacattaatgtttagaaaatgctgatctagataatgttttagatgtttctttttatgactctgtcttccttttcatttggatttttttcaaataaatattttacagtctgggcatcctgacctagcacatattagatgcataaacttggggaagttatctgacattcctgaaactcaattccatatttataaaatggatgtaatacctccaatcccataatttttctataggggttaaatgaaacacaagaattatgaaaggaaccaataaattggagaaatttttataatatcaaaaataatattgaaaaattagattattctaattattttcattcttatattgattgccaatactattttgatgtacagtggaatgaactagagttcgaagggctgttttcatttattttacaaatgtcacttttttaacattaattgtgtataataaaacttagcacactgataagtctctagtagagatattaaaacttttggatcttcttttagaacaaaagtgttgtgtagctaaattttcctgcaccatcattatataattgacattgaaattatatctgttcgttgatcgattctgcaaaacatggctttatggagcgggaaaaaactttttcgtctttgttcagaacacttttagctttactgtgagaatttcaatttgctagaggcaaataaactagtaaaatatgtctattccatagtaaaaggggtcattcaaaagcctgtccttattaaaatatacattgattataataaggtcagtgatttcaggcctgattagctttaaataaatgtaatgtcaaaggaatataattagttcctcattaaaatttttcatgattgacagtgagtaaaaatgaccttcacaacttgcatcatttagtcatgttctaaggatgacaaagggcagggcatcttctatgaggtaaatgtgtatgattgcagcctgaggcacatgcacttggtcccttaccctacctaaccctaacgcccaagacctgatccaagccagaccctgtgcttaggtgtgtaggctgtgtaaaggaggacccagaagctttgattctcatggggatgctttgagagaaaaagaaacctttgaaccggcaggacctgatttcatctgtgatgatgctgatgatcagaaattatatataaaagcaaatagcaacgtgcctatcagatataggggatttaaaatatgttgacagaaaactttctcagtgaggccactgaccttctaaagaggagctaatagtagaatagggatattaagatacaggtgatgtcaatgaattttggccaaaaccaatcttcttacctggagtaagaaagtcgtgtttcaaggagtttgcatgagtattaattgtggttgatgatgatgggaacctgccctgattattaggtatgattctcagagaatgtgtgctggtgctaagcttgcatttctcagaacccccaaaactctctttgcaatattatatagtttcattttcttgaacttattcatttgttaaatatgcatttactaagcaccaactatgtacatggcactctgctagtcaatagacaaataataagatatatgtactttggaccctgcattgaaagaaaaagcaaataatgttttttaaaaaactactttatgcttgattgttataaggaactttatgtgtattatctcttttattcctaataataataagaacaaggatgattgataatgctcactctgtgccaagccctgttaggcattttatgttcattaatttaaccctttataacaactctatgagataggtgccatttttacaaaaatggaaactgaggcagagcgatgttatcttgataaaactcatagacttagtaagtggcagagccaggatttaaacccaggcaccaaacttcatgcgcttatccactatatatatggctccacatcattttctttagtaatcaggacactgaggctcagtgaaaatgttttttcttaaagtcacagagatggtaaatactagaaccaaaatttaaatctctgtctaccataaaaatgtcctcttctcactatattaaattggcctcaatttagtatttaagacaacgtgtacagtaggaatacaaaggaaaaatggtcttaaaggagcccatctacttcttattttaactgctccatgtggattctatcacgcagtacatcaaagtaagtgatttaaccaatcatttgttctgcttgattttatcaaaagaggtcaaagtaagaatttcacagcaaggcttaaatgggaattcaggtttccttgctcactcattcattattcaacaaatttctattgactgccttaccatgtgcaagccattttggctatgtcctgattaaagatgtgcccctcctgcaccgcctccctccccaccccaatcctggaactaaatttcattctctgcagaaagccaggctaaagagaattcagcaaaccactttattctcataaattggcattcttagacctggaaattttgagttctatctccagtagcattgtttataccttctatttcattctgattacatttcattagcaaaacatagcaaatgtttataaaatcgtcagtcttctaggtgaaacgatgtaagacaccattcatttgattttttggaaatatcaaattttatgttcacaattcctctattctactctgattatttaggtaaaattaggttaaatatagataactatagaattaaaatttaaaaaactgtgcctttacacgtttggaaaattactcaattttttttcaaataacgccaaccatatatattgaaaataacattattccataccacaggtgacatattcttttcctatccctagcagcgacttccccaagtccctgcttgtctcaacagtttgaggaaaaaaaacaccagaaatatacatgttccagaacaatgaataaattcccaaataactttatatacattagtgaggatacaatgaggagtgtttatctagctaaatatgaggcatattaaaaattgctactttaacccagatatgagcaataataggagttttatctacgcctccttcctttccttctgctgacaaaggatacatttaattcttgacgttaatatcagttaaaatgagatctagagacagatataattagagagctagggagagaattaagttagtaaatcttaagaaaagactgagtatactgatgataagaggatatttaaatagaattttgaaaaagatcaaggatcaataattatacatttaaatatacatatatgtatgcatatacatatgcatagttttacataaagaaactattaaggtaagagctatggctttgacagttaatactcaagaaatatttactgagcacttggtataaataaatagatatggagcacaatacaaagatacagcagatgctctgaacaattaagtccttatcacaactcaaattccatagctagcattttgctgagccaagaatttaaatggtacttaaaatttatagaggccggggactgtggctcaagcctgtaatcctagcactttgggaggcctggatggctgaggcgggcagattgcctgagctcaggagttcgagaccaccctggcggcaacatggtgaaacccccatctctactaaaatacaaaaaattaaccaggcatggtggtgggcttctgtcatcccagctctttgggaggctgaggcaggagaatcacttgagcctgggagatggaggttgcagtgagctgagatcatgctactgtactccagcctgggcgacagagcaagactctgtctcaaaataataataataataataaataatttaaaaatgtataatcagatgttaaatattttcttgcaaaaaacaagggagctggggaacagaacctttttaattcaatttcataattatttttgtccgatcctgaccattcccaggtaatttacaggaagggcatagttggcaccttgaattagtccattgttaggctttctatgtaagggtactcgtgtttttttgtttgtttattttgtttcattctctttcttaaaataaaattccttcagtgaaaattattagtgacttgtacctttttaattatttttattgctatgttttgtacttgttcagtaaattttctattaagaactcaaaactatttctcaacatcttataaaggtaagagctagcatttaccaaacacttacgatgtgtctgcaaagcatttaaatttagtgacttaattctcacacaccaaaaaaaaaaaaaaaaaaaaaaaaaaaaaaaaaaaaaaaaacagaaaccaaggctgggagaggcagagcaggcctggtacccatctgttgccccttcccactgtattatcctgactcgctggtaaatctcctatgattgctaaatagaaaagtcaatgaaaagattgataataaaaaccactgaatacaactttcagattcttgattgatgattttaaattagagaattacctgtttcatagaaaagtgcaatagaactatcaaggacaaaggaataaatactacttacaatagagaaattaacatgttcttccctgaaagtcttgcaccttgcactgtttcattgctctaaataaacatactcggcctcataatgaaacaaaattaccaatatggctattttccaagtcaatttaattattagaaaatacatacacacagatgcatacacacacacacaagaaatatatttactgttatttgggtcttcatcttccttaaaactggtcaaatttgtttttacttctcagcagacaaaaaaactttattttagcactagaaatacttaatgcaaatatagaaataattgcttatagtaactatataaaatcttttcttttctcttgtgcagaggttttcaaattgctggtctcaaaccctagctccttggaggtgtctctaggggaggcaggagactggtctgactgggctccaagggaccttccctgcttcgacctgagcagatctgctttccaattgtgtacattgggattcctcatgacattttccttgaaggaattctgctgctcttaaaaagaaaaaagaaaggaaaagagggaaaacaaaaagtctgaaactcacagtggtagaatttcttaaaacagccagtagatggcaaactttactgcaaggaaacaattttgcagcctatataatttggtctgaaaatagcaattaaactctacatccagtaaaatttgctatcctgtatataagtcttctgttaaatcaggaaacaaaattctctatggtactttctctgggaactaaatttcaattataatttaaaatatcctataacttctttctgtgtccatttaagtcttgctctgaaggtattatcactatgaaaattattgcattgttcactgaaagtacatacaatgtgctaggtatagtaatgtagatgacgtagttttttcattaggatgaacccaactatgtattttattaatgagtttggttgaggcagcacaaaggtcacaaagaaagatttttaactttgtcctcatttataaatttaatcttgttactttttatttccttgtagattccttttgcaataaaaacaacaccaggtgcctctcaaattcttgccaaaacaattctacatgcaaagatttttcaaaagacaatgattgttcttgttcagacacagccaataatttggacaaagactgtgacaacatgaaagacccttgcttctccaatccctgtcaaggaagtgccacttgtgtgaacaccccaggagaaaggagctttctgtgcaaatgtcctcctgggtacagtgggacaatctgtgaaactaccattggttcctgtggcaagaactcctgccaacatggaggtatttgccatcaggaccctatttatcctgtctgcatctgccctgctggatatgctggaagattctgtgagatagatcacgatgagtgtgcttccagcccttgccaaaatggggccgtgtgccaggatggaattgatggttactcctgcttctgtgtcccaggatatcaaggcagacactgcgacttggaagtggatgaatgtgcttcagatccctgcaagaacgaggctacatgcctcaatgaaataggaagatatacttgtatctgtccccacaattattctggtaagtgtgatcatatctgaatcacagatggtgtagttagctctttctaagtggcagaagcagaggtgacattttatttttcacacaatcatttatgaaaatggccaagttcttgacaggaatcaatcactagatagaaactccctaaactgctgaaaatccactgaatgcactgaattctaagtggttgcctgctgtcactgttgctgttttaaatggagctctacatgatttaaaactggattcagtctagaatgaatgaggtccaagagaaactcaagggcagttcaggtttcctcatcagtgcatgttcctttcattccagttcaagcctgctttctaatccccaaagcctggcactgcaaccttctgggaaggcagtttggaagttgatgggtttctagtgctgacttgagtattatcaacagatcagtggtagtaaagctgatggagcatggtatatcagataaaccacgatttttattaagaaaaaaagcctgttcttgttttacgtcttagagcaaacaattgtacctcatatttatctatctattctttacaatgtttctgttgatagaattttattttaataataaagtaacaagttgacaactcatcattaccaagttacatgctattcagcctcttcacactcagtatttatcctccctatccttttgaatcactgttactgttttaggtcaattcttcacgatggccacatttcttgctttgctttattctttggcttttccatttacttgtaagggggtaacttacctagcctatgctttctcacatgcattcattctaacttctgctcaccactttcttacagttcctgactcatatctctaagacaccacacacattttaataccatgttctcccttagcacttgccgtttttgtaccttcctgaaagccttcctgaggctttcagcttttaaacttgccttcttctcccaacactttcacacttagttctttattttgtcattctttttccaagtgttaagcaatatatctatttggaaaatatttctcttcaaaatttgcaccagaaccctccagcatcattttacttttaaacattctaaaactatatattttataaaatagacacattcctagttgctctaaaatgaaatttttcccctctccctcctcctttacatacaaccagtcttcagaatctgctgttttgacatctaagatatgttccaaattgagctcatccattcttttccttggttaggtttatttcaactcttgtgtgtactactacacaacctcccagacgttctacttatagcttctaccttctcgaagttgttctgaacactgcctttgaaataacttttctaaaatagacctatgccgtagttctgaagagccttgagagcttcccactacacagagaataattttagcctctccctgaaagcacttcacaatttgggcccatgacagtggccatgtcctcacacattccaccgaagccttctatttcctctaataaatcttcttcatttcttatacaagtcatttctttccccctggaatgtccttcctcacttcacaatgtctactctgaagttctgctatactttttaagacctagttcaaatatcacccaacacaagaagtgtttccaggttcctttccagctggaataataattccacactgctgcagtaattatattcattatgtttgtactagttgacacctgtattaaagaatcccctataattctttcctattttacatatatctatgtttttgcacccccccccaaatgttagtttctaaaggacagagtattgttttatatttattctttaattcatcaatactttctgagtttctattagatgtcagttagtggattaagaagaggagtcctcggccaggcgcggtggctcacgcctgtaatcccagcactttgggaggccgaggcgggaggatcacgaggtcaggagatcgagactactgtgaaatcccgtctctactaaaaatacaaaaaattagccaggtgtggtggcgggcgcctgtagtcgcagctactcatgaacccgggaggcagagcttgcagtgagccgagatcgcgccactgcactccagcctgggcaacacagccagtctccgtctcaaaaaaaaaaagaggagccctcttcctccaagagcctgactcagtatttgtgagtaatggctgcttaatcaactgttactaaattgttctaagttttacaattcttccatatatttctgggcacccttccccatcctgaaactcaggtaaatgaatattaaataagaattcactttttgtattattttatgtatactctatgatgctaaaatgcttatgtcaaatggaaaattattttatcaagtgacttaattgtcaatactatctaaaagttataggaaatattttaaaagcttataaaacaatagttgtatgaaaagctccttgtttgtatgccatactgaggtgtctctttctttggtggagttatggcaggtgaatttcaatattttttaaatttttgaataaaaataagaaatttttgtggggctggcttggaagtgctttgtttacaatggtcacatttaaaaatcaatacagttcattaagatagtgtcttccattttctgcttctatctcaatattgtgaatggtgattaaaaggaatagatataaaatcaaattaatgtttcattcatttcaactatagtattgtgtaatagtcttatatttgtaaaaaaaacacagcttgcaaaactatattttacaatgtatgttttttaaatatcttaattaaattggattttaatgaatcctttcagtcgtctaaatttaggcataaaagatggaaagggtggccaggtgtggtggctcacgcctgtaatcccagcactttcggaggctgaggccggcagatcacgaggtcaggagatggataccacactggccaacatggtgaaaccacatctctactaaaaatacaagtcccagctactgggaggctgaggcaggagaattgcttgaattggggaggcagaggttgcagtgagctgagattgtgccattgcactccagcctgagcgacagggtgagaccctgtctcaaaaaaacaaaaaacaaaaaacaaaacaaacaaaaaaaacagctagaaagagtatattctaaatgtgaaatgtagtcaaattccatcataaggcacttcaccttacaatgaattcatttatactgtaggttgtatcacatccctgtagggtccaatgggaatgagtccccttttctcactataacacttaggtccacaatgaggatgctttccttgtcaatccctgatataatagtgttgttccctatttgactatattcttcccttgttttctatgaaatcagctacatgttattatttcaccttttcaagtgacatatataaaactttcttgaaaacagaatttaaacaagagactcataaggcagataaaaatcgggtctattattagctggttaggcttgttcgggtaaaaaaaaaaatgcagtcataggcttgctcaccaatctcctacacaagtagaatggcctgtgttctagtagctcatgggtgtttctcagccctgactactcattagcaattacccagggagctctgaaacagaggtgctcagactctacttccagagggtcaaatttaattgatgagtctaatgtatagccagggctggcggccaaatattaagttcatgtgagctttatttggaaatttttcttgcaccataccatcatttagacacacagggaagtgtgtttatttcattgctatcccatgaccaccagtgtttgtggcagcccaggccaactaacgagaaccccaaagaaggtctgtagaaccaagggaaaagccaaagttgagaaggaaagaaaaaagaccatcagcaatcagcatggatgtgctggagtgctctgcctcaacttagacctcctgatgaatcctggaaactgtattacaatgacctagctgctgtgcaccacatccaaatttagagtgatcataaagaactcctcttacagaaaaaaacctgtgttcctctgagcagcaaagtaagaaaaggtaataaattttaaaaggcagagaggtagaaggggaaaaagagctgtagcacatagagagggttcacactgcgtgaattctcctctgtgcactccattatgcttcatgggcagtgattcatgaactacagaaatggtctcagagagagccactgaagaggctggtgagaatctgctgtgcataagcaaaaactccaattgaagctgaaagtaagtggatgcaaacttttttaatgaaaagaatattagctctaagcatgtgactgcttttagttcaatttcatgcaatgaatcatttcataattgaggccttctttaaaattagccagattgattaatgtacatttttctcattcagatgcctgcagtatgagaaaaatagggctgtaagagggcagagaaaggccagttcaatgtatgttgaaacaaatcaatgtagaaaaatatcttattcctctattacaaaatagatctttggtataaaagtaatcttttgggaaataagaaaatgcactatattcaatgtacttttcaactatatgatgaatttccttgcagaaataaaaatgtacaaaaattcatcatatagtgaaggaaatgtatttgtacttacagagtagttagaagactagttagttcatggagactagttaggaggccattgtgataacccaggtataaggttttaggacctggcctgggagagtggccatgggcatgaaaggaaagagaaagtataatgtctctagaaacaagactcacttaacatttatcaaggtcagagtattttcaaacttattgtatccaaggaaaacttgaaaactctgatatgaaacaaatgcattaaaagtttaactggcattgtcaacttaataagcttacaatgtagatcaatgggtctcaagtgttggcatgcatcagactcacctatacagcttatcaataaaatactgttttcagttcaacagatctgaggtgggggtccaagaatatgcatttaaaacaagttcccatgtgatgctgatgctgttagtttggggactacactttgagaaccactgacatagacagttatgtggatttccatgtgacatccttgactgttatttcacaaagtccatgaggcaaggaaacacaaatcaataaaagcaggcttttatataaagcacttattgctagtaacagttctaggtacttgatgatatgatttgagtgattgcctcctccaatactcatgtgttggagacataatcaccaatgcaatagtattgggaggtgggaactaagaggaggtatttaggccatgaggatggaaccttcaggaatggattaataccataataaaaagggctttttggagtgggttcacccccttccactcttatgccatgtgaggaacaatgttcctatcctctggaggatgcagccttcatggcaccatcttggatgtggggatttaccagacaccaagcccactggaaccttggtcttgaacttttaaacatccggagctaagagaaataaatttctgttctttataaattacccagtcctatatattctgttataccagcaccagatggactataagacacatgatatggattttttaaatatttgtcgaattcattagatcattaatttattcaacacatatatattgagtacctcaatgaattgggcattgttctatgttctgaaaatgaaagcgtaaagagaagtgatgacaaagtctcttacattctgcaaggaagagatagatgtctataaaacaagtaatagatatactgtatatagtaggttagagggtaataactgcatggagaaaagtaaaacaaaataatggtattagggattaactttaggtagaatgatcaagaaagtcttcactgagaaggtgacatgtgaataaagttctaaagaggagaggatgggaaccaaggaaatgtcttgtggaatagcattccaggcagaggaacagcagatgcaaaggccctgaggtaaagagtccttgcaatgtttgaggagcagcaataaagttagtgtgactggagtgaaggaggaaggagataggtcagagcaataatgaggtcagactgtttgggaccttgtaggccattgtaaggactttggcttttactttaagtgagatgggatgttattggagagttctgagcagagaactgaaatgatttgacttacattttaacaaggtcactctgcttattatgttgaagatacactgcagggggcgataagcatggaattcaagtgtctaagggaggttaatacaatagtccaagaaaatccactccttgtgggagagaagagtgaaagagacctatcaagttttttgtttctttttgttttaattttttttttcagatggagtctctctctgttgcccaggctggagtgcagtggtgcaatctcggctcgctgcaacctccacctcccaggttcaagcaattctcctgcctcagcctccttagtagctgggagtacaggagcgtgccaccacgcccagctaattttttgcatttttagtagagatggcatttcaccatgttagccagggtggcctcgatctccggagcctgtgatccgccgcctaggcctcccagagtggtgggattacaggcatgagccacctcgcccggcccctatcaagttttaacagtaactttctcccctccctgttccacccttaacatttaagatggaaattaacaaagaaggatcatggatcatgcaaacaaaatgaaagcatgcctttctctctctgccctctattgccctctgatggcaatgtctagattattcagaacaaatctgtcctttagaatattctaacaagaatgcagtctttcttagtagcttctgtccaccatattgccatgcagtgtctttcacgtacacaactgcaacatattttacctccctgggttacatgatggttactcatttaaagtgtcctatcagcacttcttttacttttaatgataattcctgttcctcttgggccttctccaatagtcctcatccatgctgatgcataagtctaagaggtatgatgtaactgacactgccattacagtggcacatatcaaagacataattcgaatttcagtcgttgtggaggtttgaatctgggcttggtgttctatcttttctaaatatattttgatcaactaaatcactttgaaggcatctgtggcaaataatatagataatttaatggtcatgggaaataatttgaggaaaataaaatatgttattaaatataagcttatttcatgagaaataatattattatatcaaagaaaaatggttgtttttatatgcgcttaattatgaaattgataatgttttatggtgtcttataaagaaaattaaacacttgttcaggcttttgctcagaactagagtcatttgaagtagtttttatgaataaatgaagtttccaggttttgacaaatgtttgttgaatgagtgcacaaaataacaaatattcactcagcaaatacttatatttgcaatgcactgggcattgtgcggacttcggagatgtaaaagtgactaagataaaatgtattcctgacaaaatgctcacaaattattctgggatcaggaatgtaaacaacaattaccatctgtctataaacatcatgctgtggaagaacaaagaaagaagctggtaatgttggttggagtcaggaaatgttcctaggaaaaaaaatggcctatgagtagagcaaaaatgcatccctttcagaatgtaaaactgaaacttgtatcttcctcctacatttactattattatttgaacaataacatgttgaatatcaagggagaaggactgcagagatattttggaaaggtgttgctatgatctgaaaagtttggtccttccaaaatgtatatgttgaaatgctgtccaaggcgatgaaaaggtgaggcttttgggaggtaatttggtcattgcggggaagctctcataaataggctatgtgcccttataaaagaggtccaagagagatccctcaccccttctaccatgtgaggacatagaaagaaattataatctatgagccagaacgacagctttctctctgacatgtgactgctatttctcctagtgcctacctagttatcagcagggtgtgtgtgccagtccgaatgcaaaggggatgagccaaaaaatatatagtaatataaagaacggatgtggtggaaagacaaatttggaagtagaagacagggattccaggctcagcctagatgttctctagtggtttggtactgataaataacaattatgaacttccatttcctcattcaaagattggcatggtaatacaacctaacttttagggtcatgatgagaatgaaatggattaacaaaagtttttccatagactatttaggctatgaaagagttaattgccaatatttctgtctcttaaaacattgctactaatgaatacctatggtatctaaacaatgtttgcctttgttttttacaggtatcattttcttatatttgaattgcattcaagtaatcttatacctgattacttgaaagtattattttttgaatactgttagaacccaactcaggaatagattaactgaagttcggtcaaaatctctctgccacacttataaatttaaagtgtaatattttaatatgtgtaggcaagaattcaacttctaaaatggccatatcataaaataaagaactaagaaattactactattttaacaatttcatatatttaggaatagtaattatcctaatgaagagaaacataagaaagtaatttgctatgattaaaacataattatggaagtacgaaaatatataatgtttaatactgatgtatttaacataaaatgagaatgttgtaatttttctataatctttcaaaaaaacataaaattaaagcataaaccattcataaaagtagtgtatttttcaaacatagcatcttggagtctctgaaatgggttactccagcttttaaaatttgatatatattttgctattttcataattcttttaaaaagtgtgggtgtatatatatgtataaaatatagaaagtgtagggggaaagtcattcgtttaacttgggaaaataatatattactatcttgtaaattttatgatatttatgatgcaagtgaagtgggagaaatggcatacagatggatttagagaaaaatggctggagaagaggaatgaagaatgagctcacagaattagaagaaactgttctccaaacagacaactgtaatcattagatacaaggaagtaggagaatttcctcccaatgccccactcctagggctgacaaagagaagacattctttctcttcctagaattagtttcagcctccatgatattctgggaagatggttttgaaactgtcaagaacattcttaaactttcactgatggtaaaatggtaccaaagaggacacaatgtgaaaaggattaagaaaacctgaaaaaaatgtttaatatggaaaccacaggttattacagttttgtctagcagtaaagcaaaacttgtagaaacaaaaaggattataatagtcacaataacaaaataataaaatataatcaaatagttaaataaaataatgacaaagcattaataatatttataaagacaaattttctgtatcatcagatttaatacatcatcagtcttacatacatttcagatatcattaagaaagaaaaattatttggttaagttgtaacaagaggctaaggcactgctgattgtaaagtgcatctcggttctagagagttaaaaatgtgagggagtaaaaaaggagtcagaattgacaaaattcggcagtccttcagagatagaatcctgggcttgtaaaatctgctttaagtgaatgattcaaaaagagaattttgttatttttggtgtccttaggaaaggtgtgtctaaattcacaagccagaaatctcattggctaaaacgccaaagatgttcccactgaaaataataattatccacgtttaatctcttacaacatcttgctaaacattgttatgcttatgttattaatcagagcaggaagtcatccagcctctccttattgctttaggatgttaaacagattgactataatatctaggaggagaacttactgtaaatctatcactataatgaaaaccgaatgctacagttccacattgctctgatacttgtgtcaccgacttgcactgataactgttgtacttgatatacataaaaagccccaaaatagcatacataattattattcaaaagaaaaatattatgcatagaggcctgttaggcatcacatacattgaatggaatttgaaatttaagatgatagtctgaagccagactacaattatttccaaagcgtggactctgcagataatgagaaaggcattcagaatggtttatcaacaccttgctgcgtgcatggtgtgctccctgcccactgtaaagaatgatgaagacagcgtcaaagtcaagacctgttccatcctgataggatataatgtccattatcttgtggcacggaatcttaacatggatctctaaatgccgaaagatgccaattggagtgcaaagtctctaaatactgatcacaagtttggggcacaatcattctgaaaccataataggttttaaacatttgccaaagccacaaatttgacttttgggcttttgatttatggcttgtggaagcactgagaagctctgtttggcatacagtttgccttcctgtagaggtggttgattattccatagctgtgacttgattattcatgcattcaacatttattgagcactttttaaatattcaagaatatgtgctaaatgccacagatattggtgttaaaggtcaaaggccctgacctcaaggagctcacaattttgtagataaaatagaaaaataagcaattgaggacaatatatatagacatttatattaaggggaattttgagagcacagtgaagcagcattagaggcaaatataagtaactatagtttccagaatcatgggatacacaaactggatatttgggaactaactggagctagcctggggaaggagggagtgaggagtggggcattacaagtaagggaaatacctatatgcagcctggagtcttgagatacagtggagctgtgaggccactgctgtgggtggcaccagtagaatctacatcttttagaagcttctactgcattacaaggcaattatgctttatttcagagacagggagatagagaggggatgatgtcaaaaatttaagcagacgagggtacaattatatttgtactttatagtgatcacatttctatagaaatgtagagagtgattgcgaaaagagaagtcaataatagtgagagcagatgagacatgatgagggttgaattaaggtcacagcaataaggatggcaccttagatccatttctaagagagagatgatgagatctgatgactaattaggacacggggaatagtggcaaataagatgataactcctagaactatggcttggatgacctggatgataataccattcactgagaggagagttttggcagggatgggggtggcgcaaatcagcacaggtggggagatgaaggttatcattatttggaattgtggaatgatgcctgtattagtccattttcactctgctaataaagacataccctagactgggtgatttatttaggaaaaaggtttaattaactcacagttccacatggctggggaggtctcgcaatcatggcaggaggtaaggaggaacaagttgcgtcttacatggatggcagcaggcaaagagagagcttgtgcagggaaactccccctaataaaaccatcagatcttgtgagacttattcactatcacaagaacagcacaggaaagacctgcccccatgattcaattacctcccacagggtccatcccataacacctgggaattcaagatgggatttggatggggacacagccaatgcctgtgagataactcaatgccattgagatctcaatgcctgtgagataactgaagaagacattctagacggtatcaggaggatgatctgggccagacgcagtggctcatgcctgtaatcccagcactttgggaggctgaggcaggcggatcacttgaggtcaggagtttgagaccagcctgaccaacatggtgaaaccccatctctacaaaaaatacaaaaattagccaagcatgatggcatgcgcctgtagtctcagctacttggaaggctgaggcatgagaattgcttaaacctgggaggcagaggttgcagcgagccaagaaagcaccactggtggcaaagtgagatgagtgagactccatctcagaaaaaaaaaagaaaagggtgatctggtctggaggtacagaatgctaatgtatatctacattcgcttatgtgaaaacgtcacagggaaaaatctttctgacttctgtgagaatgatcacctgtttctctacctatagtctcttctcaactacgaatagataaaccaaacattttttttcccaatgcacctttaatcccatggcttttgctgaaacttggcatttattcaatgaaaccactttccacacaatcctctttgaagagtccttatctccatgattcattcttaaggccaagagggaaggttggctttcttgctgaaaccactgttcccatgagtccactagtgggacatttaacttcagttttaaaaggatggcttccttgggtggacaagggggaaaaagcattccagacagagatcagtgtatacaaaaactttgagtggtagaggtatatggtaggtttgaggaaaagcaaacagtctggtatgacatatgactagcatgtagaatgatgacagaattttaataggagccattggaattgtatggaccatgcttttggaattctgtgagcttcttattctcagtcaccttcatctttattccactgcagccatacattgatccaatttcaagttagaccctggcgtcattcaaacctgctttacaacagaaattgtcaccacatcctgaggcttctcatttcctttctactattgaatttttagcagaacctctgtcgcctggcctttccatacccatactctctctcactccttctctatcttgacatctccccaacaatcatggacttaatgagaagcatctcaagaatgtgtctgtcattgctctctaaacattcttgtttttgaccttcaactttccagtagtggaaagccccattttctaccttcttctcgtctagctgtaaagctattaatccacttcaaatatttattacctaattttagctatatatttgctattgctttgtggctttttctacattaattgttgatttttttaaatggtatttgacacgctggctgctccaaatttttccagtctctatattttatactcccagtaatgtcatttatatttattgataagtgaatttaaggttattctaaattctcttttagagttgtctttgcttccagtcacttttcaaacattttttattctacctaccctgaagaattaagggtggaatgcaggaaatgacaaacacactatagtaatacctaccattgatgtagcatttactgtatccaacctcgttgttagtagtgatagagcagagctcagtcctggatggtctgtcaaaaaaatttatgttctttccactcttccatgaccttagttatgccaagtaaaatagccatggaaaatctcattcacagactgcagtagaaatagctaagcctcaaagagcaagccacttacctagaaacaagtgctattgcaaaaatttccattttcaccgacataaatttagagttttttattttttaaaaaacaatcaaatttaatatgctagcttctcttttaagttggttatttgttgaatctagtaacagttgtaaataatagatggtgttagaatatcctgctgcattttctgtagagaaaaatgggcacaaatcaattgaactactactgacttctgagttttttgaaagtcttttaataccattttaatatataatttattatttggggttagaaacaaagaaataaagatggataagtatagatattcttccttttgtgtcttttaaaacctgtatgcaaatgcaattattgcatatcaaatactattttggcacttaataaaatagtttgttatttaaatactactacaacttgtataaatcataaacttattttgcttagcaaataatacctactaattttggggggataagtacagtttttttttaacataacattaccttaaaatgaagtgttaatagcttctaatgatgccattaattacattgtcaccagtttttgtatttaagggtagtattttacaaaaagaaaaattaagataaaaatgtctatgcaaaatgagcacttagatcaataattgcacattatatttgtacaatagattttttgtggaaaaaagtgttttttctctagcaaatacttagtatgtatcaggtactgctataagtacttttgaacacatttaattagactaagagtcctatgagataattaccactatcgtctttttcacatgaggaagctgaaacatggaaaggctgagaagcttgcccaaggtcatacagctaataagtggctgtgccaggatcccgacccaactgtctggctttggagtctgagctcttacccactgttctctctgctcctttactaaattaagtgtttaaaaataatggaaaaacatcgaccagccacttttaggcttccaacaaaagtgcagttaacaataaactttgttctaaaaatgacttatttgttttcacggactaaacaccacaagctgttgtatgcaataattctttgtaacagctgctctgccttgtgcaacttcccacaagcacaccaaaagttaatatcaattacaattaagggggaaagttattttgggtaacagaacatttgacaagtgctctggtaaacaaagcattgtcaaattgctaaattatgaacactttgctaaaactttttctgttttttctgtgctgacttttttaaaaggtgtaaactgtgaattggaaattgacgaatgttggtcccagccttgtttaaatggtgcaacttgtcaggatgctctgggggcctatttctgcgactgtgcccctggattcctgggggatcactgtgaactcaacactgatgagtgtgccagtcaaccttgtctccatggagggctgtgtgtggatggagaaaacaggtacattttctctggcgttgggtgattggcttagaactccctgaccatgaactattttaccactctgttgaatttagagctctcacgttctcggcttaaaatttggggtgtaactttatactttaactgatgaaaacattcagatttcactaaaaagggtattcttggagaccatctgtctcaagagggaagattttacaagtcattcttgtaatagtttagaactgcttatcctatggaaaatggccaatttttcaattccatgaaataaagctgttgtagataggaaaggtgcaaaaacagagctagagattattatatatgtgtacataagtttgtatctatatgtcaaggatataaatcagatgacagcaataaatccttttaaagtgttatataaaccatgttggaaaaggcagtgatatttaattacttatatcttgaattaatttccatgtgttcagggaattgggtgaatatttttgagaaagcataatggcgagaaatagccatgtgattctgcttcaaattgaagtctatcattggctttcaggcaaaatagaacagcaataaattacatctcaatatgatgaatataataaatgtgtgtaacagtaattgagctcatataaaacatttttaaaagaactttctaatacttatttaagccacgacactgaagaactttctaatctttatttaagccacgatgctgagttaccaaatacataacaatttttaacaagattagcacttaaaattatcgtttgattcttcgacagctcagtggaaggcaagataagtatttatgtttccatattacaataaggagtctaaagtttagggaaatgagaagacgcccgcaagttcacacaattaattctttgcaaaaggaagaccagaatggttttcctttatttagtaaataagacataatttatgccaaatctaatttcaaagtgaatcagagtcaaaaggagagcaataaaaggcacatatgcttcaaaaatttgcaaaaataatgacttttttttttttttttttttttttgagatggagtcttgctgtgtcacccaggctggagtgcagtggtgtgatcttggttcaccgcaacctccgccttccggttcaagcaattctcctgcctcagtctcctgagtagctggtattacatatgcccaccaccatgcctggctaattttgctatttttagtagagatagggtttcaccatgttggcgaggctggtctcgaactcctgaccgcaggtgatctacctgcctctgcctcctgaagtgttgcgattacaggtgtgagccactgcacctggctctcaaattttaatagaacaatgtggttgtacattctttttaaaatataacttttaattacattccatgtcttgcctttgacttttagttgtaccccaataatgctctaggggcataaatctacattcctggagacaggtaactggccaacacagagacagacaggtcacaatggaagtttccacacaaggcctcctagaggaaaaggaggcttacccttccatacttcactgtttccagaaagcatcaggacagaaacgacacaactttttgattccaatggaaatgtaaacaaggctgaaactttgctatcttttattctcctcacttgaatatgccatgaataatttccctattgtaccattatctcttattgcctaaatgttgagatgatagtcataagatcaatccaatataacctgactttatgttcccacaaaaatttaaaatgtttgctatgagatacattggaaaatcagaactgaaaaaaaaaaaaagaacttcttgcataccaaaggaattatgcaaatggagcttctaattccgtgaggtccactagtcagccagccaagccctttggcaacagggtttttgtcgctaatgttttacctatactagatttttagtaggtattttttaattgaacaaatggaatactgaatagatttctaacaacacatatgaagattacagtcacttacaatatttggtttggtgataaaaacacacacagccatagcgaagaggactctacctgccttataaattcatagatattcttttcccaagaccctcattttgcctaagctgagtgtgcaggtacattttttacaatactaaatccttgaggagaccccgacctaaattaaaagtctcctcttaataaaatcaacaactttcttcattagatttgtattttggggctatttgataattccagtcattccgttaataattagaaatagtaaggcctaaatattcttgcaatctaaaaataagagaacatcgtaagtcacaattcatttaataaaggcttttcctgagtttttcataatttatggtttcacttttcatatggaaccttattaatgggctctctgtataacagagtgccatgatggtataaatcattctctaccaccttaaaaaatattaacaattttattaagtgctatttagtagcaacatatttagtacttcagatatgtggaatactgtgtctattctttatatgcatacttaattgtcacaataaccttgtaatataggtactatattcaatttatgaatgaagaaactgaactaaatagtcatggtttgcatgaccctgtactttaaattttttaaagttaataagacattaatatggaaataaatcatgcattcagtcctgtatagataattccccagagtttttgaggtagtaagatgatgccatgggtcttgggttgatagacagttgaagaaacagtataaagatatctgatctcaatatgactaagagttgacatgaaaatttcatttactttccagatatagctgtaactgcacgggtagtggattcacagggacacactgtgagaccttgatgcctctttgttggtcaaaaccttgtcacaataatgctacatgtgaggacagtgttgacaattacacttgtcactgctggcctggtgagtgacaaaataccttccaccaattatttttcatttgtttagaatacacatatcgcttatagcaaatgaaatgaaaaattattgttgttaaatgttttaaatcaatttcttctagctaatattgtttagttttattcttcagtgctcacacatatttactgctatactaaatgttgtctgaagtaggttaccaagctgcccaatgatcataaccctctagaggaatagaagggaaaaatcaatggaaagatgaaattcagcatgatcttcatggagaaaaattcactggaagatgctcttttcttccaagatgttctcttatatggcaggaatatatagaaatccatgaaataatgttaaactattagaaacttgtattctcttaggcatttgtaaagagttatatttgttaatataataaaaagttaattatctataaaccataattaaagtttacatatagaggataattagacgagtatagaggtgatacaagaatcaatagaaaacagtatgtaacatttgtgttacattacaggccataggcaaatattgatgctaattttgcaaaacaaactgcctgacatacagctttgcattgcataacaacattttggtcaatgacggaccacatatacaaccgtggtcctgtaagattacaatagagctgaacaattcctactgcctagtgatgtcatggctgtcttaacattgtagtatcactcactatccatgggattgtggtggtccctcaggaagtattccaaaagaacgcattgttgtcataggagatgacagcttcatgtgtgttattgttgctgaagacatttcagtgggacaagatgtggaggtagaagacagtgatattgataatcctgactccatgtaggcctagactatggtgtgtgcttggttcttaatttttaataaaaggtttaaaagcttaaaaaattcaaaatagaataagatgtaaagaaattatttattgtttatttatttatttttattttttgaaacggagtctctctctgtcgcccaggctggaatgcagtggtgtgatctccgctcactataagctccgcctcccgggttcacaccattttcctgcctcagcctcccgagtagctggtactacaggtgcctgccaccatgcccggctaattttttgtatttttagtagagacggggtttcactgtgttagccaggatgggctcaatctcctaaccttgtgatccgcccgcctcagcctcccaaagtgctgggattacaggcataagccactgcgcctggcccataaagaaattattttatacagctgtacatgtgtttgtgatttaagctaagcattatttaagagccaaaaggtttaaaaatttgaaaaatttataaagtaaaaaagttctagtacactaaggttagtttttaagacagaaaattttctaataaacctagagtagcctaagcatacagtatttataaaatctacagtagtatacaataatgttgtaggctttcacattcattcattactcattgactctcaagagcaacttccagacctccaagctctattcatgttagtaccctacacaggtgtaccacttaaaaaaatcttttatactgtgtttttattgtaccttttgtatgtttaagtatgtttagatacacaaataccattgtgtttcaattgcctacagtattcagtacagtaacatgctgtacaggtttgtagcctagcagcaatagactataccctatagcctaggtatgtagtcagctataacatttaggtctgtataagtacactctatgattttcacaccatgatgaaattgtgtaatgacttacttctcagaacaaatgtttgtctttaagtgatgcatgactcttttttaaaatctaattctcattaggattttttgataaaaataaaagacacagcatctcctatctcctcttgctttatttactgggaaaaaatgataaacttatgattactcaaggcctagttatataagcttactgatcatctgtctctctctccccactaactttattgtctaagaaaatgataatcttgtgggtggaaaggaaacctggagactagtcaatctaatcagtagtagcttctggttgaaagatatcctattgcctaagagacatttaacatctttggttaaatacattttataggaaaaataaatgaaaatataaaatgaagtttggaatgctgtggcttggaaatctatatatgttatgtcttcccacttgcagataataaatgaggaatatttgctaacctttggtcatcaacttgacttaaaactgaaaatttggctgggcgcggtggctcacgcctgtaatcccagcactttgggaggccgaggcgggtggatcatgaggtcaggagatcgagaccatcctggctaacaaggtgaaaccccgtctctactaaaaatacaaaaaattagccgggcgcggtggcgggcgcctgtagtcccagctactcgggaggctgaggcaggagaatggcgtgaacccgggaagcggagcttgcagtgagccgagattgcgccactgcagtccgcagtccggcctgggcgacagagcgagactccgtctcaaaaaaaaaaaaaaaaaacctgaaaattttccaaactatgtagtttcatgttcttgtcaccaaccaacactcatgaaagatctctgtccagaagcagagggcggagtggatggtttaggagtaggatatgtttcctgtttattaactgagtgaactcgggtgagtttcctcttcatctctaagttcctcatctgcaaaagagggataaaaatactttacttgtagtattattatgaaaagtaaaattgtaaaaatagagccttgcacatattaagcactcaaaaaagggcaactatgtagcaaattctataccatgaggtggaaattatgtaggagggcgagagtttgtaatggagtcaggcagttaagaacatctacctcaagaaacccaattagtacatgttccattcattcatggattcaagcatttaagccacatggatttcagtggctaatacaatagggatctgggaatataaaaggtatcgtcccttcctccaaggagcctaaattctagtagcgagacatatgtcaaaacgtatatagtacaatttttggtacaataagaggctatactaaattctgtaaaaatgaatagagaagaagtgcagggatagcttgatcaaagaggcaccattttagataagctaaagatgactaagttccataaatgtattcactagctgtgtgactttggacaaattactgctctgagcctcagtttcctcatttataatatccacaggatggagctgtttcagagataaatccagtaatgtatataaaactcctggcttatcctggaccacagtaagcactaagtaaaagttaaataaatatcaaaattaggaagttgtgtagtccattacttatttaataaatgaagaacggaaggagaagaggaaagaaagaagcaagaaaggtggcaggcacccatagaaaagagcatgtctggctgggcgccttggctcacacctgtaatgccagcactttgggagaccaaagcaagcagatcacttgaggtcaggagtttgagaccagcctggccaacatggtgaaaccccatctctactaaaaatacaaaaaaaaaaaaaaaaaaaaaaattagccgggtgtggtgttgcatgcctgtagtcccagctactcaggaggctgaggcaggagaatcacttgaacctgggaggcggaggttgcagtgagccgagatcgcgccactgcactccagcctgtactccagggcgagagggtgagacttggcaaaaaaaaaaaaaaaaaaaaaaggagaagaaaagaaaagagaaaaaaagaaaagagcatgtccaattgtggaactttgaatgattgcaaaaatactggactgtgtagggctggaggtagaaacattgaactggggagcaggactaaagccagatcacaaaactccatatctgccctgccaactacggggcagagaaataacaaaatttgctttgttaatttcaaaagagttccctggcttcatggcagatgatcaaagaaaataacactaaaggcagggaaatctagtgagtagattcctaggtagtttgaagagatgagcctgtttgctagaacgaagacaacagtggttaaggttggggcgaggggtagtcctgagagtcacataggagctggaaatgatgtggggagtgagaaaagggcacaggtttaggacagttctgcctctgggtttctgccttgggttactgcatggatggtaattttgcctagatagaacatcctgaatacccttgtaacctatcttgctgttgtatacaaagataaaagttaacactacaaactactctatatctaagaaaaggagaccatttcttcagctcatgacttcactgccacagaacacaatggcaagaatccactgatgtaattgcctagggtcctcatttcagaagtaattaataattacaagaagtgtcagtcaccttaaatgcttactttcaaagatttcctgatgcccagatgtgattggaattgttaacaaacataatataagaaccccagggatgtgactcagtatcatgttgtttatttgttcagagttttacagaaaaatttgttaaaactattgaatacagtcttgactgaaggagtctatttatatacatggttaaagaaagcagcaaataaaatccccacagggcctcagtgttggggacaggactggcaagactataaatcagaatcttcctaatgttcacgattggaatgagataatgcatgagccagaaaagcaaaaaaaggatttatgatgattctaaattactccctaacctggcttatgtgtgtctcgagtcttagaatgagaagaaaattgaaaatagtccagcctttcttcaataagtccattgtggcacaacaaataccagttaataaaaacttattgtaaaaactattatttaatgtatttgaagaaccttaagtatgaaataataatattcaaaaggtagacattcaagtttaagagactctgaatgatctttgttgcggggggtcactacaaaggattgttgggtcttgatctgacatgttattttactttcctttttttttttttttttaactttttgactctaagtttcttcttcagattgttgagaaaggccccaagggtctttttgtaaaaaatatattacactgttgagctgcagaatttatgttgtggttatgatttaacatatgatctcatttaggtgtttattaaaactaatacaaaatgagcaaacacattacaatctcattatttgcttattaatagtcaattccctggtttatgtgctaaactaggattataatctaaattgttattttcaatctttgagtagtactagtgattgaaggtctactgcttacatattgctcagtcctggactggtaaataaaatgaacacagtctctgttttgtgaagcacacagcctgctgagggaggaaaccatatacacaaatcaatatatatttaaaattacaatgagagcaatgaaagaaaagaattgggtggcatgagagaaaataaggggatcttatttatatctgcccatgatggaaagttattctgagaaagcaatacaagataaagtctgaaaattgagtaagagttagccaagaaaacacttgaaggagagttttctagaagagagaaaaacatcacgaaggctgtgggaatgcagggagtttttacagttatgttaaggatgttgaattcctttctatgtgaaaggggaagttgttgaatgattttaaagtaaacacatactatgatttagtttacaagttttataattctcaactgtaaattgtttccaaaacatttctcagcagagttaaatgatattgcaaagggccttaggcgactgtgaagttgaattgtgtttctttaaaaatatgaggtggctcacgcctgtaatcctagcactttgggaggccgaggcgcgtggatcacctaaggtcaggagctcgagactagactggccaacatggtgaaacttcgtctctactaaacatgcaaaaattagccgggcatggtggcacacgcctgtaatcccagctacttgggaggctgaggcaggagaatcacttgaacccagcagatggaggctgcagtcagccaagatcacaccaatgccctgcaccctgggctacagagtgagactccgtctcaaaaatatataaataaaaaaaaaaaaaaaaaaaaaaactttatacatttcttttaccacgttacaaaacacttgatattatcctattgaccatcagtgttatatgtgcatcctactaaatttacattttggggcgagcagtatacatagtatataaatactcttacaaatcaatatggaaaacaacctaatgaaaaaaacaggaaaaaatatgaaatggtaaaaaaaaaaaaaaacacccccaaaatgttcagctcaatattaactggggaaaacgtaaaccaaagtaacagtgagatactatattttatccaaccagctggtaaaatttatatatttggtgatagcaaaggttggcaaacgttttgagccacattcacaatcatccactgctggtaatgtgcaaatggtacaactagagatgtttggcagcttttattaaaattaaaaatgtacattacttatgacccacaaattccatctctaggcataaactgtagggttaaactcaaaacgcttacacagacagccatgtataattgtgtccgaaattggtgggttgttggtctgattgactcttcaagaatgaagccacagaccctcgcagtgagtgttacagttcttaaagatggggtgtccgcagtctgttctttctgatgttcggacgtgttcagagtttcttctttctggtgggttcgtggtcttactggcttcaagagtgaagccgcagacctttgcagtgagtgttacaactcttaagatggcacgtctggccgcgtctggagagttgtttattcctcctggagggttcgtggtcttgttggtctcaggagtgaagctgcagaccttcatggtgagtgctacagctcataaagtcagtgtggacccaaacagtgggcaacagcaagagttatttcaacaagcaaaagcacaaagcctccacagtgtacaacatgacctcagcacgttgccactgctggctccagcagcctgcttttattcccttatctgccccccgcccccccaccccccccccccgcccacccccccccccccgcccacccacccacatcctgctgattggtccattttacagcgagccaattggtctgttttacagagagctgattggtccattttgacagagcactgattggtgcattttcaaacctcgagctagacacagagtgctgattggtgtatttacaatcccttagccataaagattctccaagtcccactagattagctagatacagagtgcctattgttgcatccacaaaccttgagctagacacagggtgctgattgatgtgtttacaaaccttaagctagacacagagtgctggttggtgtatttacaatcccttagctagacataaatattcttcaagtccccaccagattagctagatacagagtgcccattgggcatccacaaaccttgagctagacacagggtgctgattggtgcatccacaatcccttagctagacataatccgtactagactcaggagcccagctagcttcagctagtggatcccacgcaggggccgcaggtggagctgcccgccagtcccgcgcagtgcgctggcactcctcagcccttgggcggttgatgggacccggcgccgcggagcagggggtggtgctcatcctggaagctggggctgctcaggagccctgggggattgcggggggctcaggcatggcgggctgcaggttccgagccctgtcctgaggggaggcagctgaggcctggcgagaattccagagcagcactggtgtgctggcactgctgggggctcctgcgtaccctccacagctgctggcccgggtgctaagcccctcaatgccgtgggcagcggcgcccaccggccgctctgagttttgggccggcaagcccacgcccacccagaactcacgcagccccgcaagcgcccgtgcagcctcggttcccacacacatctgtccctccacacctccccgcaggctgagggagccgactccattctcggccagcccatagaggggctcccacaatgcaacggtgggctgaagggctcctcaagcgtggccagagtgggtgcccaggcccaggaggcgcccagagcgagcgagggctgcgagggctgccagcacactgtcacctctcataatgatattaattgcaacatcacaatagcaaaaatgtacataaaacaaaggttaaactgtaagacaatggttaaggcatggcacatctatattctgaaatacttggcagtagttataaattgtgagttagatctatattactaacatggctagactgtgcaagggagtgaataaagcaagttgctaaagaatgcagataatacagttccagttatgttaaaacagtcacatacactaaaactgtatgtatttcttacagttgctcgtatttataaaagcaaagaaaaagttcaagtagagaactttcattgatatttaatgttttaattatctataaagtgacaaatcatgttttactgttcttattcctggtcctaataaaataatccagctaagtccatgcaaatttaaaacaacctcttattctgtttcattgaatgctatgaaataaggatttacctttactttgagttttaagagaatttagtttggttttgtggatatttgctgacttttcagctattgaaatatttttaaatacaaattcacaaatgagtatttgaaaaattggaggctttcattaaaatgttcaggttaaatccaggttatcctgacatctaattttatttcaagtcttattaatcaaatttttctttaaaattttttggtcaaaattatttaagtgattttactgatactagtacttgtttccactaagcctcctcttaccagattccccttaccagctccttgagggcaggcacatcaacttgctaaatcaatgccagtatagcagtcaacctccttttaggcaaatgctctataattcaacacctttgacttagcagcttctctgaattttcatcatgcaggatacacaggtgcccagtgtgagatcgacctcaatgaatgcaatagtaacccctgccagtccaatggggaatgtgtggagctgtcctcagagaaacaatatggacgcatcactggactgccttcttctttcagctaccatgaagcctcaggttatgtctgtatctgtcagcctggattcacaggtgaggccaaggagatgggatatgacttgactttctggtattttatggcagaccatggctttaaccaaatggtgtattagcaggaagagctgtactgtgtaaactctgctgctgtggtgcaaagggtcccccttgtgggcatgaaaagtatcttgtttcacatttcagaattcctcaaatcacgagagaaatattaaagagggataaaggaggaatgaaagggatgacatttttatatgctatactgggaactggagtgcatctcaagttctttacgttacacacagaaaatgttgaaatttttatgctatcaaatttgataatgatgttaaattttatgttattcaaatttgctagaaaagttattgtacttatatttacactgggaaaaatgacctagtctcaagtaatcttcctcaacgattctgtagctaaagtcattccacatatcaaatttaaattactctttttttttcacaacttgcttacctaaaacccagaggaaatttgcatgtatgttatccaatgaacagttttgtattgtctgctttctgttctgaaaattttcagaattattgaggcattccccaattcattaatggctagcaatttacctacaattgcattgatatcactgagaaaaccaattacaatctagatctctatcatatttctttctcaatagattaagtgatgcctctggaaaatatatcagttgttgttgaggatttctgagaaaagtaaatgagaaataagaaaagaagggggtgtctatttacacttaggattctctttcaatgtttcagttttgaaatttaatggtctttgatttgtggcagtgtttgctgcaaggtcgataaaaaaaatgtttatttccttattcactgacctttcaaggagaacatacagtaaaaaaattccccaggtgtcaatatcaggaaagtggtattttccctgaacaacttctatcatgcatgctttccaccctagtttaaaaaatgcatccaaataaatcttgatgtgactcaactgattaaatgcatgaaataaatcttgtaatatataatatttcccaattatgtaagctgctagaaataaatatgagatctgcaaacatacaggtctttctgaaatatatttgtgtatttacctcacctctggggatatttaaatttcctgtttctgtttcttactattgcctcttttcaaaaatttgtttctaaattatttgattttggtctagtgtatgcattttcgtcagctactttatatttttcttggaataaggtgaaggcattataaattattttttaaatattggttttagggtcataaaggggtgattctgtgaaagtcaaaggacattgctaatattacctcatcaaataaaaggaaatgggtgaccccttgaatctgcagatctaaaaggagagacagtagaatgttccagaaaagtgttgggcttgatttctgaagagctgccaggaatgactatatgagttaagatgtcctgactgccccaaatctctgtggcttaatgcaatggtttatgttttactcatgtgaattccaaaactgggttcccatcatcagttgtcctacaaatggcaattcagggtcacaggctcctctatgtttttcccccgcttcaaaatgttacttccaaatttgctgtgctcttatgaagcaagctactggagaaggaaagaaaatggagtgtgacacctgcagattttatgggccaaccactacaagtaatgaatatctcttttacccacatattactggtcaaatgtaatcatgtaactacatttaattgcagaaaagacgagaaaatctagtctttctgtgtacctaaaataaagagaaaataagttttgcaaacagataaccaatttgacacaatagctagaactggtacactggggatacgaacctagatcttctgattctaagtttatcctcctgcctactatgtcacatatttttatgtctacacgtttttctatattttgtttttaaataactttttaaatgataatagtatatttatgtgcagttttaagaaatacagggaggcccatgtatgctttacctaattttcccaatagtaccatgttgcaaaactatagttcagctatcagacttgcatattgacattgacaaagtccacatccagaacaattatcatcacaaggatgccacctctctccttccctgcctcctcatcccttatccctggcaaatactaatctgttctgcacttgtataattttgtcattccaagaatgttatataaatggaatcatgcaatatgtaaagttttagaataagagtttttttttttttccactcagcatcattctttggagatttattgaggttgtgtgtatcaatagtttgttccttttcattgctaagtaaaattcgatggtatgtatatatcaaagattttttaaccattcagccattgaagggcatctagattgtttcagttttcggctattaattcataacagccgctgaataaagctgctagaaacattgttgtacaggcttttgtgtgaatataaatattcacttctctaaggtaaatgcccaggagtaaaattgctggttcctatgatagtttcaggtttagttttctaagaaactgtcaaactgttttccagtgtgtctgtaccattttgcattcccaccagcaatgtacgagtgatccaatttctttgcattctcaccagcatttaatgttatcactgttttttttaatagtcatgttgataggtatgcagtgatatatcactgtggttttaatttgcatttacctaatgcctagtgatgttgaacatcttatatgtgcttgtttgacatctgtttgtcttttgcaggaaaatgtcaccccatgttttttgcctatttcctagttgagttgtttttatttttttaactgttgagtaattttccacatacagaccctgggcgttttttgtgaggttatacctaagtatttcattttcttttgagggatagtaaatagtattctgtttttaattcagtttctacatattcattattagtgttgggaaaggcagtattgtgcatgtggcctttgaaacccctactcagccacataagaatgggccttgggcctagaacacttccttcccaagagataaagcgtcctcgcagaccatgctggagttatcaccttgtgtgggaatatctttccctgtttcagactcaatatgtactccctcgttctgcttaaacatatgtatcatatggcacctagccagccccactgctgtaactttcttctgcggggagggcaaaaggttcttctgctgcagcatgaaatggttgcatgctgccaactgccccgcatctgctgaaaggaggccctgctgtttatggggactgcttatggggtcaccacatagctgaccttgctctgtctcttctctatgtgagtaaagcattgttccatctagtacttgactgtgttgtgttttccttggtaactccaatactaaaatgcagtggccaaacgtgtccagacttttactcctggtaataagcaacagatgccacttgccaaagagctagaacataaaaatatgattgtttcttggttgttgattgtgtatagtgagactttgtttaactcacctatgagatctaggaattttctttttgtagattccagggcattgtctgcatggacaactatgccatctgcaaagaggactggtgttatttcttcctttacaatatacatgctgtttattttactgtgttgagtacgagttgtgagagcagacgtcttgcttcattcaccattttagagggaaagcattcagtcttttaccattagctatgaatttttatcgatgctctttttcaagttgaagtagttcctctctactcctaacttgctaagagtttttaatcataaatgggtattgcatttggtcagatgcattttctgcaattgatttatcatgtaagtttcttatttagcctattgatgtggtagattgctctggttcattttcaaatattgaaccagacttgcacatctgaaataaatcccacttggtgtattttttttcagtttgctaatattttatgacttttttgcttctaagttcatgaaagttattggtctatagttttctttctctctctttttttttttgtactgtctttgtctggttttaagatcaaggtagtattgacctcataaaataagttggaaaatgtttcttaattttctattttctggaagagagtatgtaaaattgatgttaattattctttaaatatgtagtagacatattcagggaaatcagctgatcctggagattccattttctggatcttttgaattgcaaatttaatttcagtattgttatgagactatcaagaatacttattttcggcaatttgtggatttcaagggattggtcctttttttttctaaaaattgtgtattttgctgtcgttggatggagtatttctatatatgtcaattagatcatgttggatgattgtagtgatcggatcttctatattgctgatttttctgttgaacttctgagcataatgttgctcataatattgccttattactcttttaatggctacagaatctgtaatgatttctctgttttattcctaattttgactatttatatcttttctccccttttatgtccacctttttacaggtttatcaattttactgattttttttaaaaaaatagcttttggtttcatttattttctctgttttcctatttgcaattttattgatttctgttcttttttatatccttatttctgtttgctttgggtttattttctgttttttaaatttatttttatttttctagcttcttgaggtaggaagttttattactgatttaagaccttttcttttttctaatatataagcattataaatttaactctcaatagtgcttcagtagctgcatcccacatattttgatatgccatacttccatcttaatactgttctgtgtatttttaaaattcctttttgacatcctttttgacctatggatgatttagaaataagaattgaattgtttaatttctgtttagaaatttttctcttgtctttctgttattgattttcagtttgatgccattatgattagagaacacattctgtataatttcaaataattcaaattatttcaaatttgttggggtttgttttttggcacaggatacaatctatcttggtaaatgttccatggttgcctgaataaaaattaaaaaacaacatgtgttctgctattgtttagaggcgatttctatatatgtcaattaaatcccattgactgatggtgttgttcacattttgtatatccttactgatacagaatagcactgtctagcagtccattacttgtttagaggagaggtgttaaagtccccacctataattatggatttgtctctttcttctttcagttctatcaatttttcttcacgtattttgaggctctgttgtttgatatatacacatttagggtcattatgtcttcctggtgtgctgatccttttatcattaggcaatgattttttttctcatattcttttcttgctttgaaatctagttcatttgatattgttatagccattcctgcctttaaaaaaattatatttacacagcatatatttttccacccttatatttccaacccacttatgtcattaaatttgaaatgattttcttgtaaacagtatatcaaacagcaaattgttgggtcatgcttttttaattcatcttgccaatttctgccttttaattgatgtatttagaccatttatgtttaagtaattattaatattgtagggcttagctctatgattttattatgtgttttctgtttgattcctttctttctctttacttcctatgaattagttgactatttttgggatttcatcttgatttctgtatagtgtttttaaatatattactctgtgtaattttcatagtgattgctctgggtatgactgatcacagcctattggtttcagtattttaccacttcaagtgaagtataggaatttcacttctatttaggttttttttttttgccttcttcactttaaaatatccttgttttgaggatcagatggtgttataatttttattttaatcattacatataatttagaaaactcatgaaaagaaggatactccattgtgtttacttatgtgtctattctccattgtttgtcctccccaccttaggcctcaagagtctttctttttttttttaaatcattttatttaggtttacagagctttctttagccattctatgagggtaggtatgctagtgacaatttcttttggttttcctttgagaatgtgtttattgcacattcattcctgataagtagttttattcaatgtggaattcatggttgacagttcttttctcatggaacttgaaaaattctacacaacttttttttctgcaccccatggtttcaaatgagaaatctgctatcattgtaaagtggtgctgggtgcagggtttgggggaaggaaggccggctcggcaggaaggcaggtttgcaggcttttgctcccttttccaaagaccaacaaagagaactttcccaactcccaacccaagcccttttggaactgtgtgtggttgttggcatcctgtggtgcctccttgccatccctgccctttccatgcctggcaacgggtctttgtggctctgcagaatggagatttaaacccaagttcatggcaaaacatctgaagttcatcaccaggactgtgatggtataggaagggaacgtggaaggtgcatagaggaccctaaacagaatcctcactacggatgggctcactgaggacattaagcttcggcggtattatgagaagccatgcggccggcgacagagggaaagctatgaaaagtgccggcggatctacagtatggaaatggctcacaagatcaacttcttgatgcgaaagaatcaggcagatccgtggcggggctgctgaggcgggcagatccgtgggtgggctgctgaggcttgtggatgggacacccagtatgaaaccctcatccagttttgtctccatctcttttttttatacaatcccatttcctattacagttctgcaataaactcagtaaactcaaaataaactcaatatgtttgcaaaaaagaaaaagaaaagtggcgttgccctataggtaatagattatttctatctaactgctttcagtattttttctttgtctaattttcagcaatttatttgtaatatgacttggtgttaacttatttgggtttatcctatttgagatagtctcaccttttaaaatcagtagatttatgtcttttggcaaatttgggggcttgtcagccaatttttctttgcatattctttcagatccttttttatttttccccacttctgggactctaatcatacaaatattgggtcttttgctatgcttccagaggtttctgaggctctgtttttatttttgtttcagtctattttctgccttttgctcagaatgagcaaattcttttgatctgtactcaagttcattgattctgttcttttttgtctcccatctagtattgagcccattcagggagttacttcatctattgttttttacaagtctataatttccattttgttcttttaagcaacatatgtttttgctgatacttctgttttttcttcatctcaggagaatttgtaattgctttttaaatcatttttatgctggttgttttaaaattcttgttagataattccaatatctgatttatctctgggttgacatcatttcattttattttctcattcaagttatggttttactgatccttgtgatgacatgattttgaattgtatgctggacattttagatattaagttaggagactccatgtcttctttgaatttttgaatttagcagacaatcacctttttaggttttaagaacaggtcctggcctacttatgtggactgtgggtccaatgatcagtttattttctgattctttgctgtgttgttttgacctccttggcttaccttgtgccattgggcctcccaggatctctactgatgatccctgagtggtcagaaggtgtttccttaggtgagaatgttccatgtccttctgagaaatgggagtctttgatttatggagatgaagaggctcctttagtgggtgttgtggtgagcttctccctgtctctgggggtagagagcatttcctaggctgaatacctgttgtggcataatcccctttactgatcccccactcacagggtatctcttgatggaagtggggagtctcacaactgctaaggaaggaaaacacttcacataacaggccattgtggtagcataattccttttgccatggcccccttgcctatgatgcctctggggagggggggagaagggaggctcagcaacagaggaggtaagctctttctctggctgctcttttttcttttcttttctttttttctccttctccttctcctccttctccttctccttcttcttcttcttcttttttttttttttttatcagtagggctttgtttaattctctttgcccattcttccaggctcgccttgtgttgtaggtgggactctcgttcaatctggggaaagaaagagccaacctcggccaccttctcttgtttctgttgctgaccggggatcagcaaacaccaggacggaggcacctccttgtgttatgctggaggttataaaaagccctgatgctttgctgttagtcctggggcgtctaaccagttcaccttcctcttccacctttcagagttctgtttggttgttacatgtagtttttagtcatgcttagtggggagaaacagggagagagaagtctatgctctcttgtccagtctaaaagtccctatgtaacatttgttaaaaacacttgtgttatagtagtataaagaaaaaaaatttttttaatggcttcaggtagaaaagcaagtgttaactttctctttatcttcctgatagtaccaagaagttcaaaatatcatttatttttatcaatgactatatttataattaattattaataaataacttactatttcccttgcctttcttccatcccgaatagttggatattcaactttatttttatttgttatacgtccattttatattctgcagatagaaaacatacagtttacttttttacatgctatgtgtatttatagctctattggttgttagattaaaataaaatttccattatgttgaaaaatgtatttgtgcatagtacatttactgacagctccattcaaaagaacctttccaagtgttaaatacaggtataaactgttctttttttgtattataattaagaatgtatttattactcttcactacttgtgtaattaccttctatattgaaaatatttgcatatgtaacgtaatttttctaactttttataatgtaaaaatgatatataccagagtagaaaattaactgacagtctcagaattatactcagggagttagaaatagagagagcatgagaccatggaagatgacaaatgaaaacaggaactcaaggaggcagagaatcctagtgagaggaatcaagaccccctgaaggaggattaacttttattcaaggtttcttctagaatttccagccggtaaagcaagttaccatggcccagagaaaccaaaagtctcatttggtaaggtaattgagaaaaatctaaagatccatttagatattttaatgactagaattgaaccatgcctctagaggcagtagtggttactattctctaattctccaaaatcatttcaaaaaaaaatttggcaaaatatgctcatatcttgtcataactatttgtgaccatagttgcaacactcaaattaaaatgagaatgggacattgccacttgatttaaatgtctgtgcatttacttaaacctgcacatccacataattttaatggtaagcaaaataaatttataattggagaaggcctgtagttgaataatactattcagtccattccaaagtcagtaaattatctttattttgtatgaccacccttgaccactactagaaggaatgttggctgcttctttgtattctgtttgagctttccagtccggggcactgggctcagttctggggataaaatgatgagagtacatggtctcttcccaagggaaaatgaaagaacaagaggaaaatgatgcgcaaagtgtaagacaatatgataactgtcacagtggagccataaaaaggcaccattagataaatcaataaagaggaacttttgtgctgtttatgccagatagaagttagtggaaattataagaacccaaacagcttgataaattcacattttgaagtacaaatcaacgttactactgaaacttttacaaggatctcatgacctgtgtgcttacccttgaaccatcctgttctaaccagccaagtgaaattggaaacaattgatatgtctttcacgtgaacatttcatttctatttatcaaactatactcatgataatacccttaacaagtttccaaaccatctcatccaagtccaattttcatttctaactttccctcaccaactccaattagcatgtactccaactcagaggaacaccctccctggtctctggaacgctacattgttgcctctgaggctgggattttattctacttcacccatctgctctctgtatggaaagaactgagtgcagcaggggatcctatgaagtcctggcttcaaacctcgggcaaaaatatcgggtttcttaacaataaacaccccgatgagagccacctggcaaagtgactgcacacagggctttcgttctcaagttcatccgcttcaagcacaatgttgctaaaaatgaagcgttcacttttccttaaaagtcaaatcctgtcactttacctaaatccaactaaaatagccatagagggccaagcatatatcattcaaagcttcatatagtcatgaaggaattaggcaatggtacagtcaatatctcctgctggaagagaaattttcaatagaattttttcatttgctgacttcacatttcaggagcattgttcctagaaatgcacttttttttcttacttacaatttcaaatttgagaatataaatcctaggactctcaaacagatatttgatatgcataaataactgtaactctaaaagatgaaactttgcttctatcctcgtttacttcataaaacatcttttcaagattcatctgattcatttacctttgcctttaccatgcatgttaatttctatgaacaaaactattcatagtgtgtataactatttacgcttgtactccttttgattttactatgttagctgcaataactaggacaggtataccacgttatacatacattaatttaaaaaatgatttttgttgattgcttactgcctattatttagaaagatattatagcaaggaggaaaatttaaaggctaatatttggaagaccacatacagaccaaaacagaggcagatatgtttgtagaccctatgacagagatagataactatggcatcaagggccttggctgctgtctcaggttggcattcctctgttgacttgtaatcacacaagtaagggaaaagctctcaaatgaataatcagcagacaggtgccaactcttcaacttaagtatgctgaccaatacgtattagaaaaaatttctgaaactaaagaacaaagccaggaaatccatcattaaagtcttgaggtgctgtcctggcaacttagaagacctgaaaggtagattttcataccagagttctattttgatgagagagatgtgggcctcacccatttaaaagagctttcaggagagtaatgtttcctgagaatagccaaacgtttgttagagtaagaagctgatgaaaatgttcattggggaggttgaggatattgggagttgtcctcacagtagaccatcctgcgagctctcatatgacgtggtctagtgtgtgtttactactcatgaggatgcccatcttgacatcccatgctttttttctaactacccaagatcccaaaatgttttttattaagcatgttaatcattaagtacaatattattgacctacacctgacctaataaatgattaattatagctcttttcccaatgtctactacttagtttgttgagagagtctgtcttctgatattaacacagaagaccctcagaaacacccctctcctcctgcatcccctccccaaccaccatgacacgcacattcacctagagcttcacttcagtcccaagcaacccagttgcgagggcaagaaaaagtatccaaaacctcttcctgagaccaaccaatcctcttcctgaagaattacatatccctttctcaaaagaggttttattatacctgccattggcaaaaaaaactacccccttagtcattacttaggaaacaattaatttctgaagaagctataatcagcattgattacaactttccctaaagtacatcaggaacaataccactatgacttataagtctgcttacttcagtcacccactgaagtcccagcgtcccagttcatcatttctggtctttatcccagaatgctctctacataccctaatttcatgcaattttctaccccattctgaacttctctctgtatgctgaagatttaataagcccaattaccaatatcctcaactttttttctaaatgtttccttcacctgcttgcttaagctcaaatcatgctatattctcagggtaccatttcttctgcaatcttcttgaatggtggttgtcttttattcttcttccaaatctcatgtttgactagtcccaaaggtaagctaaatgtcctcatgtcattgcttcatctaggaaattagtcttccatcctcattcagaattttgtatccagcgaaactgagcctcataaatgaaggaaagacacaatctttttcagacaaacaaacgctgagagatttctccacttccaagccaggactacaagaactgctaaaaagcagctctaaatcttgaaacagaacttcaaaatacaccaaaatagagcattcttaaagcataaatctcacaggacccataaaacaataacacaatgaaaaaaaaccgcaaggtatttatacttttgttgacagaaaatcaacaaagaaacaatggacttaaactatactctaaaacaaatggacttagcagatatttacagaacgttctacccaacaactgcagaatatacattctactcatcagcacatggaacattctccaagatagaccatatgataggccacaaaacaagtctcgagaaattttaaaaagtagaaattgtatcaagtacactctcagaccacagtggaataaaacaaaatcaactccaaaaggaactctcaaaaccatggaaattaaataacctgctcctgaatgatcattggatcaacaatgaaatcaagaaggaaatttaaaaattccttgaactgaatgataatggtgacataacctatcaaaacctctgggatacagcaaaagcaatgttaagaggaaagtttatagcattaaatgcctacatcaaaaacccacctcatgttgaagtacatgtctttgaactgcactgctcactacctcttttggttgcaacattcttcctacctcacggtaccttctcctcagtcactgattaccttaatatcttactcctgtcatcattttgaggatttcagcatccgtgtagacaaccgatacaaaccattatctctgttatttgaaatccttatttccaatgactgtgactgccatgccacacacacttctgcccacttctttggtcataacttaggccttattatcgctgataaccttcctaaaaacatcactttaaatcattctgttttatgaccagaacctccaattattccagttcatatactttagaactttttccgttgagcctagtctgttgtcttaaccactttttttccagtcattgcctcacttaccttctgtctcagctaaggtttcaaggtccagcactataattattcccttgcatataccttcggctcacctgattctttctctcttcattgtacttgcctgacaaaggtacaattatggttaaatcaatcctctaccttctccacacttacaaccaatttgaatgtggttggagaaaaactcacaagccacacactgaactgttgagtgtcactttaaatttatggtgccaaatctcatggggcctttagcactagataaaaatccttctagagctctacttcccaagatgagcctttttaaatcttctatttcttcaaacttccaatacctcctccctcattgttaccctaagttgatcatcaagtctaatttcatcaggaaaatagtatcttcctgccaccaaaagtgttgtcagttctgaggtttgatttttatcctttttacaagctcatacgttatcctgttcctgttttgtgaatgctggcaaaagacataaaactttgtgtcaggaaaaaatgcacaaccagcagcatgagcctcaggtttacatgaattacccttgcacccaactcccacagggttggtactacatgggcccagatgagtactgcacagacagatttttgtcgcaactgatgaacatcaagttggggaattcatcgcttttacggtaagcagtaagaagcctgctccttgtcccagagggagacattacttcattcttcagagatgcttgctgcaaaaccaaccccaagaaatgggcaggtaaagatcagtcagggccttgcattcttaggattcccagtaagaaactgccaggacacacagggcccatgatgagttgcttcttccagcaatccatcccatgaccccacttgttcttggctgaactcgaattttcatatgaatatgccactccatgagccaccctgcttaatgtgactgacagagactgggattaaatctgttcaatttgcctcatgcagcatttaattaaggagactatcaagaggactctaagcaataagatgaagtcaacctgtagtatacatttcaactctactccccagggccctggactcagccaattgtacataagtcccaggggcaccaatcatcatcttaactttagatagccagaaagtagtctaaagccagtcagttatccattgtgacccacgtaagggagcttagattgacatactgatctttgatgtcattaccaataatgacaggggcaataaacgagcaacactaacccccaaaggagagacattcccccacatacaaacatataacacaaagggacagactctagttcagaatttctggttaaaattgatttatacctttgttacattggtttggttaattcagtacaacagaagcatcgcttgcagctcccattgccatttatggcaacacttaagctgcctgagtattaggaaaagcgtatgaatatatgttattaagattgaggttgggcacagtggttcacacctgaaatctcagtgctttgggaggccaaggcaggaggtttgagaccaggttaggcaatataatgagactctgtctctttaaaaaaaaaaaacaaataaaaaaactgaaacaaagttgtgggacctatctctttgtacgcatacaaggctgaggaggaggcagttcaggagcttccattagtggtgtcagctatggtgaagtagtttaggaccagccaagtttgcaagacttttggtgtttttataacacctggacagggatgacaaatcctgtagtgagtttagattgtcaactgcagctgctcctagattcagctagaccatacaattgttttgccagcctgcattgctgaatctaaggaataagaagcctaagtgcctctctcccctgaactgcctggggtttaaagtgatctgtgctcgggtgctagaattgttattctccctccatggccatgaaactagggtgtcccaacccagtagctataactttacctcttctccaatcatctgctcataccaataccttttgtccagagaggtcagacatgaataggaataggtcactttaaaaaatatttactgagattcattcattatatttcccacttagtccagttaggttactataagtaattatactagttggtgaatagtatattcaaccagtgttcattgtctttatgatctaagaccatgttaattcaataaaagaatccaggtagctacatcaagttaagtttgaatctcttagtctcccctttagatgtggctgcccttcaaagtgtgtacaaatcaggctgacatgaggttgtcactaggggaagaaaatacacttcaggttcataaatggtcaaggcataatcatgaattttcaaaataagtttacataatttttctacccatccatcttgatcattacctaggagttggccaacaggagacaaatctttcctgcccatggccatatttaatgctcaaacagccttaataaactgttttaataaaatctgtgggccagaaagaggcaaagaaggtagatacagaaaggagggagagtcagaaatcttcaggattggtttccaaaaagtctattccatatctcaatgatgccagcagccttatcagagaatgataagagtgtggaatgtccattgaatatgtttactactggcccattgctaggtggcctttatgacaaaaatacaccattgtcagattgtagatggtcttgaaaactgaaaataagaatcagattatcaaactgaaatagcagcaaaataatctaaaaatatgtcaatattagcaaggcaccaatggtagtcccaagagagggtcagagatctgacacagccaattttctagaagtgagcagggaaaatgctccttgtaatgtggcctcctttactgcaaaacaatcaggccaatttttggcaggagtctcctttggtatgcagtttctagattagaaacatatagtcctttgctgtagttcgtggtagtggatatgttttctggtaagaggatggatccagataatgatggaagccatctagatagatgctgggtaatccatttgattctagttgttctcattaggggttatagcaacagccaccagaaaaccatactatcccccagttgggagtgcaaggaatggaggatgatggggagattagcctatgggagtggacgtgggaaaaggcttggtcctttctaaggggctggtgaccaagtgccagagctgcttcctatccatgtatatcctgatatctgatgagtgtcagggcccagaggaccccttttttcttgccccccctgcatgccattgtgctctgccctgtcaaagggtagtcaccaagcaagaacagtgccacacctgagtaagctagtaacttgagatctcatataacaatgttatttcttcttaaagaagttgatgttgtggaatagggagggggaggaatcaggggtcatagagggagagagcagctcgacactagtaaacaaggttttacattcaatttcactttcaattcaatttctcttgcttgtggctcaatcaaataaactcatcatcatcaaataaaatcatcatttttttttctaactaaagttctatattgaattgaaatgatgtcattgttgactccatttatttcatctttcagtactccttgactcagctgtcacagatacgttgccttctggctggagccacagggcttgctgccctattgtcataataatgttttttcctcctcccacctagaggagagctagaaacaaccaaggcaccatataaggctgtttgttttaatcccaatctgattgatgggcaggaccttgggggtcttttgcttccctctttcacctaccatttcagtgggagtccagggaactcatcttctacatctgaacccatcccaaaggctcttaacatttttcttccagaaagacatgtctctttcaggatctcatctttgttgccataactgttgggtctgagatttaattttaccctgtttataaaggaatgagttagcctgttactgtttcatggatgctggcagaagacactaaactcttgggtcaaagacaaatgactatattactcacagcacagcagactgcatgagtatcatgtttatgtaggtttcttttgcattcaagtcttacaggggtgatttgctagatggatggtgtacctgcagtggatttgcatcacagctgaggaacaatagcttgataaattatctgttttcatagcaggcagtaagccaatctgttttttgtcccaactttgaacctcatgtttcaaagttgcttgctgcaaaaaccaatcctgagagatggcctgggtagaatggtaaggatcttgcattcttggtacaaccaacaagaattgcagtgatcctcagtgcccatggtatatggactctcccaacacctacctatctatctgtcactcatttacttgccgcctcccaattcctgcctatgtttggactacttttccattacaacattcccacctgaagtttacttatgcatggcaccctgttcattctctatgattcaggatctttagcaattattctttatacatcttgcatcattgattttccactctattctaaatcattctaattggcttgcctatctatcctctggaaaaaaaatgctccttagaatgcatacacctcctcagatatcctcttctgtattccaccctcctctaaagagatgtgtatacttactctctactttttcacttcccggtaacctccccattaaggcagtttttgttacttcggtgaaaacttccctgtcaacaatttccatttgctaatctaaaacttaattttaagtccttatcttaactggcctctagtttacagttgttctctctgacctgctggatataatttctttatttaacatctgcccccttttcttcttgttcactatcattctattgctagcatatcctctattttctagactctaaatgctggagtcccctaggattcaatccttaaacatattttttcaccccttggaaaatctcatgtaatctcttgactttaaattttagatagatgtttacaacatctaaatttttgtctccagccctagctcctctcttgaacttcccttaacttttgtatttagatagctaaaatgattttcaaacataacataacccaggcaaaactttttatttttttatcttcatgaaacccaaaagaaaaaaattaagctaaagcaaacaaacaaaataatcacaaaacaaaacaaaaattcacaaaacgacaaaaacacttcttccccatctcagtaagtggtaacagcatattcacccagttggtcaggccataaattcaaagccgtatttggtttctctctttctttaatatcccacatctgattcctccacacagtttgttggcttctcctttaagctgtgtttcaagcacgatcatacttcccacctctaccatttctactctagaccaagccactgtcatgtctcacctcaactacttcaatagcctaatgttttggtgttcttccattcttgactttctaaatcagttctccacacagctttggtagtaacataatatgcatcagatcatgtgagtcttccattcaaacagtccagtggctcacatgttctcaataaaacttgtactccttaacatattcttggaagcccttgtgtgatctgtccttggttatcctctccaaaatcacctcctgagtcctcactctcttcactgtagctaggctgggggtcttaaagttacttggttaggccaaactcatttctgccttaggggttttacatttatttttccctttacctaaaagactacagatttttgcatggtgattccctcttttaaatctttattcaaagaccacttttccagagaggtctatctaaacctcccacaaaaatgccacctctctctgcaccccaacacatacaaacacatgctctatttccttacccttattaatttcttcatattacttatcactgtgtgatcttacgcacacacacagacacacacacttccattaatttttaatctcccctctctcagtccttactagaattgtccaccatgaaatagactttgaacatcttgactactatagctccaggacctagcacagtgcctagcccataacaggaggcccaaccaatatttcatgaatatcaaaatgctgaaatcaatcagttgaagcttgagagaaatctcaggactctcagttgtaagcattgatcatcaacccacatgtcaggtaaagttttgcccttagcagctaaaaactttaataaaccttttgaagattctttcattctcctaatccggaagtaactagatgagcctcagaattcttgctctaattatagtgtatgccatattttgataaattaagttttccatgccacttgacatatcataatttgaaaaatgtgttctccttatttcagattgatcttccattttcaagagtatctaacaccttatctttaagtttctcagttccattttcttcctatcaagaatctaaggatttatttattcaaaaattcaaagatattatatgagcttacatttttatgagaaaggcttttgttaaaaatgaaacctttttttatgaactctttttttaatggatcatgacaaacctataggggtcattactggaaatgtgattaggatcatttgtgcaatgaagcacttcctagcttaaggcaaatttggcctagctctagcctgctgtatcctcccggcactatctttgagtcaagcgtatgttcttagttaattggcttatggcaaaagtaattttgtcagttagatgtttccgtagagctgcccttgctgagttagtgtcttaagacagagccacaaggttttgttgacatgtaagttttctggttgttttttccatttttacttcctgacatctcccatagtgttttaaaaaagaggaatggtggctagaataaagttatgtatgggcaagccatttttggcacatgcgaaaccatcaattcttcaagtatcaaacaatgatatagatgtcagccaatagcgtaagatttttcaaattcgatcaaacaaaatgtcctgctctccacaatctaatatttcttcagattgaatttagagtttagatcaagatgggattactattacattttcccaggtggctatattgatatcttacagctacagattaatctttctccattttttcctctcttttctcttccttgtttgctcttacctcctctttctctcaattataatggttcttaatgaattcattatgtaaaggattctcatatccaaaactctatgaaccctttccaacaaaagggaactagacctacttttgatgcctctaagatgcagctatataaatttcagacctgtttttcactcctctcatggtagtctgaccccaataaggaagagggtctgaatgaaacatttcataagtgtcacagataatctactgctgaagctgtatatgtttattgcttttttcaaagagtttcttcagaattacccctttcaaaataacagtttactctctactgataaaactgtaatcaagatctggttatcatcttttgttaacattttattgaagtatcacacacagataaaagtgtacacataatatatttatagctcaatacatgtgttataaagagaacatgctcatgtatctagtacccagagcaagagcatggttaaatggatgctactttcttttgaaggagatgactagtgccagtgtagttagtgacagaggcaaaattcagttcaatcatcaaaacattttcagataattaaaactgtctacaaatgagacaggcatccttgcaaagaaaaaagattctatgtgattagagttgtttgtggataggaaagatggaattcttgagtggttggttggactggatgacttccttgggtctttccaaccaaagatgtacgtaaaatcaaactctgaagatcaatgttctaatggtaacatcaaggcaattataaatgtacataataaaatagtattttctaaagatcagtgaaaatgattcttaggagatatttaaaaatcatttttcttttcttttctttcctttttttttgagatggagtctcgctttgtcgcccaggctggaatatagtgccacgatctcagctcactgcaagctttgcctcctgagttcacgccattctcctgtctcagcctcccgagtagctgggactacaggctcccgccaccacgcctggcaaatttttttgtatttttagtggagacagggtttcaccgtgttagccaggatggtctcaatctcctgacctcgtgatccgcccacctcagcctcccaaagtgctgggattacaggcgtgagccaccaagcccggccccggccaaaaaaaaaaaaaaaaaaaaaaaaccatttttctagctcattcaggaagtaaattaaaagaatggtggaatgggctttttgctttccatatcatagactattttaagttaaggatactatcagtgaagtctggatgaaaggatataataagtttcataagatggaagatttatatctaagcttgttccttgcactgggtaagctttggcaaacagtgaaattgttacatctcttcctgctaatgataacataattttatttcagcacaaaggagttacctagataattagtataacaaaatttttataactgttgccctcaaattcaacaactgaattaaggattcatctttgtgcactttttcatgagaaagtttgtttctttcatattctttaatacatgaccatctcactttgtgatttaaatgttttaattactgcagtgatttaatacgtcgaaaaagaggcagataaagaaaaaaatgatcgagattttctacttaacacctcggttctgcagagcccaaggtgattaaattgaaggcagcattcctttagagtcacctatgagacaatagtctggaatattatcaaaagttttggcaaagaaaatcatttttggggtgggaggttaaacagaggatagggcttcaaaatttatctatttatttgagtgagttttagcatcattgacctggccaaactccaacacaattcattatattttgcctgtctcaaatgcccttgaaattctaatgaggccctatatttctcatcttaacctactttcataatattgcttgaagcggccatccagctgtggtcattcacttaagaagaatctagatttatctagcagctaagggtatccagtatctctgatttccccacagaagcaggaaggtcagtgaattcgttccagtgaaaagatttgaacagcttacacaaataggtaagaacatccaaataagataatccaatttctcaagcatttctcatagtgctcttagtaggaaaaatgagagacacaagcaccaagctgggcacttaacttcaatcatagttaaattttgtaaagcccccaaaaggtaaaatgctacaagaaattaaaacaccaggaagctctacaccaagatgctttcctgatcatctgaagccttttttgcctttgaattctcatagttggctcttgtgtgctttgatccatcctgtctgagtgcatctccatgccaaattacacaaagcagccctgcaggactgacaaggcccaggagccagcgcaagtgtgtctggcgcatctctcgttgttgaactgtccttgttggtgaggattttttagcatgcaaagtgtgtccttagaagcagtaggaaaagggaagagattcctcagctcttcatatgttttctttcatgaccccaatatcgtatctgacaaccattcccatttgaattattactcttagatcctgaacaatcattaattaataccatctttgtgagcgttcatttaagcaataccactctagggccttcaataccactctagggccttcagccagcttctattaaatgggttcctcattctggtttactctcattctcctccttttaatattttagcctgttcaggcattatgcattgggagaataagagaatttttcagtgatttaaaggaatatatataatagaaaaataaaaggagactagattattactatacttgaatcattcaaattggcataatcctcacttacttcgtatctcataggtaaattcaaattataataaacatgcagacataatcatcaaacatagaattctcctttcagtggcacagaattggtaattattttctttaagtccttacagtgatatcttacaaagatttcctccgtgaagcattcaggcatcaatttaatctgcatatgtgtaactaaacgtgtttcctcaatgaacacaattacttttgttctttgtagtaaattctctcactataatacacatagtttggtcaaattaagaacctatagaaaatgattaaagacacaagaggttacacatgcagccttcaatttgacagatgacagcataactcattgcaatagtaataatgagtattgttcctatcttaatttaatatgaaaactttccacatccacttaactaacatgaaaaattttagaaatttacacactgattggtgaagtcaactacataccaaccattaagataattgacttccttaaaaatgtaagttctgcactccttattgtgaggaagccaaataatttatgggctttaagcagtaaattcttcccttgcagatgtgtttgatgctttccaaagggtctctcctcctttagactggaagaggtttggctcaggatgtaattttcgaacacataaggtgtgcctagcactgagctgggcagtcccttaggaagcaaagtgaggagaaactgtgatggtgacggggagtagggactgtggattcagaattcttagtgtaacagccaattattaatattatctgtggccctatatttcttcatctacaaaatatagacaataacagtaacctaacttacagggtggctggtaatgggataaatgagttaatatattcaaaatgcctagaacagcacctggtgcaaagaaagttcagtgtaagtatttgccatcattaaatatccccctagagggcaggtacttagggctcatgactgtatttccaataccttatactgctcctggaatagacttgataaccaataaaatgtgataaactagtgatgaaggaatagataaatgaattcagagaaaaactcttcttttgaataatatacagctattttaatttgataattcatccagtaatttatttatttactgataagaaaggaaatctcagaaaatatactataataattattcaaagacagcaagacgtttttcaaagaaacatctgggtttaaatcagtctgctttaagtatcaaatgaatgtgtttattcattatgtccaccagaagctgcaaaatagaaaatatgcccaaagtaaaattgtcatagaaaaaaatcagacacatataggtatccagatgtccaataacaaaaaattctggtcacatattcagcaaagatttattaggagcagactctgtgccaggcactgttgcatgccctgaaaataataagcagacaataatccctgcctttgcacagtttacagtcttgggaaggagagagacaagaaaggtacacacataaaaactcactttcagggcacgttttgcagctctcctaacctcactgacctctcaggatgcagacctgctccaaatcatccattctgcaggaactaaattaaggttcttctaaaacagaagtacaaaattggtaactaccctcaaaaatcataggttaaaattatttgtcctctacttttggtgcagaattctggacttctgttcgagaatcactcaagggcttgaatgggcccaaagttacattttgagaattcttggccctcctgtgctattttctttcaccagttcacccttcatcccacacatatccctggcttgtaggatcttttagtcaaaacacaagatgtctataatagagtttccataggaactcaaactaaaattgttgatattggggaaagctaaaatagggatcatactaacaattctttactcgagattttctaagcttcatctctgaatcatcagataacctcaagcagaatgcaactggacccgctacgctctccattctctgcctcttgcaaatgcctttacatgactatgaataagtgtacctggagctggtcctgaagcaagaattaaggagctgctacatacacgatttctccactttttcaatagaactgctacttaagatactctttgttgaattctcaaatgtcccttatacaaagacccttttcagaaatttcacagttaaaagttgaaagaaatgtcttttgacaacctgatatgcagcttcctcctgttgaacactgtgacgtaaacagactcatgatatttctctttctgtcttggctaccatgaagctcggagtttagtttttcttcctccatgccagtgtttcctgagctttggttttctggaacattttctctcctctttatacatcttcaactctattaaactgctctggtatttttattttgttttactgactaccagtttaattggaactataccatttagtgtaaactaccacaagtcctttgggcaaataaagagaatatataagcaaataaataattatgaacaatggctactgagccttaaaaccagtggaaggttataagagctttttaatagactcaaataagtttaatgcagaagttacaacctgagggccttgggccagattttgctcttggatatggtttattcagcagatgtaataattttaaaagaaaaattagttaccaacatccttaagttagaaaatttccaataaaaacctgaattgcttacctctctactttctgtgccagaccttgttttaatactgaatcttctaaaaaatcctctaaggtatcaccattctcatcatcccaaatctcacaaatgaggaaacaaaggcatggagaagttcaataacttattttacaggctcacacagcttgcaaatggtaaagctggaacctaaacttggaccaccaggctccaaacactcccaggtggtcgtgctattacctggaaagaatgatccaaaggcttggacccacatttccccctgacaacaatggatccactttccaacctggcatcaatagctggaagtgaaaacagcatgtctctttcaacagtcacctggtgtttgcaagcgtttccgtttaagacccttgtcttaattctaagctgagagcatattatcctgagatgggagctgcatcttaaatgtattttcgacatcctgtaggtttagtctttgcttgaagttaattaacattgatgagtcccacaggtctctatagcttcctgtgaagtcctcaacattgacaataaaatggccaaatgagaaccgaaatacatttcactgtagcacagcccataaaagcagttttacctaaattattccccaaagcatttcccacttaattgtttagcatttacggataataaggacatgaatgaccacatttgcatatttatattgctcatttgccctgtgtgccgtagtcagtgctttagaaagatttgtgtgccacctgttctctgtcagttatctcttctctctgttaaagattcttggatagaaaaaagtaaaactaaagctaatctccttcattaaaggtagagagacttttaataaaacgagacttgctctgcacttcagaggataagcagaaacctttgaaggattttctgtctgaggagtttccagggaggaaaggatatgatttagtcagctagtcagctaagctcattaattctggtaacttgtttctgaaaaaagggaattttcctgtgaaatgctgctactgcaaactaccctcccccagctcatatcacaacttctaacccttgagacaaacctgctattgttaattagtcgaattagttgtacaactgtacattatcattttttaaagttgtcttactgattctcaaattgtattttcttaaaaagtagttgagaattgcttttccaaaacaatatatctttaaaagaacaatgtaaatagacaaatgaggcatttcttgaagctgctttttggtattccctttgatattctatcaggaaactatatgtctaatatgtaagaatatatgtctaatatgtaagatattaaattgtggagtgagaagtaggttttcagatttttctcctcctccagagtctttctcctcatacttctcctcctgactcctcagggtgccaagttcaatagtacaagtgatatatacatgtacaatatacaagtaataataacatgttagaatatgtattattgttatactattatatccttgttattattagggttattatgattactattataatcttttggtgacctttaattctggattgcaggggactatagagagttggaggagactactcagaggcattggcaggtatactgaacgcctcaagagctcctagagctgacattcataataatcactttaggtatgaaaatacatagttaacatttaagattctctttttaatgacccaaaaatgatagagaacagttcagagctttaaaaaaagaagttaactacaatcagaagtggttaaaaaacaatctaagggcttgaaattgtaattgagttagattcaattaccttgaaaattatcaaaaaggaactatccatttcccagcaaagttgttgatctttattcttctaaagcaatttgtacaggaataaattctaacattcatatgtctaggggctaaaaccgacatgcggatgttagaatttattcctgtacaaattcccccagtagtggggggtaaaacactacccctgaaatcacatacccctggattgtgttcaccaatgttcaaataccagctcttgccagtttcttgctatgtaaccaagaactggttacgtaattgttctgtgctaataatggatctattaataaaggatcaaacgatatggtaaatatacagctcctagaacaccctggcacatagtaagagctttgcaaatatctgttattattattccacatctttgtatctcttatcatactctttaagatttagaaactgttgagatttttcaaacttgtgaggacccagttaccaatctctcagtcaatttagattgcagaccaaagatggagtctcccttagcagagctaaaagtccctgcatctctgcatgcaaagtagacagcacttccctgaattcatatctgtcccagaactttgatttaaaaaacaacatgatctggaagttgcattaattcatttttccacattttatttctcagaatttaatcacatggtcaaaacggactgcaagaaataatagtctatatcgtcttaatatagccatcacgtgctcctctttaactctggaggttctttatacaatctaagaaggggagaatatacatgggggaaaataagtcatctctattatgttgagtgttattgcattctctctttgaaatattttcagggatatgatattaagctcttttaagaaaatcggagcgaatattttccctgcttttatcctagtaactgtcaattgttaataattttatagttattataaaaagcaattccatagtaatagctatgtttttctatagccatgagtattggctacgacaatttcatttgtttactttctccatccaagttaacagtcttccctgatagaaacatttagatcacaagtagctcgctttctctcactcaacagttgacatcactccattggtccttggcagtagaaccatcatgttcacattcttgttcccaacataatctttttctttttttgagacagtctctctgttgcccaggctggagggcagtggtgtattctgggctcacttcaacctccacctccctggttcaagcaattctcctgcctcagcctccggaaatataatctttaaagcacaaagtctggagtattttggcaaatgtagctcaatgtagctaatgtagctacattatgttaataaagctaatgtagctaatgtagctacattcagcaaatatagctaatcaggaacttaattcttttggacactgtttgtagagaggcatgttttcctctgccatttgtctttggtaattctccctttcttctagatttttgtatatctttttaagtgtgaatttaacagaaagttccctgtgccgctccatagaattctctaaatctctctacatcttttttggagctatatttgattttggcacctggcgtactaaaaatgacttgaccttagatgtattataaataatttaataatgtttccaggaaccttcagttaaaggaaatgaatgattattttatttaattttatccatttattctacaattttttattgggtgcaacaatttttttctaaaaagtttgtttacatgaatacaagagccttctagttattttttaaactgtttttactacaaaaagaatacaagtttattaaaggaaaatttgaaaaatacagaaaggaaaaaaacacaaaagcgtggggaggctatttctattgccaccaaacgaaaataatatatgtaatatattagcagattctcttctgaaattgtatcttcttttttccccaacctcccctcaccaaactgagtattagtatgtatttatataattgaaactgttgtgtaaactcatctctctctctctctatatatatatatatatgcacacacatagtatttaagacatgatcaaattacataaacatcattttaatgtctccataatattcctccttatggatttgctttattatcccctattcttggacatttaggtagaacctactactcgatattatatataacactgcaatgaacatctgaaatgaaaattattttttgatggatttctggaagacaaattactaaggcacaggatatgagctactttaagtttcttaggatcaaataaatggcaaaagcacattttaaaggagataatagtagggcaaatgaattttctcaaaataagccacttaacctaaacaatgtcatcattatatcctaaacattttcgggagactaagaaaaaaaactcaatttcacagcattacaataaagcctgagtttttaagaatgtcaaaaatctcatgtttttctctcttccctattcatcaagtttcctcttcactggtccaatgaaatagagccacagcacttttatttaaatctctatttctcctgcattcccattagtgaggaaatcaatcagcagttaagaaatcaatcagttaaaagaataattaaatagccattccgaaaagaaaagaagtagaagataagatggctatggaagagtttataatctaataatgtagaaatcaatcacacatttaaaaacaaacaaacataaccatgaaattcacccctgaaatgcttcatgagagaattgctacatttctttatttttaaaatgaaattaaatattactcttattaattttctctttatctgtcccagggatggcaactgtccttaaaatttagaaaggacaatggcagcaacaacaaataaaaacctgattttaaaataggcaaaggacttgaattagacatttctccaaagaagacattcaaatgaccaataagcacatgaaaagatgctgaacatgactagttattagaggaatgcaaatcaaaaccacagtgagataccgcttcattcccattaggatggctattatcaaacagaaaagttacaaatatcaagtgttggtgaggatgtggagaaaatggaacccttgtgcattgctgttggcaaggtatcatggtgaaatgctgtggaaaacagcatttgactcctcagaaaattaaacatagttattaccacatgattccacaattctgctggatacacaccttaaagaggggcagcattattcacaatagccaaagataaaagcaactcatgtccatcaatagatgactggctaaacaaaatatgatatatatggtatgaatactatataaatataccatacatatatcatggaatataattcaggcttaaaaagcaaggacattttgacatatgctacaacatagatgaaccttgaggaaatatgttaagtgaaataatccagtaacaaaagacacagattttattattccttttataaagttcctggagtagttaatttcatagagtcagaaattagaatggcgactgccaggggctgaggggaagggaagcgagaatttggtgcttaatgagtagtttttcatttggaaagatgaaaaagttctggagatggatggtggtgacggttacacagcaacgtgaatgtagttaatgccacagaactctatacttaaaatgatgaaatgtcaattttatgttatgtatattttaccacaataaaaaaattggatagggctattggtttcagttcatcaatagttgtttaagtggtctctcagaggtctaggtggcatgtcttcaatctttttatgttagacataggagctgaggcattttgttgcagtttctaaagtcttgaaaacttagttttcagtgccctggcatccaggagccactccaccaaactccctgccaccctgctgcgtgctgaatgaaaatgatgtgagatctgccacagctttgtttttgtctctggtacatcaaatgtgcaactcaaaacaaaaacaactgtgaacttccttttattatggtattattaaaggattggggaggagtggcaggtgggactgagaaggggaacaggagacactgtagaaaggaagtcaaatctttaaaagagataatgttagcttctgcttcctgaaagaagtataggaagaagagcccagagaaggggtgtttgtgtgggggggagggggtggggcgggaaatataccagatataattgtgttcttttattaagtcactacattataaacacatttataaaaatgtgttttaaataacaatagagaagttcaaacatagctataacaattaaatattctgtgctcagaggaggtaaatggatgaatagacagcagacatttttcccatatgccctcgcttagtgccagcagtgggaagggtgcttatatttgaattagagactctgagcaagccaagaaagctgaacaatagctcccaacattctcctgggcagtagaaagatgacaaggtcagaaggcacatttgattgtttttcatatcataggtatgttcagcttttccagggctccaaggtttgacccagcatacagaatagaaagtgaggcagaagttactcggttcccttcattgtgcataacatgataccttgttttgtttacccataaaggtcctctgttgacattttaaaccagagtaaatataatacaaaaaaattttaaagacgtgaatttttttaattgtagctaaaatagcaaatcaaaatatttaaaattttccttcctcatcccatgaaaaagataactctaggagcttctatttgattcttggtgattgatctctttttaggtagagacatttcctgttaaaacttccatttctagcccgaggcccttaagaataggctataataggcattaataaggttatacaaatatactcacttatgcattgtagcttcatatattttgtgacaacattaaaaaaaattctaaggattgctgaaatactttctcaagaaactatttctccaggcaaagagttgcaagcagaaagtttcatggtagacagcacaaaggagtacatgccaattgtaattagaacaagcaggagaattcgcttggagaccagaaacacaattccttttatggcatattagaagcatcccaatcttcctcaatagtggtgttcatcaaacagacaacattctgaaattcccttaagagattgctggagtgaaaataaatttgtttttagtgtgatatcctcaggacagaaaccttataaaatcatttgccttgttggcctgtccacctcctataataaccattgatcccacaggctaatttcaaccaactttgatagaggggcaaagagtctatagctagacagaggctcataaatttcttgtggtttcttctgtttctttcagaagagttgtttaatggtatcattttgaagagtataaaaaagcaaaccaagtttctgctgtgaagttgtcactgtaatggaagatgattacatcagaagaagttcaaatggaaaaaaaatgtttgtagttgccttgtggtttcctgataacaagcaaagcaagcaccatatataacaccacacagtggcaggcatctttacttctgatagttgcatcctggaactttataataaattcgactcttgggttttgcacatccaagtggctgagtttttcttgtttattggagttgaacttaaccagttctcagttctcagaagtgtgctgacataattgaaaggctttcaaagagctgatggtgagttagtgaaggaaaaaataagaattcagaaaaaaatattaagaaggaagcaacagaccctcctacagtaatatacagcagggtgacaactcaagttcaagtctaggatagagtcagtatctgagagggtccaggtctcgatgtggtaggagatctgcttacagaatttgtagctgaaacttggggggcccagtgcaaaaacaggttttattctgaggaatgtattcaagaaactatgagaaattaggaatgaggccagcagagggcttacaaggctggtacagcatctcgtggtgtctaaatcctagggaaaaggggaactcaagcagctgggtagcttctcactacatgcaattagaggtaccagggtggtgctgctagtacctgaaggccttttggtccttactctacacttcctctacacctgaggtcctaagttttcactctggtgacaaggcaaaaaaacaaagatatacatacacacacacatacacacacacacatatatatataatttccttctttaaagtgagaaaagggctcaaaatctgagtctagctaagacctcaaagattgtatggctgaatgagaaaaccaggttaacaggatcataattatagacagctggaataagtcttgtgttgaataggaactgatactataaaggtaactcagataatttgtttccataattttcatctttcaattctttttacttgaacatgctctgagctgtaaagaaataggttacacagcactgggtattcattttccaaactctgctagcaatattgttcaatctcaagaaaagacccaaggaactaaaagggaaaagagaaacaggataaatattttttgatgaaactcctattttataagatgcaaaacataaaactatggggctctaaagcctcacctaagtgaatcaatatgactacagagcttgtaataaaatacaacactaaaaatactatgaatcaaacataaaatatgcaaagttcaccagatcttcagtggactagggaagctgtccttgcaaaggaattaagtattatttgaaatgagaaagtgtaactgaagagttgggaatttcattttctggagctgccacaacagtgcccaagtagggaatcagcttataaatgcaggtagcttgtaaattcggcacttgatgaagtaatatccagggaaaaggtacttaatgttcccaggggaatatatgttgtatgaatgcatatactgtgcaataataacaaaatatatactacataattagactgagtatatattttacaacataaatatagttagggctgttaatcaaattaaacaggacattttaaaacacagttaagaatgcagagaggaaaaaatagattaacatctaaaagcacatgcaaaagaggcacagcaatgaatgcaggaccaaaaagtaccaaaaaatagtattgcatgcacaatgtgttatctttctttctagaagtagtcatggaaactaatataaacaatgacttctgaaagctaggtttgctcctcctaccttaatggcttcagaatctcagcttctactatatagtagatggaaaattctcaagtgaagcccagcaacagcatagcaagagaagggctggctacagtggctcagtagctaatatttccagtgaaatagcgaggctgttttcagtcttcctttacaaatctagatgaatatgccaggcactctcattaatttcttgaaaagtagtcattttttttgaaagataaaacattcagtaagaggtgaaattaatggagaaatattctcactattattttactagaaaaggtataaggatttaaatgatttgaatgaccaaactctctaccaaaaaaagtatcacccaattagttcaaactaatactatagaccatgcttcacccgatgtaatttacatattattccaatcatagcccactataacctctgctttcatcaacaagaatagagtttttataaagattaaggcacatttatctgttcttctgcttttttcaaaactgcttaaatctataaatgtatttcaatatgtatcgagaaaacagaataaagttaagtgaatgtataggaataaaaggtgcttctgttaaattttttacaaaaactacgataatgatcttaagactagttttagaatctccctatatataaatagtgtttagtcatcgtttcttaaactttccacaaaatttatagcggtttgggtggcactatatatagttgaccctagaacaacatgggtttgaactgcatgggtccaactatatgcagattttcttctgcctgtgcccaactatgtgcagattttcttttgcctgtgccatgctggagacaacaagaccaacccttctacttccacttcctctgtagcctacttattgtaaagatgctgaggatgaagacctctatgatgatccactttcacttaatgaataatcagtatattgtctcttccttatgattttcttaataacatgttttcctctgaattactttattttgataatatagtgtataatacatataacatgcaaaatatgtgttaatcatttatgttatcaataaggcttccagtcaactgtaggctattagtagttatgttttgggatagttgcaagttatatgtggattttctactcttcaggggtcggcatcccagcccccatgatgttcaagggtcaactgtataccttttatatctacataccatagatattgtaaaactacctacattcacaatgattaaaataagttataattatgtattaatttatacactcaaattataattaatgcaattatgatacaaatttaaattatataattttaatttatttctttaatttttatagatttattatgttttttgccattccttttcaaggaatcttttctgatttcagttttattaaagtcactttcaacacagggacactatttctgtttaatgacaggattagctgccagtccctatttctccagatgtggagataacatttttattcagcagggagtctaaaccattcacagaaatcccattttataccataagagcaagcatattaggttgcactcaaataagatggggtatctccaagttatttctctattttatgcctcggttagttcctaaggcaactaaataaataaataactctgacttaataggcaatcaaggagcatcgtttgtaccatatggttggcatagtaaccctggggtattgttactgctaccaccttctagagaggaggaaggctgggcctcagaggttaagtaacttgcttgagattacagtttccacattaagctggaatctaaatacagctgctaatggatgtctccagagtacatgcagcagaaaaactaaaagaaattactgttctatctccatcagtgaaaattttatgtaaattagtaaatgttatgtaacccaagattattgagagtgagagttgaatgaaataactttctacaagtttcttctgacctccaagtaatgtacataatatctgaaactatttgaaaccctgatatttaccgtacaaggaagcaaaaaaacaaattattcataagccagaaatgttcccaccttaggtgcatgcttttggcagcctgcttagaagattgcatgatatgcactaaagaaatgtaaaaaattaacagagcagattacctggaaataagtcccaagttggaacatgagataaatactgtataaaagttaggtggtgattcaacatacccctctccctataatttttagtctttaaggaaccccaggtcttctctgtgctccagtgctccctccttatgcccatgactcaacacctactgtgtgccagcacggacctccctggttcattgaatgcaaggttcattcagcatttaaaattcaattaatgtaattcaccatgataaaacaaagaaggaaatctatgtgatcatctccatagatacagaaaaaaatgcatttaacaaaactcaacattcatatgataaaaacgttcagcaaacagaattaaaggaaacttcctcagcctgaaaatgaccatctacaaaaaaacctagagctaacatagtaatggtgaaagactgaatgcttttccccagagatcaagattaacacaaaggtgttcattcttaccacttctattctacattgtattggtgatcctggtcagtgcaacatggtaagaaaaagaaatagcagttacatatattggaaaaaagtaattaaaaccccctctattaacagatgacatgattgtttatacagaaaatttcaaagaatttgccaaaaagagactagaacaaataactttaacatggtcacaggatacaaagtaaatataaaaaattagttgtttttatacgctagcattgaacaatttgaaactgaaatttttaaagtactattaatttttttaaatgaaataattaggtatacatttaacaatagtagcaagattagaatgccaaaaactacaaaacactgataaaagaaattacataagcccaaataaatgagctatatttcacgttcactgattgaaatactcaacgttgctaaaatgttaatttttgcaaatttaatctctgcattcaatgtaatccaaatgaaaatatcaataggatttttttttgtagaaattgataggctgattctaaaatttgtatggaaagccaaaggaaataaaacaataaaaaccaatttggaaaagatgaacaaagttgaaggactcacactatctgacttcaagatctgttatagaagcacagcaatcaagataatgtagagttggcaaaggatagaaataaacacaataaagaatgcagaaataggctcacacacttatgattaattcattttaaacaaaggtgtaaagcgaatctctggagaaaaggaagtcctctcaacaaacaaagctagcacaatgcatgcagccatattgcagggaaatgaacttcaactcaaattttatacaatcaaatgcaaaaactaactccattaaaactcagatttaatataaaacttcgaagagaacacagaaaatatctgggatcttgggctcagcaaagatttttaaaattatacctaaaaaagtacaaatgatataagggaatctgataaattgcacttcaccaaaattaaaagtttcagctctttgaaagacacttaaaaaaataagaagacaaaccacagaatgtgaaaatattgcaaaacatgttttttcttacatattgatattcagaatatttaaagagctctcaaaactcaagaatgtaaacaaaccagtttaaaaatatacaaaaaatttaaataaatacttcatcacataagatagcaaataagcacatgaaaagatactcaatatcaataacatgtccattgaaaccacatgagatatcactatgcaactattaactattttatatacatgtattagtgtatgtgttgagagagagaaggaaggagagagagtaggttatatgtaataatcgacaataccaaatgctggagaggatgtggaataactctgatgctttggtggcagggatgtaaaatggaaaacagttgggcatttttttcttataaaactaaaaatacacttactgtaacacactgagcaatctcactcccaattcatacatattacccatgagaatgaaaacatacttctacccaaaagcctgtacacaaatgattatttcttctttactcataatttcgaaaacctgataagaacccaaatcttcatcagttactgaatggataaacagtcttaccttcttgcaattgaatgctactcagcaataaaaagacccaaaccattaacacatgcaacaacaaagaataatctcaaaatcatttttctaagtgaaagtagcaaggttcaaaaggctatatattgtatgactccattcatattgcatctggaaagggtaaaattctagggacagtgaagagatggagtgttgctgggagctggaattagggcatggtattgaaaacaaagagcattgagaactgttttggaggggaaggaagtgttctacagctcgattgtggtggtagtcgcacagtgtatacctttgtacacctaacatgatgaattataagtgaattacatatcaataaactcaactttaaaaaagtggaagtgacctggacctctgttgcctctgagatgtccatcctaaccccagtttctcactcttcaccctactgtaatccagtttctatctccaccactgcacaaaaaactcattttgttaaggtcagcaaaaacattctgattgcaaaattcatcctcagttcttcttatgacttctcacaacttttagcataatcaataacttctcctttgaaatattttccctttctcttccacaatgctgctctctcctaatcatgcattcttagcgtgatgaaaagttcctcaaccccctaaatattggtgctgcttagattcccatatttagaatacctttctcattttctatttacttatgactcgtttgttttaaagtaaagttgagcattgtaaacaagggcatcacttttgtattttagggtatttacctttgtatcaattggaagataaatttgaaaaaggcaaaactgaaggaaggcgggtaggttgggagatgatatggagaagtgatggatatccaaatagtagggctttggaagataaggatagattaaagagatgtagaagaaagaatcagtagggcttggcaatacattgaacacagctaggacagggaaatagaattgttagatgaatggtcaaatttatggtcaatttatacaatctgaataatggtggagtcattcggcaagtcagcgaacataagaaaaggaagaggtttgggtataaagtgattatttcagcttggaaaataataagtttgataatcctatcaggaagatatttaaagaaatcaatctgtatcccagggaaggagtagaggcactatatatacatatttccatttatatgacattctggaaggggtaaaatcccaaggacaacagagataatagattgccaggagctggggtcaggaaatgattgtgtgtgtgtgtgtgtgtgtgtgtgtgtgtgtgtgtgtgtgtaatatgcagatatagactatatatgtgactatatatatgtataatagttgtctatttctttcagaagtaaagaaggattcaagtctccatgtatttctctatgttattctctccacttgcaatgctcaccttcttcatctgttatttccaattcatcctccatgaaatgattcagatgccatctacttgaggaaatcttccttgattagccccattccctcaagcccacctttatcccctaactccacgctgttagatgcacatttttggacattttaatgtcacatttataacactctaatgaatgtagcatttagggtactttaatgcaactgttgattagtttagttgtcattttcccacaaaagattgtcagctccttgatgtctttcatctgtggaacatgagtgttttttacagtgcctggcttataggaaatagtcaaatagggttgcagcattacactgttggaaagaacatggtgtaagaaatcaagtagatatgagtttgaattttgactctgctagccatagtctgtgtgcttggttaaatcgttcaatctctttgagtttaggtttctataaaatagagattataatgctactttcctcatcaagtttttgtcatgtattagtaaactactgccgcataacaaattttcccaaaactctgcaacttaaaataatgtccatttattatctcacagtttcagtggataatggcttagctgtattctctgcttcagagtctctcacatggctacaatcaaagtgtcctccagggctggggtctcctctgatggctcaacagggaattagtccacttcaaagttcatgtgtgtggtttttggcaggtacaaattccttcagggtggttagactgaggatctcagtttcttggtggcagtgagccttctctaacaatggcagtttgaccacagtcattatgaaacagagtcttctggcaaggtggaagtcaagatcttttgttacataatcactgaagtgatatctcacgacctttgccatattctgttgattagaagcaagttgctagttccagtccagactcaaggggaggggcttatccaaggatgtgaatgcctggacatggggatcattgggagctatagagtcatatagaactctgcctactacatgtgaggaccaagtcaataaaaccaaaagattcactagatgcctaatattatacatggcaagtgctcaaacagctatttatgtccaatggataaatgaactcatccatcaatcaattgttctgcaattaaccggagtaaccactagatggtggtgcatccttcacagcattgtgccataaaagtagggtcagagattttgaatgtaagagctttttttttttttttttttttaaaacagataaggtcttgctctgtcacccaggctggagagcagtggcgcaatcttggctcactgcagcctgcagcctcgacatcctaggctccagcaatcctcccatcttggcctctagagtagcagaaccagaagtaaaagagcatttttttttttttgatgatgatgatgatgatgtaatacacaaagacacattttaaaaacagaaactatacactcctaactaaatctcttttgtatctctggaactcttacaaaacctatcctgcttcttccttccagagtaaattataaaatgtgcaaacaaaataaacagaaactcctctcctcactttgatgtacaaggtttctcactcggatactatccagccctgatttaaggtttctcactcagatactatccagccctgatttaagtttccttttgactcttaaagacttaaaagcttttgtgtttctgttttgaaatatgtctgttatctttttctaaattaaagtaaaacatattcattgtagaaaatttggaaaatatagaaaagaaataaaggaagttaaaaattctaatcgcacacctaaaaatactttagtatatctattctgctttccttcccttcttttcctctctgtttttctctattcttcccttccccaacacacacatacatatacacagagaaattgaaattatattatatatagttttgtatccgaataaattgctacctcacaatatctttaaacttcctttttgtaatacaatttttgagtccttgccttttactgctgtgtttaagcatatatatagctattattataccatttgtagtgccttgctcctaccttctcattttctgttattgtagagtgtgggtttttttaaattggtgttttaaaaataatttttgtattttttgtatattattttgttgatgtttatctccaccagtgttctggaatttccatattttgttttcattaggctacttttaaacttaaaaacattttttaaatgttttaatctattctcctctaattaccaaggtcaaagtgaaatcatattgttttgattgcccactatgtaagacaaagaatttagcatgttttaaataaaatttcatcttttccatgatagcatggtctttgctaacataatcatgagcttgggaacaaattgttgtcatccaattattattttaacattttggaaatttatttttgaagaataaccttgaacaatttgtcgtattttgtgtcttctgttttgcaaaatgatttagccatactttcaaattgaactggttttaatgtttatgaccagttctttaataatctgcccactaatatttgataatgtactattttatgctatttaactaatattcttcccaatgatattataatttttcccttagtcacatgaagtttatctttaagtatttttaggctatgcacttatcataagtagtatctctttctgttatctacaaatttgaatgacagtttctctgtgcacagaatttcagggtctcagtcttttatattcaaaatgttttaactttaattctattattttgatattcttttggcatttatttgtatcttttaaatttgtttatttttatgtcttttaaaatattttaatataaattaatatttttatgttttccttgtatccacagttaatttttattattgtttttcttctttttgttttgttttctttttaacttttattttgggattaggagtacatgtgcaggtttgttatacagttaaactcgtgtcacaggagtttgtcgcacagattattttgtcatgcaggtgctaagcctagtactcaatagttatttagttatttttttctgctcctctccctcaacttaccctccatccccaaggagtcctcagtgtctgttgttcccttctttgcgttcatgagttctcatcatttagctctcacttatatgtgagaacatgcagtatttggttttctgttcctgcattagtttcctaaggacaatggcctcctgctccatccatgttctcacaaaagacattaccttgttcttttttatggctgcatagtattccatggtgtatatgtaccacattttctttatccaatcacagttaattatttcatcattatttagatgtatgtcgtttaaaattaatgttgactaaaagatagtcatccattttaatatgctgtctcctgtcttattcaacaagaaaaataggtcagctgtcttttattgttaatccacttcaaagtattttgatttctctctcagttacatttgaaattttaaggtctaatttctgttctctagtccctttatctctgggatagtttctcagttttgttctcttatcacagatgcagttttaaaatttttattgaagtacaataaacaaaaaattacataaaccaagtatttagcttaatgagttctcatcaactaaacatatctgtataactaattcctagatcatactgctttgattatctgcagtaccagttttccacttttctgcccccaatgtagattttaatagcactattgcaatgctagttttagtttattcttgttattttacactgcatccttttcttctctgtctgtagtccttaatcccatcctgttgtcttttcagttattgttttcatttttgtgtctttttactttatttccacagaaatcaagttttcacacatattgtcatgaaaataatgtagtattctaaaatgttcttgatgttttgttataagccagattttgggttttcttcctttagctctttagcgttatgttccctttcttttgtggagcactaggaatacataatgtatgtatgtatatgtatagatactcaaacacacaacatgtgtctgtccaatcatcatgtattccctcttgctttacctcttcataaaagaacagtggtttctttaataaccttcttttcctagcagccaggtacattagaggaggctgacttcattctcagttccaaagaataatcctctttcctcccacttcttgccattgatccatttagagatgaatatgagtaaaggtttgctgatggcttctcgggaagttctcatttgttctttaggtagagacatcagggggacgtgaatgaggaagcatgtagatagagtgctacttgcaaccatcctataacttcaaaaatgtctttgaggtaaagctgaaactttgaccagtgaagtgaagaagtggtagatatctgagttcttgatctttttgagtcttcaagataaccctgctgatgttttttttttcttggactttctccttatatgagccaataaattttaatatttagggaagcttcatttaggttctctattgcttgctgccagatcatcctaacttacacataactacaatctgatgttgaaaggaattagttttctctttctctctctctccctctctccccctgccccgctcttccccacatctccttagcaagtgcacaaccagacctagtgtttgctaacaaaataaatctgtgagctgtcattagccaggttcactgaccaccttgaggaacagtcaaagctccacctcagatacatagtagaaattgctgttcaagttccggtagttggtaaccatctgttgtaataatactaaactgtactaggatctaaccagtttcacagatacttcaaaccaagcagatatcttctctgtcacttgtaagataaataaaatatagtcctctgttgcttttgccttgttttgttctgcaagttgtcatttctcaaagcatggagaagacagagtataagaatgacaaggaaaatagtattcagactagctctgtaaagcaactgagtgaccatcagctggctctctcattagtgcagacccagggctctgagcctaattgcatattgcaggatatgaaaaccacgtctctgtactttcctaaaagtagtggaacttcggacgcctgtagtcccagctactcgggaggctgaggcaggagaatggcatgaacccgggaggcggagcttgcagtgagccgagatcccgccactgcactccagcctgggcgacagagcgagactccgtctcaaaaaaaaaaaaaaaaaaaaaaaaaaaagtagtggaacttgtcagatgacgttagtcaccatttctgttgctactttcttgtttcacactggttttgtttaattcagcacctttggttttatggttaagcattttctccaattcagacagtaagttatcttttcattttatctgttactattgtgttacctctcatctttttcttgtcttcatacacattttaatgggatattgacagtaactgttaaatagatgatgctatagagtggatatgtgcccctgctaaacagcaattattattgttgtttacatgtttcaaacttgtttacattgcttcaatatagctaaacttgtgatagatataactgtaactaatttgtatttgggcactgccagatctaaatttaagttctggcactaccactgtctaattctgtgacttttggcaagtttcataagctgtcaaagtttcaatttattcagcttaattacctcactgtgaggttgtgagaaatgaataatacagtaaaatacttagcaaagtgagctgcacaccatacctacgcaatagcagtagctattgttaataatgtgctcgccctcgccctctccctctccctctccctctccctctccccacggtctccctctccctctctttccacggtctccctctgatgccgagccgaagctggactgtactgctgccatctcggctcactgcaacctccctgcctgattctcctgccttagcctgccgagtgcctgcgattgcaggcgcgcgccgccacgcctgactggttttcttatttttttggtggagacggggtttcgctgtgttggccgggctggtctccagctcctaaccgcgagtgatccgccagcctcggcctcccgaggtgccgggattgcagatggagtctggttcactcagtgctcaatggtgcccaggctggagtgcagtggtgtgatctcggctcgctacaacctccacctcccagccgcctgccttggcctcccaaagtgccgagagtgcagcctctgcccggccgccaccccgtctgggaagtgaggagcgtctctgcctggccgcccatcgtctgggacgtgaggaacccctctgcctggcttgcccagtctggaaagtgaggagcgtctctgcccggccgccatcccatctaggaagtgaggagtgtctctgcccggccgcccatcgtctgagatgtggggagcgcctctgccctgccgccccgtctgggaggtgaggagcgtctctgcccagccgccctgtctgagaagtgaggagaccctccgcctggcaaccgccccatctgagaagtgaggagcccctccgcccggtagctgccccgtctgagaagtgaggagcccctccacctggcagccaccccgtctgggaagtgaggagcgtctccgccccgcagccaccccgtctgggaaggaggtgggggtcagcccccgccaggccagccgtcccgtccgggagggaggtgggggggtcagccccccgcccggccagccgccccgtccgggaggtgaggggcgcctctgcccggccgcccctactgggaagtgaggagcccctctgcccggccaccaccccgtctgggaggtgtacccaacagctcattgagaacgggccatgatgacaatggcggttttgtggaatggaaaggggagaaaggtggggaaaagattgagaaatcggatggttgccttgtctgtgtagaaagaagtagacatgggagacttttcattttgttctgtactaagaaaaattcttctgccttgggatcttcttgatctgtgaccttacccccaaccctgtgctctctgaaacatgtgctgtgtccactcagggttaaatggattaagggtggtgcaagatgtgctttgttaaacagatgcttgaaggcagcatgctcgttaagagtcatcaccactccttaatctcaagtacccagtgacacagacactgcggagggccgcagggtcctctgcctaggaaaaccagagacctttgttcacttgtttatctgctgaccttccctccactattgtcctgtgaccctgccaaatccccctctgcgagaaacacccaagaatgatcaataaaaaaataaataaataaaaaataatgtgctcaatattctgcatattttaattaaatagctgttagaatttatatttacaaaatgaatggatctctaacataaatttaacatttcaaatatttcttttattaacttaactttaaaattagagggatttttattttttttaaccaaatgacaaattccagacatttagagaaacatattaccctatagttgtatagtgctttatattttgccgaatagagcactttatattttctaaaatatttacatattaattaccttttccagttctcacaacaactaaaggtaggtggtgcaaaggtgcttactcccatttcaccatgaacaaagttaaaactcagagaaactacatggctcctgtaggatcacatatttaactggagccattgctgggacatttgacctccaaacacctcctctctcttccatatttattaaattggcttgccaattaatatatgtaaacctagtaattaagaagctaagtcagcctatgtttgctacaatatgccacaggtaactttttaatcttaagattgtactaagaaagaatgaagtggaaaaatggttaaagcaaagacaaaatatggaggaaaatttcttgttgcatatttaagatattctttttattctatgaaggacataatgaaatctactcagttaataggcagcatatggtataatccaagtatgttagagatttcgggttttggccaaatagaagttttaaagaaatattttggtgaagtagtttctgccttttatcaagaaacctctatcaactaaagttatttcttctaaaagtcactgccattttttaggaacagtttaaatgccaatccaaagccagcttctttgaactgacacatttacatgggtagataaaatttgtgtctctgaaagtgttttatttcctgcgatcagagcttcttagcttttccagatcaaatattcctgtgaaaatttgttgaaattttagaccagttctgaggaagagtgctaacagaattacctggtatgctcataaaaaatgcagctatctgagcccgatcttgattcacagaatcagaatttctagtgatgtgtcctaagattttgcattttaatcacacccactcccactaagggactcttatgatattatattttatagagtcaatactataaattcttcccccagaaaatgcaaaacaacaaatcaaaaaatattacatatattttcaaatgatttacagacctgtcatgtccattcatggatacattagatatctgcaaatgccaggtttacaacctttgcattgaataaagactaaagttgtcttccaatacattaggctctttatgcaggagaaaagactgaatgcatgttcattttgattacagcatttcacacatttcatcaagatatatactttatagcagtactgtattatataataccgtacactaggaagtaaacatagaaagaggtattcacacttataagagttaccatgcagttgaggaaagtaaatcacaaatattaaaaaaaagaatacaatgtactctgtgctgggttccatatggataagctcagatgttcaaggacaaacatgagtgagagttaccaatagaaggcatttcaatatgggtaagtaacaattgggcagaactgtgaaagaaagttgggatttttaaaaaactgaagagaaagtagcagttgagcagaactctgaaagaaagttgggattttgaaaaaacgaaagagagagagaaaactttgaatgtgttttaaattttattctactaaaatatattttaatacaaccatttatgcagtaagcaatgggaaataatgctgggagatgaataaaagccagattgtggagggccttgaatgtcgggccttaccaggtcaataatatacttggcctttgatattttcatggctgtacaaaattaaagtattaataaatttgcaaaaaatgacaaacagcactgctaaagaatgtaaagccagttcttaccatggcagagagaaagccaacatttcttagaacagcaacatccaactccatacaagacaggtttttataattcactttaacttaagtgtttaatcattcacttttgacaagacaagggaaaaaaggaccaagcaagagcagagccctttctgatgatttactgatcaaagccaattaggatagttctggttgaactgggttgagtttctctgaaattacttttcaaagtaaagtcaacaagagtgagcatgtgcagtgctgtactttctacttgttagtccgtaaaataactaaaaatcacttacctatatccactgagcttcaaagtatgacttttgaagtgcaaaatcaagtgaaatgtgaaactgaaatgcaaggctttttgcagctattttgtctttcgtttgaagatctcagaatactttccacacaatagactgaatcaaatcttcctctgggctcagtattttttttatctgagctaccatatggttttgaacaaatatcaggtctggagagtgtgtatatgtatctcttgcatcagaactttagaatagtataatcataaagtagagcaaagaatggatgctgaagaaacaattccatgctatacgctgtacacacacaatcttaatatacaaaataagttaccaacatagtaacaccacatttttctgatattaaggttgacagtgacccacataaaagagcttttggcataacacatttttataattcttgtgggaaaaatgttttttttaatcatttcacatttaaatatttcagaaatatattacacattttcttgcatttctggtttaaaaatgttgcatacaattttgtatcttattgacgacaatgttattatttattgtcctatgctctatagattttgattttgttcctattttcaatatcttcaaggtactatactttttaatattattttatgccagctcatcatattattttttcggagggagcatgttgtagagaacaaatgacttatctcaggagtcaggcagactgagtaccaaccacaagttggcttggtttcatcatctgtgaaatgcaggtagcaatacatgcttcatcattcattagaatgattaaatggccacataaataaagcacttaccacagtgactggcacagatctgagactcaggaagtgttagttctttctctttttttttgagacggagtcgttctgtcgcgcaggctggagtgcagtggcgcaatctcggctcactgcaagctccgcctccaggggttcatgccacacacctgcctcagcctcctcagtagctgggattacaggcgcccgccaccatgcccggctactttttttgtattttttagtagagacggggtttcaccgtgttagccagaatgatctcgatctcctgacctcgtgatccgccctcctcggcctcccaaagtgctggcattacaggcgtgagccactgcgcccggccagtaagtgttagttctatccactcacattcattttctagttctcagctgtcatttcctgctggctgaaaaggtacacaaagttatcccttatccttttcttttgctgattctattccactgcaagctgaaatatttgataatcaagcttgctttaattgtatctaaaatagtaatgaatgatggattaaggcctgaggaaatagttaacaaacttcgccatctccagttttaaacatagacacttttaggacacatcttcgttcttgattatgttctgcatagttgaggtcacgtacagggactgacctccagaaaagtaaaatttaatggtaatcaatacggagaaaaattgtggacatgatgaaatctaactatgtttttaagcaaataaaaatagagttagtgaattatggcaagacaagcaacatttgataagcacctatgacctggaaccacatgctatgaacaattgcctcatttaatccttattagtggccttctaaagaagttactgctcttccctttttacagattttttaaactgtgacaaaattatgaatttatgaaaatgtcaactcttatattcagcatattttccacttataaattctctacttagaaattattcatgcggcatattctttacttaaaattatgatagaatcttaggactgggagaatcactagaggccattgaaatacataacataccttttcttaaatttcgatgataatatccatgctgaatgatgattctctctaaatctgcacagcttcaatgtcaggaaacatactgtctcccaagacagctggttctatgcttgatgagcatcaactgctagaagattctgcacagtgagcataaataaaccatccaaaggcttcttactgttggtactagttttcacagttagaaacaaataaaacataaaattccatgtgttagacctttagctacatgaagacccttctgatatgccctggtatctgcttttctcctggttaaacattcaattttctccaataatttctctaatgacatgatttcaagtaaaatcactatcatattagctttctttattggagtgtccatatcttatcgctgtctcctaaaacaaaaatatttcgagttcaaattgggagttagaaagggattttcatttcctttgccccagatactatcatcggtcatgacagccccaatgtcacataaaatttggaaagtcacatcaccatggatccatatttcaaagataagttgaggtaatacagaataaagtaaaccataggctgctgtacattatgtaagtgttaataataattattagtaaattattatcaattgaaactcataggtcttcacccaataagttgtatctcttctatccagttttgtggtttcttcacctcaagtgaaaagagttaactctttacttcagattatagaaaactgtcttctttagttgacatgagatccctggcttgcctgctttatatctattccattctgtcccaaccaatcctattctatagtttcccccattcctcattcatttttctcctttccttttgtacatcactctgatatattagctatatagactcatttacatgtattcatgtaaattattaaggtttgtgtataagtatatattgtgttaaagttctcattttctttcttccttttttaacttttagtttaagttcaagggtacaagtacagatttttttacataggcaaacttctgtcatggggggctgttgtacagattatttcatcacccagatgttaagcctagtacccattagttatttttcctgatcctctccctcctccaagccctctaaaggtacatctctttgttgtattggagaagaaaacctttttcagcctccccctagcagagcacccctcaagtcctattgaccaggattgggtcacatgcccatgacccagctgtaaaggagtgtgtgaaagaatatatttgacatgtgtattctatacggtggaacacatttctctctgtaaggaacaggcatgggacatgctggggaatgactactagaggtaaccataatttctgcctaaggatggtcattatttttaacaggttcatgttgcctataaattcaataagtatgccttatatatttttattcaagtaatatttatccaagttcacttatgctgtctacaaaaaagttggtgaaactcctttgaatgactagcatgctccaagcatttatagttatctcatttggttcacacaaaaataattgtttcataggctttattatttctactttataagaaatttcagcttaaataaattagctaatttacccaagttctcatagcctagtatcaaagctccgattaatataaaagtcagtgtcatagtctgactccaagtccatgtttattctacttcattattttgattccctgagggctattagaaatgcctctccaagtaggtccattgatcagaaccctgaatatgttccctctccttcttacaccaccttcaccctgtagcccccaatagatacatttcctcctttggtcctcaaggctgttgtctgcttaggcttccccactactataagcttggataaactgtatgcttcaaaaagcaagattatatctatttttcttcactatcatatctcctgcactcacatagtggcagtcaaactaaggccttgataaataagttttaaatatgaatgaataataaatgaatgaatacatgcactattgcaatgtctcttgcatcacacgttttctgccttattactggtttccatcacaacttatctgacctcagttacctggcgattattttttttaacttggcatacactgcccatgataaggcactaatgactatttcatgatacagttactgcccctctcaggtaacattttcacctttactgaggcttctaagagacaaggtctcaacctaaaggaattgctctgattgtgagaattttagggagtatggtagttctaggggcttcatgacctctcagcttatactgcctatgtgaaacctctctaggtcctcaggttcccctttaagaaaatgttaaaaagaaacaaaaaagaatcactttttttgtttgtactctaagtgtatctcaaacacctcacatattcaaattattctcttgtacaaaattaaatgccattggatgtagaaggagtggagcataactggtctttcatagaggctggaatttctctgagagcaccacacaagtaactcttgccacagtctcaattaataaaagcctttactcttttttcttaatttttctttcctttctatcccttgcatagatacttaatagatttgaagttgccattaatttcttaaccactattcaaaaggaaaacaaacaaaagaaaacaaaaacaaaaacagcatttcctttgttgtaaagcaaaataaaatcaggccctaattttccacaacagaagttgtccaaaatacttatctgtgtttagatttcccaaaattcatttcttcataataatactgtcagcgttcagtgttgtgatcataacattcactagtgtgacttaaaaaggggaggcaccatgtgttaagcagggataggatctaagaataacaaatctgcctggtaagcagcacaaatgagtcttacactaagccacactgatccagcttggagggaaatgagtcaaaaccaagtccccatactctctacctgcgagaaagaggtgacattgaagaacaagcccacacttctggatatggtccaaaatgatcagaaactcactctgtcaacctagtaggtgtttggatggatacctcttttttaacagaaagatgtttggagccaggacacatggttttcacattttaatggcaatgctcataggtaactaactctcttcttatatacgctaatttgcaacatgcttagtgtttttaagatgtttatttagcaactattgtttaatgctataacagatattactatcaaatgaaaattcaaacttttgagaaaggaaaagtggatatatttatgcattgagtttttggctttagataatttctactttgatttctatttattaaaatttttaaaatcctaagtcaatcaaaacagatcaagatgaaacttcctcatttgtatatgtctttgtatatatgtctagtatatatatatctagggtaaattatataacttcatattagatatttcattaaccatggcttcagcaaagtgagaattatgacaaaaatcatcttcatatccaatgatattaattctaaatataaagtctacgttccttttatccattaatatgatttattctcaaggaaatatgagatataccaagtggtagaaatttttgctatcatgattatttttgaaatacagtattattatggaatcagatactgaactaaaaaaattttaggaaagtaaaatgaggtgacagtttttaattaattaaattaattgactttaagcaaataacaataagcttcaagtaatccatcccatactataaataattgcacataaataagcaatttgtattcaactaaaatacccaattaagaagactgaatggccccaatggtcccataaatatgtcctaatccttttatcttgattgacaacagatcttgttctttgcccagctcctccaataaccaataggagacatttttatcttttttcccacttttagttttctgggttcatcaaataaatatgttggactttattttacattggacatgtcaatagaattgattttaagtgaagtaaaagcataaatcgctgtttatcattctacttttcatacctaattctgtttgctgttcttcggactattgatcttaatacaggctttctctcctttttttgttctttttaaagtgatggtaaaatttaaaacttgcttttctgtttatatttaaagaaacacataatcaaattattgacattttatgaaagatcaaatgcataaattttagcaatcataagaaaaaaaacagtaggcaatggtatagaaagcatgaccatctgcacttatttgcccacaaaggataaatgagagtgtactgtaaattgtaaagaaataaacatcttatttcaagctctaataagcttatgtgtcaatagttttaatagctgcctagttggtcttcctgtctctactttcttcccacttcattctgttacatatccctgtgaaggtgatctttatgagaaaccatgttggttttctgtccaacaattacgtatgactccccactgccagaaaataaataaatacagctaaaaacctcgtaagttcccagaccttctccactctggctacatttaacctttgtgtgtttatttttctaggtaaattgtacatgccaaccagattgccaaactcattgtcacctctaaatgttaagctttcccatcgatgagtgttttgtttattcacttatttacacacacaaagacctctttttcttttttcttttttttttctttttcttttttcttttctttttttttttttttttttgagacagagtctcactctgtcgcccaggctggagtgcagtggtttgatctcggctcactgcgagctccgcctcccgggttgacgccattctcctgcctcagcctcctgagtagctgggactacaggcgcccaccaccacacctggctaattttttgtatttttaatagagatggggtttcaccgtgttagccaggatggtctcgatctcctgatctcgtgatccgcccacctcggcttcccaaggttctggcattacaagcatgagccactgcgtccgcccacaaggacctctttatcaacttgacctatatttgaaaacctatattaaattctatttctataagaccttcccagccaggcctgaagagatacccttctccagaggctctgcagcagctactgcccaaactattcacttagaatctattgtgtactgtctagtgaaatctcttcagtattgtcttgacttgcactatcatttagtttttcacaaatttgtcttacttttcctttattaaattcattgaggacagggactagttcgaacttcatgttatctgcaatattttatacatgatatgtaatcaatatttattgatttgacttaaatttaatatgaagatttcatatctaaagatgtttcattatctatcattcaaagtatttttcctaaaactttcctaaatatgctctaatgttgcctgagttttattctcatatattatcgacatctgctgggaacatactatgtacaatgcattttcataaatatatattttgtccttccattatattgtaaatacattcaggctaggtctacgtcttctagtttgtagtctgagagtactctgagagtacatcatagagtagctattctataaattgagaaaatggtcaattgaaatttcatctaaggggtcaagatatggttgctgtcaggtaccaaagtgaattatgaaagaaataaaaacacaagatgttaaagtaaatacagataacagactttaggtttttgaaaggtttatacttttttattttttattttattttatttatttattattttgagacagagtctcgctctgttgccccggctggagtgcagtggcacaatctcagctcactgcaacctccgcctcccagattcaagctattctcccacctcagcctcttgagtagctgggattacaggcacacgccaccacgcctggctaatttttgtatctttagtagagacagggtttcaccatattggtcaagctggtctcaaactcctgacctcatgatccacccgcctgggcctccaaagtgctgggattacaggtgtgagccaccgtgcctggccaaaaggtttatacttatgtcagggatgtgtgaaaattcttcagaggcaatttgaaggagtgggtctataaggagatttcgttggagaggcttgctgctgtgttgtgagttgaaccttactcatcaaattgagggctggatgccacattctaaaccagagtgaccatagcttccaggagtgctccagtgtcatctaaagttggtggaagggaaggaacaggaaacttagactagattctccacctgcctgaggaatccaaagatgaaaaagcgtgatgactcttaacccgaggtgtcaggaaagagagagaaagaattgctgctgtgctgtgttggaaagtaaatgtgctcccctcctactgcaggttaagggtacgtgaatcctgtggtctagatggggaacccatggtaggagcattagtaggcagtttgtgtaaaaatagttcttcccaataggcctctgttggaaggtcaaagaatcccactaaaagagttgataaagaaggaagaaggagtaaacgtcagtaaaccaatagcaaaggggttgaggaaggagcaaatatgagccgccagtaaaaagagaggcaacgtctgcctgccttcacagttctctagagtgagtctcagctgcaggaatagagtgggctccaaggaagtcataagtgtcccttataacaaataccaactttaaacacctcccagtctcagaaaccatggagccatattgtatcagtcaagtgaataatttctgtgcccccttccccctttttttgccaccaagttcagtcttctaggggacaaaacacataaatctgaagatggagacaatggaaggatagaaagagggaagaaggcttccaaatcttccttcaagacagcctgaagttagcctagcagacaaagacgattttattctaaattgcattgaaatttttgatcattatatgtgactgaccattcttattgctttgtttttttttttaagagatcgtgacactactatctaatagtgagccgaaaagtcctggggtctgctgaagacttatctagaggcaatgaaacccttccccagttaaatatgtttcaagatagggtaggagaaaaaatcgtgttttgcttttgttatgccatatcagttgttcaatagttttaccctcaatcaaatacttgttattaatttttttgttcttaaaatcctttgaaaatcaagtttaagtaaaatatcttctaatacaaaagtttcaacttttcatattcagttatattaaacttgtattggaacacccctttagaatatactgtagtttacctgtaattcctgtgtcagttttctgtgcttcccaggataattgtataacaaatagattacttccattcagttctattctttctatccatcaaacatttaatcattcatacccttagcactgtacaggtgctgtgggcgtctctaagaaagattataatatgtccacggttttcacagagcttgaaatatttttgaattgacaaagcttgtatgaaagtaatcccagtacagtaaaatataagtacagtagagtccaatcaagtgcctagacgtgtagatcataaatggcagtacatcgtcagattaacatttcatacgtttgtctaaaagtttacacaaaaagatcactttggttttggatcagattaaatgcattatataaatatttaatcactttaggaaggtcatgatgaattcattcattccaaaattaattactaaatggtgaatacaagccaggtactatgctatgttttagacatatattggtgaataaaacaggcattttccttccttcatggaaagcacaacttgatgagattctagactaatatgctgtccaagtaaatttctcatataaaattacgcaatttacaggacactacacatgcccacactttctaaatagtctctctcaatgactacagtactatttgaattttgtcattagagggtaattctttcctactactttttagtattggccaaaacttattgagaacttgttatataccaaacaatgttatgaatatttacatgtcttaactggtttaatctttaaaagagcctcgtgatgtaaatactattattaatcccattcatagatgaggaaacaaatatagaaagtatatgtgacctgctcacaatcaagcagcatagctggggttctgatccaacattatcaatataggaatctttggtttaaatttttaaaaacacacatttgggcatagagttaaatggaaaaataagacatgcatattaataacaaacaataaatgagaatacactaaattattaattaaaaaactgtgtgtcagattggattcttttttttttttttttgagacaagagtctcgctttgttgcccaggctggagagcagtggcatgatcttggctcactgcaatcttcacctcctgagttcaagagattgtcctgcctcagccttcagagtagctgggattacaggcatgcgccaccatgcttggccagtttttgtatttttagtaaagataggatttcaccatgttggccaggctgatctgaaactcctggccttaagcaatccacccagctaggccccctaaagtgctgggattacagttgtgagctaccgagcatggccaggttggatttttaaaacctagttaatttaggccaggtgtggtggctcacacctgtaatcccagcactttgggaggccgaggcgggtggatcacgaggtcaggagatcgagaccatcctggctaatatggtgaaaccccatctctacaaaaaaaaaaaaaaaattaaccaggcgtggtggcgggcgcctgtagtccaagctactcgggaggctgaggcaggagaatggtgtaaacccgggaggcagagcttgcagtgagccaagattgagattgcaccactgccctccagcctgggcgacagagcgagacacgatctcaaaaacgaaaaaaaaaaaacaaacaaaaaaaactagttaatgtagggtctgatgttagaagtgctttggaacttagacttcactctttctacacctcaatttactctgtgaaagagaactaagaatatctgctttgaaaacctcagaaaattgtagtgagcacaaatataataatttgaatgaagatgttggggaaaccataaagtcctacgcatatgtctgttcttattgttactctttgttcatttgaatctccctggaaaagcaacagccacgcttattaaaaggtgttatacgtattcatattactttttttaaatgaattctaataattccctaattagatatattttttgacttggaatcagaaaaaaaaagtagaaagtgaagttaaaataataaacaggaaaggagcttgttatggtatagacatcatgttttacactggcattgcagggaaggaggaaatggggccttccattcaccttagaagtccttcatggtgagagttgtttggactatttatatttctggcaaacttttaggaattatggggaagtataaacaagatataaggcaaaatcactgtttccaagtagaatagagtgaaatctgcagccagggacagaatatacaatgtctgagaaaaaagtctcgaaataaataaattgtatcttacatcagtgccaagagcgatcttttttcttgtttttgtttgtatgatattcagtgctgcatgtatatctgacagtgatagttggaatcaatcacagtatttggcaaattattcctagaggaagaatacaaagcctgccatgactgcatcttttttcttcatgacacaggtggaatatagaattgattttacttttccttattaagtgtttacattttactccattacagtcctaaacctgagctattcatgcacttctgcaagattatacaagtaaattacgtgaaacttctatttttgatgtgaatatatataattttagcccttttttattatttaacaggaatccactgcgaagaagacgtcaatgaatgttcttcaaacccttgccaaaatggtggtacttgtgagaacttgcctgggaattatacttgccattgcccatttgataacctttctagaactttttatggaggaagggactgttctgatattctcctgggctgtacccatcagcaatgtctaaataatggaacatgcatccctcacttccaagatggccagcatggattcagctgcctatgtccatctggctacaccgggtccctgtgtgaaatcgcaaccacactttcatttgagggcgatggcttcctgtgggtcaaaagtggctcagtgacaaccaagggctcagtttgtaacatagccctcaggtttcagactgttcagccaatggctcttctacttttccgaagcaacagggatgtgtttgtgaagctggagctgctaagtggctacattcacttatcaattcaggtcaataatcagtcaaaggtgcttctgttcatttcccacaacaccagcgatggagagtggcatttcgtggaggtaatatttgcagaggctgtgacccttaccttaatcgacgactcctgtaaggagaaatgcatcgcgaaagctcctactccacttgaaagtgatcaatcaatatgtgcttttcagaactcctttttgggtggtttaccagtgggaatgaccagcaatggtgttgctctgcttaacttctataatatgccatccacaccttcgtttgtaggctgtctccaagacattaaaattgattggaatcacattaccctggagaacatctcgtctggctcatcattaaatgtcaaggcaggctgtgtgagaaaggattggtgtgaaagccaaccttgtcaaagcagaggacgctgcatcaacttgtggctgagttaccagtgtgactgccacaggccctatgaaggccccaactgtctgagaggtgagagaaagctgagtgctatggctaggagtgccatgcctcagagcagagcagaaacagcaaaaacagccagactgcttctgcctgctatgaaacataatgaccccacaagacttctgctgctggttgcccactgatgagaaagaaaagaagagggcagtgatgtgcgttaattaattttgagtggattcataggacatcagtttcactcatacagagaagtaaaaaaaataagcagatagctcttttccaaagaggttttcatctttgtgtttgcaaaatgctactgcaattttaccattggtcacatatcagaaatttattgtaaatcttatttgaaagagaaataatcttttgaaaaaaaaaaaccttagacataaaatttgtcagtgccacatactagcatgatatcttgtgcatagtaaattctcggtaaatattcatttccttgctctcctttccatgcaattcacacttgctccacaatcataattaagcatagcgtttttataaaacgccaattttattcaaaggtatcttttccaaggttgccctggagaagacagataatatactaggtgtcttaagaaaaaaaaaaaagaaaaaaaaatgtggaaagtaacaatagtagaacttggtagatgccataaactaattgatctaatttctctagtaaaccacagtttgcaaagtatttcaaaatccttaacttccaacattgttctagagattgctgttgatagtgatcaatatatacctgtttctttttattattattatcatacattgaaaaagtctgagaggtaattgtaacggactgctttgaagttcagctgtaatttaccccaagattttagagtaacttgaagtaggacaacatctggtaagtagtcttctctgctttatatgaagtaaaattaaaaccagtcttagcctatactctattccatgttcaaatgtctaagaattattagaaactactcaagggtttcccccgaccacaatattcattacaaatcacggacctgtttgacaatgaagtatggtatctactagctctacgtaatattttaagtagaatggcaagttgttttgtgattttttttaaggagaaaaagggaaattatgctgaggcaatgttcactttttgaagaaaaatttaattgacctaaggcaatatttttactacatatacaaaataacaaacagatgctgactcattttgactggcttccagatgcagtgacccatgaggttaatactgaccatggtgatgttaactgtcctagtaaatagattcaagagatgccaatccactgggttctggttttctttattttatccaacttggaaaaccatgaacttttcaaaccaagttcctgaattggttacccttcccccacttctcccagtttccttatactccaacattatttgaaactgcttaaccctcaagaaaatatttgacttcaaaagatcactttacagacagagagagttctgtgaaatcttttctttctgaaaattcttggtataaatttaaggaaaattatatttttcatatcacctcttcattataaaattaaaatattctgtattttctgttatcttgaaggaatgtttcctggagagtttattcccactaaaaactgcttttaagtggtaatgagaacatggagtctttctgctactgtacatatacgtgcaagagggaggagacatactaaaaagcacaaaggcaaacttcagcccattcatgacttgcactcatatttggctcaatgttttccaaccatggtatacattttaatgaacaaggagactggatagaggattttggtggctgactaaacacaaaagacatagtgatttccaatgtatcaaggttgatcttttttaaataatctaatttctcaacagaaagagtgctgaaaaggatttaactaagcttaggtcacagaagtgtccataaggttctctcagcatatcttgtgttgactgtttgtaagaacatgcagcattcaagatactactactcagaataaatggcatcacctacctcttgctctctggtgaacatttgacttacaaaagcaatttacatatctcttcttttcagccatatacctagattttgagaattttattctcttagaattatagtttcctagatatagaaaaagattcattctatgactgaatttttaacacaattgtacctgccaaatgtagtggctcaaatctctgctcaaacaccttcacaaatagagagatcactcactccatcttgccaaaaattgcccaaaagttatttccttatattgaaatagaataggatttgcccgtagctttccttcattgaccttgttgcatttctggaacacatgcaaataaaaatctcaacttgcctgctgcttgagaatacttaatatctgaagaaaagtatctcgagccatctaaaccatcacttctattcaggctaaacatcctgtttcttctaatgtttgccatatgacatagttttccgacacttcatcagctgcttgcaggttttggaatatatttgcttctttgtattccttctaagatgtgatgtctgtatgtgctggatgatacagtgacacacagggccataacctcccttattctagataatgtgcttctgtttttcagcttaatacaacattgactttttggcagccacacttcgtgattgcgtcactttgtatcattgtcactcatgatgccacatagtcctgtttctcccactctaatcttataaacgcacatttagatcgaagtggctcttatttattcttgttaaatttcatcttgttgtattccatcaatcattaaagcttgccaaaattgttttttatctgtatgtgttgttcctcttcatgacatgtcaaccacttgtatgagtatcacccttccaaatccacagccaagtcatatgtcttcaggtgtttctaaagtcatgtagcaaatcacacatgctgattagttgcttgtgatttctgagaaataggattgctgaagaatcaggcttctgagaaaaaaaaatactctgcattttggcttttaatccagatccacaaagtgatgctgaaggcatcctgggatgaccagcaggcaccccgctacccctgaggttgagtgattctgggcatatcttcaaacctcaggggcttcaagggccaaattttcttattaagcattttatctcatatgaaagtgctgcagtgtattcagagatgttaacctcttcaaaggggttattttatctaacagtacacttttgaaagctaccggtagttgcctggagcaggtggtctccaaatgcagattcaaaatgcaatgttcctgtattaaatcaagtcagagttctgaaaatatagccttttatgcagaagatcttcaaacacagttgattgtctaagcaagttttactatagttaagctaaactaaaatgtgtcttacctttgcccaaacttcagctgggccatatgatgacatttagacatgctgaaatatgctctttttttctggttagtactgggatataaaatcttgaagacagcaatatcttgaagacagtgatcttgtcaagttatcaatgctttctagactgcaaaatcaatggtcaattctgtccccatcttacttgatttctcaataccagttaacacaattaaacactccctcctcctgaaaaactattttctcactaggcttatgggacaccacactcccttggttctcctcttatcttactggctactcttgcatcatttcctttacctctacttgtctaatgcccaaggacttacttcttggacctctcattttctctatatatactcattctcttggtgatctcatccagtcttgtggctctaaatatctaatatggtttggatgtatgccccctccaaatctcatgttgaaatgtgattcccaatgttgaaggtggggccgatggaaggtggtatatactaacaaatcccacattatcagaacatcctgcctgaacctctatatcaactgcccactagtcacttctgcttggatatccaaaaaggcatctcaaatttaatatggactcccacctcacccaaaaatcttttcctccagttttcttccgtatctctgcaaatagaaagtccatgcttccagttgcttaggcccaaagccttagagatgaacttgctccagaaaattctgttgtatctaccttcaaaatattttgaaaatctgaccacttttgaccactttcacattaccactgatccaagccattatcatttctctcttgagttgctacaataatgtagtataactttgggcttttgctcagatatcactttctcagagttcctccctgattgttctatttaaaattacaattccacccctccaaatcgccctattccctttctctacctgacattttatactaaaggatttctcaccatctgacatattatatagtttgcttccttgtctgtgtctggtgtctttcctccaactagaatgtaagcttgatgaggatgggaagttttcttcctactatgtcacccatattttacaatgtcagtttttatttttatacatctcaagagttttcttgaggtgatgcacatcaatagcattgccacagatgagcatcactaactcctctgaccacaggaaatgcagggtgggtttaatactcagctttgccccaagttctctgtttcctgtgcctttcctactcccaaccaggaccacagaaggaagggtccttctttttccttgttcaactgccttgcttcttatgtgagatgtcatcccaagagaagatttaatcatctaattcttgatttctgttgtcccaatttatgttatttacagactaaaaacctgaagtttagaaaggttatgtaactagcctaaatcacatgttaatagcagacctgggacaaatacattccaggctctaaaaaatttctttacaaagaataattaggtttaatgacatgtttgcttcagcatgcctctaagtagcaaagattatgactccctgcacagtccacttgcagagggttgcatgaagtgcccttgtccaaaaatttcttccaccaggttggagtatagtagtgtctgatataccaccattaaggcccatattttagggcagcaaaggggagattctttagtttatcagtgcagagatctttttggtctgttttgtgatcaatatgcctgaagtgtaaactacaaaccaaaatatagttattttagggttaaagtaaactcagaagtccagaaagaggccaaatcattattctatttaataaacctgtcctgaactttaaaagctatgtatgagtgtgtatgcttgtgtgcatgtgtgtgtgtgaaatgtataattttcgtcttccatcccttctgtcttttgagccttaagatgtttctttttttttctcctcctcctctattttgacattgaagagtatgtggcaggcagatttggccaggatgactccactggttatgtcatctttactcttgatgagagctatggagacaccatcagcctctccatgtttgtccgaacgcttcaaccatcaggcttacttctagctttggaaaacagcacttatcaatatatccgtgtctggctagagcgcggcagactagcaatgctgactccaaactctcccaaattagtagtaaaatttgttcttaatgatggaaatgtccacttgatatctttgaaaatcaagccatataaaattgaactgtatcagtcttcacaaaacctaggatttatttctgcttctacgtggaaaatcgaaaagggagatgtcatctacattggtggcctacctgacaagcaagagactgaacttaatggtggattcttcaaaggctgtatccaagatgtaagactaaacaaccaaaatctggaattctttccaaatccaacaaacaatgcatctctcaatccagttcttgtcaatgtaacccaaggctgtgctggagacaacagctgcaaggtaatgattactcatacaaactaggtatatactgtatgctaaacttttactttattaaaaagataacttattaaaaccattctttgtatataaagatgatgttactgacccaccagtatagaataatatttcatctatattgttccaacaagactgtgaaatttacattgagccatagaaatgaggccttgatcttactggtatcaggatctatttaactaaccaaagtaacttcggctataggcttctctcaccctcacagcaatcaaattacttaggtataataatatttcaattcctaaactcctaatggcacaccagaggtttaactgaattaactctttttggatgatattgttaactttattttaaatgcccaactactattgttttgaacttttattaagtcagaaacaacaagagaaatctgagaggtaatttccttctggtagttgaaatcttccgaaatataatttctcaaagcccaagctttactttaaatattctatgtgctcttctaagagctgcttaaatacaagaacttgtcagctctgcatgacctttcaaaggaaaaaaaggaaacgcatttctgtgtgttgagcgtttgttgagctccaactatggccctacactaagcttggttctaaatatacacaaatgaattattgtaacatagttatggaacattttcaatgtactaggcactattttacatggattaatccacttagttctattgaaggactactgtggaaagcaagcattattgttgtcccaatttacattatttacagatgaagtaactgaagtttagaaaggttatgtaactagcctaaatcatatgttaatagtagacccaggacaaacacagttcatgctctaataaatttctttttaaatactttcattttgaatactttttgtgagcaaccttgtgagaactcaaataataatactatgtctctgattcagaggcagaccaatgtgggaagggcactcactgagttgggatccagaggacctaagtaccaagtttcactgtttcgcttctgtgtaggatcttgggcaactggaaacaccttctttttatcatctataaaaccaggagtaagaatcccttcctcaaatgataattagtgcatgtgaaaaagtgcctggtaatttgtaaattacagaggacactgctatacttgaaaaaccctccttgtgctatggatcaattttatatcttttctctctctctgccaccactctgcccttttagaaaggagttggtaatggcagtagtcatttttattctatttagttaacaatggatcttaaaagtttaaaatgtaaagatgcagggaaattagcattttaaaaaaacagatatgtggtttcaccgtcaacatttttctatttagttgccagtgctttttatacctttgatttcttttctgctcagtccaacccctgtcacaatggaggtgtttgccattcccggtgggatgacttctcctgttcctgtcctgccctcacaagtgggaaagcctgtgaggaggttcagtggtgtggattcagcccgtgtcctcacggagcccagtgccagccggtgcttcaaggatttgaatgtaggtagagttcaaacctaccatctcaccagttaagttgcgacatttgagttgttccaagagcaaacacagaaaaagagtatagacaaagccagtttattaaattaatctatggttgtttcccctatgcgagtaggctaatactgactggcctcttgcctcatcctgcccttggtggctgtctggataggaaatggaggtcacagcaacactaaacctagatgcttaatcatttaaaactgatttcctgaaaaagaattaacaaggcaatatttgaatttccttccctcattactgggaacacagaataaatatgtgcatgttacgcattgccatttattaactatgaggcctcaggcaattcatgtgatctccatcatctaaagcttcctcacctgtaaaatagggagaacactttctacttcttcggtttctttgtgatgattctatgaccttatctgtaaataatcaaacatgttaggcactcaattaatgatatctatgagaatttccctcactgtgaaaagttttcctgtccatcttctgtactacaaaaaacaattttccaaatgttagcaatttgaatactatacagtattcacaattttgacatatccacccactaactatactgttatttatattctgtcttctcacctacttcaaataattcacagtccagttaatagccaaccctctaagtttgcactgaattctaatttcttccccttattcaaagattgtgctcctaaaacttttctctcacacaccagtatcaatttttccatcattacaaaaaatttcttttgacacttcctcactcctattcctaccagttaccatcccatttctctgccttaaagaatagggagtaaaaaaccctttaatgtgttgtccgcaatatgcttctgatattctcactccattctctcttttgctccatacagtcaggcccacacaccaccacctccctcctgaactctcttaacccagagattcacaggtcacctttgtcacttcattcaggtttctacacaaacatcctccaacttggctttatttttatttttatctcttattgttccttgatattttgttacatatgcattgatatatttgtctatcatctctttcatcatgagaatataagcttcacaaggcaagaaacttttctatgtggtttcttgctcataaatatttgtaaaataaataaattgatattattttcttcaaatttacttaatattttcacttaactgctgtggacattaagtacattatcagcttactataaaaaaaatacatgctggatgcagtgactgacacctataatcccagcactttaggaggcagaagtgggaggactgcttgagcccaagaatttgagtctgcagtaagctaggatcacaccactgcactatagcctgtgcaacaaaacaagaccctgtctcaaaaaaaaataaaaataaaaataaaaataaaaatactgcactaaaataatggaatggaactagaggatagtttggcttaaggtcagtagcaatgacatactatctagactgggccccgaagtaactgagaaaaagagaaaaatgaatttacttttatgtttctgtacttcaaaatcatattatttaaaagacctgtatgaaatacattacactgtatatacacttggggaagttctctagaaaaacgtatatacttttatgtttcatacttaagaaataggtaccacacatgtatagaaaacatgatgcgttggcataaataaggtaaattggtttttaatggggcactaaattttaaatgatactttttcattctacttctttaattattctaaaataatttcttaattattaattttactgttgatcttttgatagaaatactaaagttgttagtctcagctatgttctacctggtgtccgaattgttttgaatattttcacaggaaaaatgaataggatttctaaaaacagtggcagccccaaaacagtatgcacactgctctgcaatctacacatcaaacagtttaggagctggacaaacatgtgtcagaaggaagtgaagtgaacttttactgctacaacattgccaatagcaaaagactagtaagtccagctctgacacccccagaaagtcccagtagcattttttaagtatagcttatcttagtgtagagagaaaacgtaaataaataggtgtacaataggaattataaatcaattttctaattgacaggtatgaacccagaattcacttttactactctcataattttaattttatgtaatcttatgactctattatattttctttccaactaaaatatattgaaaagattaagtctaatggaacaagatactcttgagagtacagctgataaattgctctgagtttgcctttaggactttaatcatctctgtatcgtaccaagatttaaacatttacaactcaccttaaatacaggtgtgcttattatggtaaagttccccaaagaaaaggtgaagtacaaaagtgattaggtatatcgtggtttttacccagatcagaagacatgatttcagtgtgctcagcagagttagtaaatatatttatatagcattatagaccatagtcttcatttcagagttggagaattttggagattttttattttaacatttacttaaaaacatgtaatgaaacacttgttgctctttttttccctaaattcccaactccaaacctggttgaaacacacacacacacacacacacacacacacacacacacacacacacatagtaaaaaacaataagatcaaaggaattgatttatttaattaagtcaaataatacacttgaatgatacactgaaattttctcctgctgtggtttctaatcattatctcacttttcaggatacaggatggagttattttcatagagtattcatttaattatgtttactgagcacctactatacatcagggacacacaggcttaggcataaggatttagtgataacctagacacagaggatccttggtttcataaagcttatgtcctagtgcagaaagacagtgaaggaacaagtaaacaaataaacgtaattttaagtggtaatgggagctatgaagaaaattaagcatagacagtgaatgcagggaggcggtttttttaacttggatagtcagggaaaagcttctcagaggaggtgacatttgagcgatattaacactaagaaaagccaagtataagaagatctggggaaataatattcttggtataagtaacagcaagtataaaaggcctgcgctgggaacaagcttggtgtatcttcaatgaatggcaagaaattgtggctgtggcctgtgaatgaattggaattggagagttaatcaggggccagatcatgtagatgcttttttttttaacatggcaaaattttgtcatgaattttttttttttttgaagagagacggggtcttattatgttgcccaggatagtctcaaactgctgacttcaagctatccaccctcctcagcctcccagatagctgagattatacccacaactggctcagatcatgtacactcttgtggttatgtttagaatttaggatttcttttaaagatgataactaatggagcttgactaaggagtggttgttatattgatctgcagagcagtagaagcagggacactaagaagtaattagtcttaatgaaagatgatggtggttgggtgtagtgcctgataatgtattaatagtgttttcaggtcatttgctactgaaaagtgtgatacaataaaagtagataattggccactgcattgagtaacatggaggtcattcattgtaaccatgaaagtggttttagtgaagtgactgggacaaaagcttgagtggcatatataaaagagaaaaatgaggaataatagagtgagaccatggggatataaaattagtaagttttgctggtaaagaaaatagacaaaaaagcagcaggattgggggatgtcaggatactgtttcgtgtgtatttttattttttaagattaaagcaattacacatatttgtatattgatgggaaacaacaaaatggaaggggaaatgatgatgcaagaaagaaaaagaatgcatagaggaataatatgtttaaaaggtgaaaagcagtaggacccagtttataactggtagagttgaccttggtgggaatacagacaatacgtctattatagcaggatagaatgcagtgtggatccaaataatattaggtttacagatttgatggatatctgaggtagctctgttttttcaagaaaatattaggtgagatcataagctgagacagaattagatattttaagagacagaacaagttgtttgttaatcatcttatagaatggggaaaaaagtttttaatagagaaatgcaataggattgcccaaagtgctctgctcacatatagcatgagagcaattgatatggttgtatatgaaagtacttgggtgtagatacagaatttgcagcttgtcacataattggagttttaccaggtaagtaaatcagtcatttggaatgctacttttaactgcctactcatcagcttaatcagaagccagactccactgttaattttctgggtcaccatagctagatttgtgatttctttttgctcaatttatttatgtgtaaaatgaattatcaatgctttatttgtgggagcaaatgcaaaataaaaattggcatgcattaggatttcactggaaaagaaatgtatagttttggttttgctatcagaccatcccagtttgatattctggctttgttatttattaattacatgaccatgaacaaaattacttaaattctgtgagtctcaacttcttcttccataaaatggggataataataatacctgtattcaaaagtttgatattagaaataatataaaagcaactagcacagtatgtaacatgtatcaaatagtcaatatgcaatgttattaacacaatgatcattactattaataacggtaattaagcaaactatagatttaataaagttattgattattatcaccttctctcattaggtattgcaaatgctgtttttaatggacaaagcggtcaaatattattcagaagcaatgggaatattaccagagaactcaccaatatcacatttggtttcagaacaagggatgcaaatgtaataatattgcatgcagaaaaagagcctgaatttcttaatattagcattcaagattccagattattctttcaattgcaaagtggcaacagcttttatatgctaagtctgacaagtttgcagtcagtgaatgatggcacatggcacgaagtgaccctttccatgacagacccactgtcccagacctccaggtggcaaatggaagtggacaacgaaacaccttttgtgaccagcacaattgctactggaagcctcaactttttgaaggataatacagatatttatgtgggagacagagctattgacaatataaagggcctgcaagggtgtctaagtacaatagaaatcggaggcatttatctctcttactttgaaaatgttcatggtttcattaataaacctcaggaagagcaatttctcaaaatctctaccaattcagtggtcactggctgtttgcagttaaatgtctgcaactccaacccctgtttgcatggaggaaactgtgaagacatctatagctcttatcattgctcctgtcccttgggatggtcagggaaacactgtgaactcaacatcgatgaatgcttttcaaacccctgtatccatggcaactgctctgacagagttgcagcctaccactgcacatgtgagcctggatacactggtgtgaactgtgaagtggatatagacaactgccagagtcaccagtgtgcaaatggagccacctgcattagtcatactaatggctattcttgcctctgttttggaaattttacaggaaaattttgcaggtgagcataaagtccatatgaagcttggtctttgaagctatactctgcatcactgttcttgtcaaattggaaagctctctcctcaaggtatacatatatactgtgctgaacagggtgacactggtagcttctgtcacaatttggtcatgttcagatgggatctcacttaccaggatattctacaggtcagaaaggtagtgtttaaatcagattttcagcaaaatattttctcagtcatctgtgtgaaaatatgtctcatgaactgtagccccagggtctaacagtttcaaggcctcgggaaacaaatgcatttacaataaatgcaaaagctgaaatgtagtattgttagggaaggcatgacttctattgctaaaataatgccttgagctatttcaggcaggtaaatactctaaaatcccgaaaacagtacattaaagtatacagctgactcttgaacaacgcaggggttagaggtgctgatgtgcagttgaaaatccacatttaacttttaactctcccaaaacataacaactatcagcctggttgaccacaaaccttaacaataacatagtcaattaacacatattttgtatgtcatattctgtcttcttactataaagcaagctagagaaaataaaatgttattaagaaaatcataggaaagaaaaaataaatttactattcattagtggaaattgatcatcaaagatctttatcttgattgtcttcatgttgattaggatgaagaggaagagaaggggttggttttgctgtctcagtggtggcagaggtgaaagaacatccacatataagtgaatccacaccattcaaacatgtgttgttcaagggtcaactgtaatttcaaaacagtggaattataattctcagacaaatataaaataaacatgttttaattattctgtcattaatgaggaaactagtaagatataaaaactaattcaaaggacaatctaaagaatatgtatacgtatatatacaaacaagaatgagtgaatgaatttattaataaatacaaaactgtttaatatcccatagggcaagaaaactagtatttgaagtcatcttcaatactgtgataatcatttgtatggctcactacagataaactaatttgcattttgacgaacaagattttcatattaatattgttttctacaacttacagaattgtaataaggcacagaccactgcaaaagtggataatcctggatagtcctttatgtaaacccagcagtgcattgaaagaatatgcagtgattttttttgcccatttcaaagtatttcacatttttctacaactacaaaagcagtattttagttcttgtaactacctccatttcaagctatataaacagagataagaaagactatttttcttctaagtcacattgcttcagtatttccatgtaagaagttattattgtttttacaacttacaccgctttaaatttactaaataattgagtcattatggggaggtgagagggttattattaacaagtaatacattccagaacttcggcaagaacacctggaatgggttggcagcctgtagacattacactaattcagaggtggtaccttaattgcatgaatctcctagcaaacataacatgtaggcatacctataagaagttgtacatctctccttaacagttactgttctgagcctgtgaaagcaaggcactgttgtaggtgctaagtgttcccaacaggtaacctgcctgtttaaaagcaagaagaattcaggatcaaatttagtatatttcactgtgaattttgataagtaaaataaacacataggccctagtaactacttctccagaatttttttctgcctaattcattaaagtcaagttctgaaagatgaaagccctcaaaaataccttctaatgagattcaggaattgtttattaaaaccaagatgtatacaaagcttcatatttgcattgctaattgacctctttcaaagctggttgacatttttggctcttttgaaaagtctttatgatatccttctttttaaagtagaattgattagctcttgcgggaagagacacacttagcatcatataagctagtctatccacattagctgcagcacacacaacagaacaaaattcaattcattttacacttcctgaatatttattagttatctgataccatgcacatacacagtgggtcaaagggcctaagcaacactattaaactctttaaatatcagtcccttcacattactagattttgtcttacagtgaagttccgcttagcttctaatacttgttccgccttttatgaggattctttaacatgtaaagctttgttgccatatcagagagccacactctgaattcacatgcagttaccatcgtgtgctatatacaaagctcctggacagcatttggcttgcattcttcgaagctatgaattattacatagggagcagcaagtcttggcagggcaactggagttcagctctgaaagccaatagagaaatcacatgagtgcttgggtagtagagtgctgtccttgcttcctggcctttatagagatgcaattttcctatggcctttattgatttattagcaaagcagcagcaaatctagttatagcaagttcttttccaacccaaaatttattgccaccccatggcatagatcttatctcacaaacgaaaactgtgtagaaatggaagatgtatagccatgcttgtcacagaaccctccagcaggagctttttactggagaaagtgattcttgcataatgcagcacaattaagcatttgtagctcctccagcctgagtacttaattagcttggcattgactacatacatgaatttatcagaaaacttttcttgaatgagatgaacaagatgaacagctgtggctcttgcttttatctctctagacagagcagattaccctcaacagtctgtgggaatgagaagacaaatctcacttgctacaatggaggcaactgcacagagttccagactgaattaaaatgtatgtgccggccaggttttactggagaatggtgagtcacattagagccttctggaagagaattctgagctaaagaatgatgggattactcaaagttcattttctcctctaattttttatctcagttcccataggaaaatctatgctgaaatagaggttcagacagaatgaaacaataaaaaagaagaaaaactacagtttaggtcaaaggggagaacattttattagacaaaacttcaaatagggaaaaatgatttttaaaaaatgtataatgtgctatttttctttcttataagtacttctgaattcatgtctcttttttgttgctaactctaatacatgatgcaaatatggttgctgtcgaggtaaaataaattacaactaaaagattgcctcatagaattgcctacaacccaaaagtatatataccttatccatatgagtctacttttcccagagaaactcttcaactgttcttcacctcatacaggaattcttaaaatggagttggtcaatggcttcaggcaatctgtgacctgctgaaaatacaggaaaattagaatatgtatttgagtggctaggggtaagttcaggggtagaaataatgcatactgaatagcttttatcagctgcttaaagggatttatgtccccaaaacagttatgaactggggctctatagaatacagatactatataagcagataattgttaaccttttgttttagcactgtgccatgcaccttacaaataccatctctaattcttatagctctgtaaagaaggtttcatgatttttattttgcatatgtgtaaactgaggctgagaggttgagtgacgtataaagggcctatccacacgtttgctgcagtaaggttgagctgccttcaaagcctctgctcttctatttgatgtgccagcataactgtatgaataaatctttgctcaacacaatttctttttttttaatgagaaaggtgttcttccatctcatgtatcatcgagggtaagataagtgatctctgatcaaacttcctacattgaaaaaattaaataaactgagctcagacatatttgacaaagatattttgactgactcaatatttcccataagcatagttaataaaataatggatatgtgagtgctccctggcaagtgccctttggattaattggaattttctgttttctagctggcctcttttgcatcacaaagacacaggtcttttgccatttttacaaaacagcggggagtctagggtatacctgaatttgacccttttaacgttcattttcatttgcagcctgccttctgtggttggttctttgtggtacaggcattccaagtctatatgtgcatgaaaggagatagccttgagtcacattctgctttctgttgcaccaattttggttctgcaacttattaactgagatcgtttagttgtattccaattccatgtatctttcaaaatattgcaaatattttcttgtcattaattttgagtaatccaactattgtcaagggtgggttgcttcctggttgaacgtcacactttctgcctaatggcacaatgcatggaactcatccaaaaccctggattatttttctctgccactcacacattgtttctatttacaacaaatatctccctgtcttctgatatttattagtttacaaaatttatatttgacatttaaattcagatatatttgaaatatagaaagaaaagaaagcttagagttttccttcttttcccaggagacttttcaactggaaaaacttacatgatgctagatatttctaaaacattgaacctgtgttcagtagattctatgctttcaaagtccttaaccatcattacttaattgactagatgttaatggatttatttttacttttcatgcattaattaacctctaataaaaatgccaatgatgctgataatacatgtgtatctattgttgactgtttagttcaacagagaaataggtgagaaagtgatggagtagttagaggaagacagaaaatagtgggctatctcccatggcctagggaaatgtgacttccatcacatccaaggatattgaaaagctatcctcaaataaattggcttctctcctgccttggttaaaccttcagcttaatagtgtcatcctggcaggttttgaatgatggatggtgtgaacactctggcccacccaagaccgagaatgcttggcaggctcctgagggttgtcaagttttgctcagatctaatcagagaagtctccctccagtccagaagcataagccaaaaaaggaaaacaaaatgtctcagctatgcttggtatccaaagggataaggagctgtttttcttggaagaaatctttgttttcctttataccttgggctggccttgccccactacctcaccccctttcattttgagcctagtgattagtctctgacccatacgtgcaagttttacattttggaaggtgagggaaagaataagggaaaattaaaaattgtttacatacaatttcaacattataagctgcactatagagatcttggagctaagattttatataaattttcaaaagtaaaatagccgccttagttgctgttctatcccaaggtcttagcagagtgtttgtcacatagtatgtgttaaataaatatccactgtgtgactgaatacatgattggtgacttaatccatgaatatacagaaaaacaaattcttgctggaaaattagtttaaaaaaatgacaatatcccaggaagaagaaaacttcaatttacctgagacttgatgtcacttgtcttggaaaatttggcttttgaaagtcattctacctcaacatttcagaaattatgcttggctattggaacacagatttattagcaagtacaatcttctaattattgatttttgcttttgttataaaaaaaggatttccacagaaaataattcaaaatctctcagaataaacctctcctcttcctcctcctcctccttccctccttcttttttttttttttttttttttttggtttctctttggtgggctttttccttagcctgagggctctgatgcatgaggatcctgatagcctgaatgtaggtctgccctgcagactccagatggcaaaatacagcctctctccttgtgcccctaataaactgaacatttatataaggtggcaaccacactaatgctcttgagcattgacactggtgtaggcatggcccacttttctcttggtttctaaatatttgcatctattttctcattctaattaattccgtgtgtatatgtatatatatgtgtacagattatttccattaaaccccaaatgtgttaaagaaattttaagaaacatctccgacattatcaagtatgtataaagtatgtgtggatgggtagataagactgtgctgttccagagagataaggcaaactttttcttcccatttcacaaccaatgtattcaacagggacctgggtttctgctgttctgtttattttgaaggtgtgaaaaggacattgatgagtgtgcctctgatccgtgtgtcaatggaggtctgtgccaggacttactcaacaaattccagtgcctctgtgatgttgcctttgctggcgagcgctgcgaggtggacgtaagcagcctctccttttatgtctctctcttattctggcagaatctttttcagcttctttcttacctcattttgcgtatgaatgacgagccagttgttgagtggggtgaacaggaagattattaacatacatttgaacattcccaaatgaaaaaaaaagccattgaatttcaagaaatgccttgattcattttagatctctggggaagaaaaaggaaataaaaaccatctcaataattaaggtaaattcaaggcttattttaaacatatcagaagcactttgtctgtgtataaaatattttcctattctaactttaaatatgaaaaaagtgttcttaatataactagaaatatctccttattgtgtgtatttagtacaaacatattatcattctcaacacttctatatgtgaatgaccactgcaatttcttcccactccatttctgggtattttcacattttaagttgccctccatcactatgattctattttcatttctgttctttcattcttatctattatttatgacacaaaaattgagaattacaggccaggtgtggtggttcactcctataatcccagcactatgggaggctgaagtgggcggaacacctgaggccaggagtttgagaccagcctagccaacgtggtgaaaacctgtctctactaaaaatacaaaagtaactgggagtggtggcacatgcctgtaatcccagctactcaggagggtgaagcaggagacttgcttgaacccaggaggcggccgttgcaatgagccaagattgtgccactgcactccagcctgggcgacaggtgagattctgtctaaaaaaaaaaaaaaaaaaagagagaattaccgattaaaattactgattatattcatctatgtttttacatgaagctattcaaatgaattgttacgttttctctgatatatgattaaatatataaagagaaatcaggaatttacatcgagtccctaaattgtagaaaaacaattatctagtatcagtactcaaattatacctccctggtataatttctgattccataaaactgtctctctaacaaagttacaaataatcctttctctatttcctttcctgcaatactttcccttttcctaacaaatagaacaatttttctgttgtttctaaatttatgagctccttgacttttctatcaaatggactaatttcagttgcttttcaatgaatatttaataaaaataagcactgtagtttatacataaatttaaaagtatatattgtaaaacttgaattttcttagaagcatggttttctaagatttgcaagtaaatttattttcttaagtatctttcagaaaaaaatatgaaagcatagtatacatcataaccaaaatatatttgacattatgattttttaaaataaatgtatacctgaaataatggatctataaagtatactaagatatgcaaaaattaatatattctttattataaatatttcagagattataaaataataatttaaaaaaactttcttaatgtttttattgtttccaccagtacgttatcatttatgctaaatatctttgtgtagatatacccttccaaagaagacgttatttgtgttcatttaaaggaaaaatagtttgatcctatgaattaattcagaaagcaactaaaataacaatggcctgccaaatgtcattttgtaaatatacgtctatgactttaggagctgtcctggtttgaaaacatgaggacagtttatccattggatgccatctatttagtcccaattaagaaagttgtttttttgtgagaatgaccaaggtaaatttaaatataccattcaaacaaacaaggacaaaataatatccttgttatagagtacatgtagcatatagtatgaagtaatatactacaaaagcaaagaaagtgtattctatcttgcaatagtaatagacaatttttatatagcaaattcatatcctttggagtagtgacaatcatttcaaactgggagcaactaattgtgaagattttccttcttactcatccattttcttcacatccaaggctgaacgtgtgatgctgctgcttcagatgatttgttccaaagttaaattttgtgacaaaagacatggggaaaaccttcccatcaatatttacattcacaagtatttgcaataagcataaaatagattatagccagaccatatgtatagttttcacatttactcccttctagacatacctgtacttatgtacttacaggctgttccaaatgtaatatgttctctaccaaatgtggttaagaaatattcactcacaatttctttctgtgtacaattctgatgcctctgttgtcactgtaattgtcagttgcttttctgttttccaaatgtcttcttgtcataaggtatctgactttaaaaaatgttttcccttttctttttattcttctgtattttccagctgcatgtgtgtgactatggcttttacatatttgcacagaaaaataaaacctttgtttctgtatcttctctttctcatcttctaatggtacttgtacttgtttgccttgactatgtcttgtatgataaaatttccaccagccatgcatacacacacacacacacacacacacacaccacagaagtactggtactgatcttcctgaatcgtgatctctttctgtgaaagtgtcactgtgagtaaacactgtggtatccaagtaaagttgcatgtactctggcaagtaatcctctagttggcattctaaagttgattacaaccctaattgttcttattattggtttacattgtccctgccaaagctagccatagttcaacctggttctaaagaggggctgttttacctaaatgacagaaatttacactaactcctctggaccaagcttctaaaacatagcctatatttacttgaataaaaactaattccattttgctgcgtttttcagatttaacattaaactaaacagggctatgtctctatgtttggccatgcctccttttttgtgtgcgtacgtggcaagtgggtttttatcaccctcccttttgcaaaataggaaaatagagagaataggcaaatttggaaaaatcagtgtttgaggaggagagacaactaagttcaattaacaccactgaggacttactctatgccaggaactgtgataagcctttttaaatactttatcttttcaattatcttttttcaatacaaggtcaaccaaaatctttttatcttccaaattcttcactaaattttcttaaaatatcttttggccatttgtaggtttaaaaatagaaactgttaagctttaattttgcaatattaaaattaaacttcttctgcaaatggtgctgcataaaatttgagtttagtgagttaggcaggaaatcagtgaagaaatctgtttctcaactgccagtattattactaatataaactattttacttctctgcttttgtacttattcaacaaatgtttaatgtatgtctactatttgccatactgtatactaggtcctgggaatagaactatgatttagacacaatgcttgctcaaaataagctgaagttatggtaaggaatgtgggttagactgggtgtggtggctcacacctgtaatcccagcactttgggaagccgaggtgggtggatgacctgcagtcaggagttcaagatcagcctgacaaacatggtgaaaccttgtctatactaaaaatacaaaaattagctgggcatggtggcgcatgcctgtaatcccagccactcaggaggccgaggaaggagaatcactttaacccgggaggtggaggttgcagtgagctgagatcacaccattacactccagcctgggtgacagagtgagactttgtctcaaaaaaaaaaaaatgtgattaaacaaatagtcttaggatgtaactaggatgtaactgagtgccagctgtaagggagcatataagagaggcattttgtccagtcttacaggtgggtatagaaggtcaaggaaagtttcctgaagcctaagctaagacttgagggagttaggctgtggaagaagcaatggcacagtactgtgtgtttcaggcagaaggggctggagaggttgtgcactgtgacagggatatcacagggtggcagtgctgaaagatggggctgtcgaaagaagcaggagtaagcccttatacaccttggcagaggccttggtttttcatcataagagaaatggagaatccttgaagggtttcaaacaagaaaaatgtcatgattatacttgcactttagaaagatcacttgggcttctacatagagaatggcttaaaagaaaggcaagactggacccagaaagacacagctaggaggctgctgcagtgataaagaaagaaggagaatttgcactaccatatatagttgtagagaagatagattttaaaagtttgaagcatgattttttgggagaagctgtgggtctaagggggtgataacttaaatttggtggataatatttttaatatctttgttgattggataaatgaatgaatttaagatctgttggatatctaaatacagttattaatcagtgtgcatattccattctggagttcaagaggcatatcagggtgtatatatttgggatatatattatagatctattgagtgttatattccattctttgtatatgtaatccatttgtattatttatttattgttctgcaacaatattacttcaaacttggcaacttaaaacaacacacatttattatctcacagtttctgtgttcaggagcccaggcatggcttaactaggtcctctgctcagggtctcacaagacagcattcaaggtgtcagccagagatgtggtctcatctgagctgaaccagggagggatccacttccagagtgaactcagtgatcaagttcactgaggctgatggcagaggtagccttcgattcctgaaggcagccctcagctccttgccacttggggctccccaacatggttgcttacttcctcaaagccaaaaaaggagggagagatgccagcaagatggatgttaccattttatataacataattatgcaattgtgtacatataatcgcatacttctcctcacctttgtcatagtctgttggttaagaacaagtcacaggttctatctacactgaaagcgagaggggcacacaaggtgtaaacaccaggaggtggggaccaaccatggggggttcacttaaaagggtgtctgccagctggttgcagtggctcacatctgtaatcccagcattttgggaggcctatgcagtaagatcacttgagtctaggatttccaggccagctaggaagcatggtaaaatcccctttctgacaaaaaaaaagaaaagaaaaaatacaaaaattagtttggcatgtgcctgtagtcccagctactaaggaggctgaggctaggtgggaagatcacctgagcctgggaagtcgaggctgccatgagccatgatggcaccactgcactccagcctgggcaacagagcaagaacctgtctcaaaaaaaaaaaaaaaaaaaaaagtctgtctgccaaaccttctctcacagtatctttttttactgtctgtgctgtattctgcatatattccctattgctatcttccaagcactgatagtccacatataatccactgatagatttttcaattttaaattactttaaaaaattctgacttttttaaatcttacaaatcaatcttttctcctgtttgtgtcctgtttttttttctctataattgctaccttcattttactttcacataattaggaacttatttaatagtgtctttcagactgttgtgttatttcaagctcttggagtgctcaccctcctatttttgtttctggggaattttactcacaacagagtttttcttcatgtggtttgttatttttttatgagcaaaaacaactttaagaggatttttctttttcctggggggtctttgtgtgctgagttgcgtaaatgcccctgactacagtcttagctttagatttttgctaggatgccaggagttccactggtctagtgcctgtttttgtgctcttagtttggggattcccacaacatctggatagtgtaaatttggtctccatatacaatttgggttcaagccctttataaatgtgacacaaactgtctccaacttcatttcttacctgtgctctcacaaactccactctccagccacatgaaactttgcacctccctttgaacttttcacagctgccacagctcttcccttacgtgctgttcctcccacctaacctgtcattcccttcttctctgtttgacatacttttgtccttccagaaatttcagatcttgtatagactcttctaggatcctttccctgattgccccaggaaaagcttactattttattcctgcacttttttgctattttgtacttctttttctagtgcttattatttggtaattatctatgcatgtacacacaaaaacagcatccaataataaactgctcaaggccagaggccatctaacatatctaactcagctctacaaatgtctgtaaaagaatgatcactttacagtaacatggagatcttgagaagaaattatattgcttccttattttaatatttttattttaatgaggataaatgcatagtgtagctagaataaaatttatcatgatacacttatagctaagtgagaaactgcaggctatttaagaatacaaattcatagtggtatttacaacaatgtcaaaagaatagcaactatgtcagtgtgcatttttattttcccttagttgtaacatcatagttatgacagctgctttaaaatccttttcagttaattccaacacctaggtcattttgtgattggtcaccatttattgaatttccttttgtatataagtttcatttttctgtttctttatccagtaattttggattgcatcctggtcattgtagcttatacaatgcagagattatgaatgaattcttttatgtttttcagaaaaatattattattattttattttattttatatttttgagatggagtctcgcactgtcgcccaggctggagtgcagtggcgcaatctcggctcactgcaagctccgcctgccgggttcatgccattctcctgcctcagcctctcaagtaggtgggattacaggcgccggccaccacgcccggctaattttttgtatttttagtagagacgggatttcaccgtgttagccaggatggtctcgatctcctgacctcgtgatccgcccgcctcggcctcccaaagtgctggaattacaagcgtgagccaccacgcctggcccagaaaaatattattttattttggcaggcagtctcttagctgaatcaaacttctagtcctgtagcagtgccctctgtggtgtgtcacagctgcaatctctgctcagttattttgtctttagctgggtgacttggagtgtacgctacatgggcatattacaagggtgaaccagagatttgagcagaaatcattttcagaagttgaggctccacctctgtagctgtctcctttctagaatttttccttcactttctagctgctgtggtgaaccctcttttctctggttcttcaagcctgtaagattgcaaacgtctctcctagttttagttaactggcatggtgctgagcagagactgcactccaaaaaaataaaaatcacatagtgccctccgctctgcttagttcaaattctcatacaggtcgatgcatacttttggttattatctgagtgccctcagattgttgttttttgctattccatctggattttattgctgttatatgccgaagggttactctagtagaagctactttgtccacagaagtggaaactgtaattttaagaaggtaatctgagattgtaatcgcataggtatttggtcccagaacaagatacatggttttccttctgatttctgcactgaccacatcaattcagaagcgcaggttttacttctgggcactacattccggggaaaacattgatgaatgccagggcctagaaaagggcattttagcttattttagcaggtttgttacataggtatattgtgtgatgcgtgatgctgaagtttggcatatgaatgatcctgtcaccaggtagtgagcatagtaacccaacagttagttttttttgtaaacattataaggataaacggatattttgtctagaaagggaagacttaaggaaagcatgaaactgccttcacatatttgaaacgttatcatgagaatggaaaaatagatttgttctatattaatacagaaagcataggccgggcgcggtggctcatgcctgtaatcccagcactttgggaggccgaggtgggcggatcacgaggtcaagagatcgagaccatcctggctaacatggtgaaaccccgtctctactaaaaatacaaaaaaaaaaaaaaaaaaaaaaaaaattagctgggcgtggtggccagcgcctgtagtcccagctacttgggaggctgaggcaggagaatggcgtgaacccggggggcggagcttgcggtgagctgagatcgtgccactgcactccagcctggaagacagcgagactccgtcccaaaaaaaaaaaaaaaaaaaaaaaagaaagcataaataagacaaagggatagaatttattgaaagaagatttcaagtcagcataagaggaagcaagttaacattagaagtactcaataatgtaatgcattgatttgcaccaaacaggactcccatccctggaaacattccaatagaatctgaatgaccgtatttcagaaatagtgtagagaatacttaagcactgattgaaagagagacatggacctgacatttcttaagcatctgtgattagctgattagcacaattcatgcattttctatgtataacatttctcaagattatggcatagattactcatgataacaaaattatgggccaggtggaaaaatgacatttgcgaattttagttgagcaaagtgtagtacacagggctaaataattggccgagatcacctgatactttggagaaagggaggactgggaatgattcatctagatttttcaggtcattaatacgttggaccatgttatagtaaagaaatgtttgagaatgagacatttccctaagaatgtgatatttttaaatgcattgatttattatgctgctttctctgaaactgaacctaacactgtcgattctgccccattcagagcaaggatgggctgggcctggatgtttgccatgtgcttcatatacacttacaggattttctgagcaaacttagaggtctacattgcttcatcctcaatcatttccaaacaagatctgaaacagaatcgaggcatatagccagacaatagcaagagagcaattgggaaagtttgtttaaattgcgcttttcttcttaatgtcatatggtaaaatactaacattagaaaaacattccattataaattgtaggatgtcccttataggaagattaagtgaatgctatttccaccactacatatgccactgaaacattagattgaatcatatgaacttgcaaatatttgacattttgactgataaaaatgacaatttaatacggttaaactgactccataatagatgcctgatatttgcaaggatgcttcttctaaagtttaggttgttaatgcagaagggagaattaaagagttaaaaaggatttcgggaatcatctaatccaacttctttatgtatgagatgaagaatctaaagctcagagagagagagtgctttatttagactctacaagtatcccggtctgtcaacccacagttcaatattcttcctgctgttctaagacgacgaaggaaattccctatcccatttgccagagagattgtgaatgagagtctcagagtactctaggccactgcagagtccctgcatacgtgacctattttaaagctacaaatttataaaacccaatcaacatcagcactgcattcatcaaaatgtagtcttagtctaatgatattaaaagtactttaaagaaatatgatgacgaatatcaattgtcattatataggcctaggatcttagaggatgtaggagacaaggctgagtctggcttgatttcgtgatggaaaaatgaaagcatgtatgagatgaagggaccttacatatcaattttagtaataaatattcacagaaaccttatgggataaatattataatgcccatcttatagacgggggaaataagatttagaagggctagttacctgccccagggccacacaacaaatagggatcagagcaaggtttagaacctgggagtacttacttccaagccacaggtcttcctaggatgcagcactatctttagtaacaaaccctgtaagttgattcctaaataagttacacatatgtagaaatggttcagccactataaaaacctgtatgaagtttccccaaaaaattaaaaatagaactatcatataatttgttaactgtcatatgattcatgattctgagtatatatacaaaataattgaaatcaggatttcaaagacatatctgcattcccatattcatttcagcattattcataatagccaatagatggaaacaggctacatgttcagcgaaggataaatgaataaagaaaataaaaatggaatattattcagccttaaaaagaacaaaattctgacacatgctgcaataggaatgaaccagaagtacattatgctaagtgaaattacccaattatagaaggacaaatattgtttgagttcacttatatgagatatctagaagagtcaaactcctagaagcagagggtagaattatgagtgctaggagctagggggaagtggaaatggggagatgtcattaaataagtatgtgtgtatacttgtgtatatatatatatataattaaattagtatataagtatatatatttatatataataagtatatataattaaattagtataattaaattaatatacataattaaattatatataattaaattatataacatacttatatactaatttagcatacttacaagtatagtagtatactaattataaatatattggtatataaatatatacattaaataactgtgtgtgtatatatatgtgtatatatatgtgtgtgtgtgtatatatatatatatagagagagagacagagagagagagagagagggagagggagagagagagagagagagagacaaggtcttgctctgttgcccaggctagagtccaggggtgtgatcacaactcattgcagcctcaaacttctaggttcaggcaatactccttcctcagcctcctgagtagctgggactacagccatgtgccaccacacctggctaattttcttcttctacttcctcttcttcttattattattattatattattaatatattaataataatatattgttaattattaattattaatatattatcaatattattattaatatatattaatattattaataatatatattattaatattattatattattaatatatattattgatattattatattattaataatatatattattgatattattatattattaataatatatattattgatattattatattattatttgtagagatgaggtctcactcatgttgccgaggctggtctcaagctcccaggctcaagcaatcctcctgccctggcctcccaaagtgctgggattacaggcatgagccactctacccagtggtataaaattttaattatacaagatgaataagttttaaagaacagctgtacaacaattgtgcctacagataataatactgtactgtgcacttgaaatcttgttagcagaatcttatgtaaaatgatcttaccacaattttttaaaaagttacttacttaagacagaatttaaaatacttcaaatggaggaaaaataaataaaataagaaattgttcataaatgttattttgatgcattatcaagcaccaaaattaggtctaatttggttcactaatctcttttcctttcatcttttcatacattattaagatttctgcttcaccaagtataattaatgttcttcatttcttaacgtgaggtcattgctgcaggcttcacggaaatcatgcaacataggtttttcccgtcagaacacattttttcatgtgttctgaatagaatggaaacaggcaacatacagagtggagctcctggattatagatgcaaccaactaaattggttggtttgttaagccatagacaactgtgggaaataactaggttgatgtttgctactgagttgactagctaaccaaatcatgcagcatttttgttagctgtcaaatcaatctcatcatctactaaaatctccctaaaatgatcactgccttggtacgatactggacttacggaaaccggtttttaaaataatgcatttattcattcatccaccatttatcaaaggcctttttcaggcaaagctctgagctaggcatggtaagcaactaaaatatacacaaaaaagtgtgtttgtgctttcaaagaacttaggtaagaaaatcaggtacatagcttcgtacataagagttctctaatttcgtgaatcataaagatatttttaatgtgtctataatgacatatgttggttatgacaaggttggccatattatttcttgtccaatttggagcattttcaaagtgaaagagagcaacactattaataattattctaggacagcagcctaaactgatactgttctgggcaaactaggacatatcctagttattacccacccaggagaatgcattatgttttacttgattctctttaaaatgccattgacatctatcacagatcattcagaaatcaagtctacatgttccaaaccaattaactgacaaaaataactcaaacaataaagttgacagcatcgtgttagttaccaattttcttgaattattttccttattttttgctcaaggagaacttttggcatcagttccatctatgaaaaatagagctgtcaaccaaaccgaaaactgccagtatgcacccagataccatgccgttgtcttgtttaacatgacatgaatttagtttctactaatttttaattttaagaatggtgtgtatacatttttttcttttataacttacattgcctttaggaaatgcagttgcacctcattgaattcattgctaaattttttcttgtgagaacaaattgaatagcatgtagaagactgtaggaatttactatctgaacaattttaaataccaagataattgacttgaaattggcaattgctttaatattgtttctacttaaaacttccatgaatcataatacttattcatggattatatgtgtataattttcctaaatttctttaaattaaaaatgatttttcatcctaaaaggttataaagatcatggctgttatatttttctcacaattgtaattactgaaacacaggtttgtttcatgtaaaccgtagaaatattttggagactaattatagacagaaaggaagccacatattaaatataatatccaaaaccaaataggctatttgcaatgaaagttatttgatgttttggaaattatattcatgattatttcattgtctatttgaatgtattttaatttagtttcacaaatagctacaaatatgttacttttatccacttcccttaacatttctttgataatcctatgctgataacaacagttataaaggaaaactgaagtacttctatatttgttatttaaagtgggaaaatatgtattaatgactgataaatggctgaaattactctagttgatacctagaactcaggaaaaaaattatattttgaaaccagttcatttccttgactttttcagtagccagcatcatcctgagtaagtatatactcaataaatattacctaagtgattgagataatgaatgaggtatttttgaggtaattttgaagtgtcaatttccagctttgagaattttgtttttgtgtgtgtgaatgtttttattcatcctgccccatagttactgaaattaagatgaaaatgatagtatatagtaagtacaaaattgtcccatttccctttcaaatttacaggatgaaaaaggcaaggcttgaccattagtcaccactttgttgatgacagtgtcttggagacaagtgagccacactgtccattaggaaaacatttccatctaagaacccaatgcacagaaaccccattattcatcttgaattagaatttgatataaatttaccctttcccgaaccaatcccagatgcagtcaagatccataaagacatatattgcttaccatgcctagctcagagctttgcctgaaaaaggcccttgataaatggtggatgaatgaataaatgtattattttaaaaaccggtttctgtaagtccataatcacatggacacagccaaggacactctcaaggcagtcctgcaggttatactcaatttgcttaaaaatcgtagtggtttgagaggaggagtggattttctcttcaaagtaagataagtatggttgaattgtagaaaatcatgtccttttcttccatttgctctaaagccagtaagagttgaccactgctgcaatattgaaaagacattttaaagaatatgttgctcattgttcttcgaccctaaaaccctcatttcattctcctttgcctagtcaaatacatttgttctcataatgttccagtaaagatttccttgcttccctcccccacacaatcagcatttggagtgtcttgttgccatacaatcctaagtacgcctctatcatagcatcgtataataatactaatagtggctaatatttgtcgtgtgcttactctgagcccgaaactatgctcaggtcattataagcattattttatttattattcacaaaatcccaagagttaagtaatattattttcctcattttattgatgagaactcaaaatcagagagaggataagtatcttttccaaggctctccaattcagaagttggagccacgctttcagatcccggagcatctgcatctattaccaattagctatactgcaaaagccttcatttgtctgcctcatcctccatcctgagagctataggaaggtggagaaaatgtcttgtttatctttataacttcagtacctggcaatcattcctggcagagtagtgcttcactatttaccaaaggactaaatgaacgaatgaaagaattgtatgtggtgtgcacagaagaaattagaacattcccagggctggcggtagggtagaaaaagcttcgtgcagaagatatttgatccagctcttaaagaataagcaagcattatctcagaagaacaaaaagcacatttctccttgacatgtttttttgtattgttgattgtttatttgctaccaaagtgttaatttttaatttaaacagtttttcactggagaaattagttcacaaataagttgtatacctgtcagcaaagagagcttagaatgtcagaatgcccatgtttttattgatagtgtaagtgccacactgtgtttataattatcccttgcttttgttgattattagttcttcttaacataactgcattttaaatttgtgagagtagaaaagggaaattctggaaaacaaccattaaagccataaccttcctcagggatcaccgaacgagggttatagacaaaagggaagaaaggaaacttaaggcactggtcccaaaagataatcaacgtcaacacacatttttgaaggggccctaagcaatgagagcagaaatatgccaaggaaaaatgggtggtaccagaagaaaaggaggatccaggaaagagctagtagagtttacaagtagaaggagccctacagcagccacaggagtttagggacatggatgaagatttctgcatttgccccaaaagtgccattaagaacactaaagcttatctttttttttacaaatctagttgtcagaaaagccttacaacaaattttctaaatgttctcttctttccaaattcagttgagcctgaagggtttatgctgtccactcccacctattcattgccaattcatcttccctataagccaccttcatctgcaataactgctccccacaggataagctgacattctgggcttctaggcaggaaatccaatgttctgtcctttcataagtcccatggcaatgcagagagctgctggagtcagtgccttccacatattctctacagctgaaagaatgcaagcatcttcccaaagtcaccattccatccacacgtttgtttcttcaatacatctggcaatgggtagtacacagggagagaagaaggagagcagggaatctgtaaaagataacatataattcttatgacaatactttcaaggaaactataatctagctgtcaagaaaaaagaaactacaaaacatcctgaaaacaattaatccctaatttatgttactgagtaaaagcacagtataaattcacagaagtctgatcgctatgagctattgcaagagggaaagttttcatggaggatacggaaattaaagtaggccatgacatatgagaaagattatttatagaacagaaaatgggagcacattcaagagagaaaaatgtcgcaagtaaagatgtgatagtgggaaaaaaaagtttggatgggatgaagaacagagactaggtaggcctgattttaatagataaagaatgtcaggaaatagtaggatatagaagtggataaattaagagaaagattagatgatggattccctcgaccaaactttggtaaaaatccagccagagaagaaagaatcattctataattctgtgatttaggtatatgccatgttttcttctcaaatgtttcctacaggttttgattatgtatggctacaattcactttctgactagaaaggacctactttactctgtttggactgctgtaacaaaatgccattgactgggtaacttttaaacaacagaagggtattagtactggaggctgggaacttcaagaccaactaaccagcagatttagtgtctggtgaggaaccacccatttcctggttcgtaaatggtctcttctctctgtgtcctcacatgacaaaggaacaaggcagttctccaggacctcttttataaggtcaccaatcccattcatgaaggctctaccctcatgacctaattggccccatcttctaatacggtgacattggcgattaggtttcagtgaatgaaatctgggaggacataaacattcagaccatggcaggatcttacaccaaaatggtagcatctttccttcatgatggatttatcaataaaaactcctgaattatattctcagacgaattctttcattttggaactcaaagcaatacaaactgtttattcttccagaattttttaaaatatataatgttatgtagacagaaagtttttcctgagcagatttttttgggagtttggtttttgaaactagcttattaaatccacaaaatcttcagtccaatttttgatttctgctaattagaagttttcactaggcatagttttgttagtaagtcttgctttaagcccccctcttttttttttttttttttttttacttcacttgaatctttctaaagttcttaattgaggattttaattgaaggtttttagacctatgatgctctcctatttctctcaaagggccaaagacatgttttgttctggggaggttcagatatgatcagattaagtcttctttcactaaaaattgagcaaattccctggatcagcatcactaaaaaagagtctctggggcaatagactgatgttattactcaccattttaatgtacataaaattaaggaactatatttactcacttcagaaaatttctaagttgtgcagatcaatataaaaggtgccttatactgagcagtggttggtttgaacatttctgtgattagtgcaatctattttcagagctaaggaagccagaagattaaaaaagcagacccttcactacctgaggggagttaacagtctagtgcacaagaaagcttgcatcagatgaccaggattcttacggtgcctctttcagccaagggttgtgccttctctgatattaggccataatgatcacatgcactcaacatgcaatgcctcatttagttctaaccatcatagtactgttatttccactttacagatgctgaaacgaaggcccaaagaagtgaagtgacttacttggggtcacacagttcatttaacctcaaatcctcatttttttctccagtgtataattttggttttctgtttcctagtttgtgaagtgcaacatttggagactgtttttaagcagactgtcctaccagaaaattctagaagtcttaatatttcttaattgtaaaataagtgttttagaagagatgccattacacatagtttacaaaaacacaagtttatcatgggaccaactgtgtccagggaactctggaatttcttaaagaacaggtctaggggcaaatatggaatgtaaatgggaaagaaattgtaaattttgctctacggccctaataggatccagaatctatttgtttttaccattaggtcctgtgaacactaaagataatcacagctggcaatatgtaaattatccatatttgcagcttcttgaagttaaaggttgtgtgtgtttggctggtataactgcattgccacttaattaccaatataaatgctctcaaattatagataccaatgtaagcccctcaacttaaagatttatttgcagaactctaagtaatgacattgagcttcacattcacattgtgaggtgagctgaagaggatcagcttctgtgtgtaattgtgcatgattagtcttctgccttgaaacagaaaaggagtatttcataggattcccaccatggctggggaggacaggccgtggctggggaagacagaggactactctgatggagaaaatgcacacctttgtaaagaggcactctgggatggaaagagcctggggtgggttatgagagccatgaaggtgatgcacatgtgcataaagggaaagcatttgagtggctgcctcttcaaattaaatattctgtgacagaagagtaggctgcatcctgtgtgttagctctcatggcactgcaagctagagagacgtataacaagaaccatcatcactggtcaatttccttttaaagacctgtccactgatttactcattccattgatcagacattgcaattcacaagctcctattacattctcttggttaaaagtgaggtccagattgggctcgacacatgaatctgtagagctttcccctctacctggcaaacaatccaagtcgcacctggatatatcagaccttactcatcatttatgtccaggagtgctgcatttgttttacaatgccatctaatttgtcagctcagttcaaaaaaatttcagcacctgcaaaacatcatgaactctgaagttgacaggaaaagatggcatgttgtttgaatagttttctcaagatagaaatgtatgagtcttgaaattgtacataaagacaaaagcacagcatgccatgaattgcaggaactcatcgcggaggacatgcctattagaatttatgctacacaaatgcaaaagtatgttcttataaattaaatagtttgacttttccacattttatacacatgtaatgttgtcgttcttgattttgtacatgatagtgtagaataagctttttgccttagactttttataggcagaaatgtgccactgcaatgaaaaaacttaggagcattttatggatgactgtattaccatcctcatcaattggcatttattgaattcaggcaccataaataatactgatatatcttacatatagtggaatatgtgtgtatgttttaataaatgatttaaattattttcaggccatttttacattaatctataaggaaatataagctcctttaaaatggttttgaaacttagtgtctcaaaaggagtacaaaaacaactccgaagttcccctatgcttctggaaacattaaatcctcttggcaatgggtgacatgtgaaaggactccctcagtttgccctgaaatactccctttggtcctaaaaacattacgcactcctttagggagttcgaggcaaaggagccagtgtgttttgagggacaaggtataaatgctacggcatccaagaggattagctgccttttctggaaaattaggaaattgatgtataatttttaattacacataaatttcaaactttccatcaaagtcaaattgtgctgatgtagtcaaacgtaatctaagcattgattcaagaacctgctgatggagtgaaaatacatggaaacttgttaacaggaattacaattatctacatctcagcaaataacgccagagtgtcatgtaatatgctgagctcaggcagcctatagccaatgcagatcttttttttttttcttcaccattaatatttacagttggaagcaaaacatggctgcaatctaagtgctgcacctaacaaggaagttgttggcttgataccttgtttcctgacactgtgaagcactgaaacagctaccttcttaatcatcgcctgatgatattgtgttgaaactggaggggagcacatggctgttttataagagccacaaccctgggagattttcttcattgtttagttgttttacttcttgatagacatactgggatgttaaaagcataggactgaaaattgtgcattatggagttttttctttgttctcctgctgaatttttctaggtctatgcagacactgtttgtaaagacagtttacctcctgacacctgctgtgtgctaggcaccttcctagaactgaaaacaaaacccttccacccatcagcctactttattgtagttattctcacatgcaaagtccaaaaaaaacaaaacacacacacactaagcaaacatcagtaatcagagaagcatgattggttacataagcactgtgcatagtaagagacctgaaatataaaataaccatttttactcttctttcagtctgcagatatgccaactaagggtaatacagttgaaattatggggtagatttggggttacatttatatagtgctctatctaaggatgcagctgtgcgtaattaaacaagccctgataatttggattctaagctgcttactagctgtgtgactttggacaaattgcttaaatcatcttttaaatacatgcaataatctctatatcattagattgtggtgaaaattaagagatgacatctaaaatgccagaaaatattaaatcctcagcttgtagttactttttccatatccctatgttccaccttttagttctaacgtattttacaggtaatcccagtgtagcgaatgaaccagatacaggaaagattaactacctggatcgaatgctcaaagaatcaaagacctagttgtcatctttgtcatagaattaatctatttactctgggttcctgaaactagtaaaagaaccctaacaaatagcagcaaacgaattttagtgaaagagaacaatgaaacatttaatagaagaccaacttctaagaactacttaataaaaatgccttttaatattgaggtgatttctgctcaggtccaccccacaaagaggacctggactgagttgagctgtgttgcaactctttctcgcttgtcaaagttgtagctcctcctcgtgttgctaaatcacagcagatggcttccttttacacccaacgccgtcagtggaatgtaaatgcgtctcctcacaacactgaaaatactgaggctgtgtgtttaatctgtgctgtacaagccgaatgaccctgaaaagaacatgagcactgagcacgtttggagaattggcatcaatccttggaaacaggattggggaggatttttcaggcctagtgactaatcatggttttcttcctgaggctcctaactcagccatatccctgaggacaagcaatctaaatggtgattgaatagaaaagttatagacccaagggaagtatttttttttttaaaggggcagtgggagtgttgtttggggtatgggaaaaagtagagagagttgcgctgcactgcaaaattgaagaggcttagtttatagtttgaacattcaattctatgtctccttgggagttaaaaaaataaaatttccctgtttcagattatttaagtcactaagaggaatactttctctaagcaattacttcaaaattcagaaataatgtaaataattcatgtcagtatgataccaagtatgagacaagaattatccagaaaaaaaactatattttgagagtatgaatagcaaattatagaaataaaatataatcaagcacattagccaggttatctcagcttctttcttaaatagatctccaagctgcttagaaaacagagaacctgatcttcattttattaaaacagtctccaaaaattaaccagtggctaaaggagaagagaacttgtcatgcaatttgtcttttgagccttttgtagcaaaggaacagagttcttgtcacttctgcttcccacctttccttgggcaagggtctcaaactattatttcaaaaaaagatgtggtcattgtgaatatcataattaccctatgtactgtatataacacagacttagagatcccaaagcataaaataaccactttagctttattgtatgatctaattttatagcaggttattaaattctgtgctaaatttatacatagagatggagaaattttagttcagcagtatttttaaactaataggaaaatgctgttagactttatttttgtcccctccaagaataaatgctttagattcctcaatacaaatgaaaacctagcctttgcttctgttgtgcttttgcgtatttaggtgaactgttagtaaagtcatacataaggtttagggtttgtttttattttttttttaatcctgctaactttaaaacctatagacttttaccaaatggcttatgaaagcctgacttctgaaacaaacctttagttctaaaactaaatactatttcaataaatcctcataatatgaaggtttctatctttgctggttgtcaggttgcttggtgttttaagttgctttgagttcatagattttagaaatgttcacttgggatctgaccagcctctcagcttcacaggatccatctctgtttagacataccaagtctcaaactattttgaagagaaaaggctgtgcagtgaaaggctacccattaaagcatgatgtgtgtctttcatcttccactaggcagagttcgaaactgaaagtctgataatttgatgtaaactgacagtgacaatagaaatggctacttttgagattatttaagagaaggtgcaaggtatagacattcatcaatgaaacactaaaggaaaggtttttatttctgtgtttgctttttaaaataagaatagagtaaatggcacaatagattatataaacaaggacttcaatgacaagctgtcaaagttaaaataatatattttacatgggtgacttgacgccacactttatcacttacatgaggggaagccaatttgagtctggtcaataaaacacaacctccaaagttgggcctggggcaaagctgacatagtgtggcagagcctggtggtttggcatccacttctgctgggacacagcaggagttggcactgctaccatctggggtatgtcctacatttaagccctatttgattaatcaacacttatgcaggttgaagggacgatgcattggctctgctctgaggcagttcaggctctagtaatttaatgcaggtctgaggcataaatgggactagtgattcaaaaactggatttactgcagtctcacaactgttgaaaattaaagtacatgtgctgcaagttaggggttactagggtatctcattataggaggctattttttttcagaggtttgaatctttgctgaattactgagagacttattcgaatgtaggcttggaccaaataattttctgataaattggccataaatcctcagtaaaataagcttggtgttctcagcatatctattggctttttgatcatttttatggctttccttttgctggtcaaattatccttatatgctcctaaagctcctctgacatggattaagtcaacacaaaccaatagaccttcattactttggcaactggttttgatttgggggcaataaatatgatgacacagactagattacctctgctgaagggatatgtgataagccgtagggatgtcagggatcctgcattattttttctgcgtaatgtgagaatgaattaatagcagcttttaactagctgaagaaagttggaaagaagaaagaaatctgaatgaaaagagagccaaggtacggcttataggttaagagcagtgacaccagtcgatcataagaaagtccatgaacacccaatgtgtgtccaacaccgtgcaaggcacaggcaggcagggtcagggccaaatatgtgaggaaactaacatgtgatgtgatccatatcttagtgtctgggagaggagataagaccatcaatgagagcaagatttattgtgcaataaaagtgtagagcagagagaaataagcaaggcctggtatagccaaggaaggggtaatggaagaagcaagatctgcaaatatgggggttggaggaactattttccttataaaaattgtttgttaaattattacttttccaacattttgcttggaaaaaaatgcaaacctaaagagaattgaaaaaaagttacaactaatgcgtgtaactctttaacccagattaccaactttttaacattttgatacctttgctttatctctgtccatatacatgtattttttttttgctcagtaattagaaagtagattgcagatgtcatgacactttaccactaagtattttagtatctcttaagaaagaaggcttccttctataaccacaatgctagtatcacactcaagaaatttaacatcttatatactatccatattcagactttctaattgtcccaataatgtcccttatagattttttaaatccaggatacaatcaattgcatttaatcatcatttggcatgtctttttagtatctttttttatctcaaactgtcccctgcccttttaattcttttgccactgaatattctcttgcttttggaattctgtataaaatcaattggcatatttatcccttgtcttctaaaattatttagtatggcagaaatgggatatgaagaaactccaatctttttctacactacaaaatgcaagttagtagacgacccagcagatacataaaaagggaactcaaataatgaagctactatgttgaaaataagtggtataagtcatcagcctaggaaaggaccagtagtgagtacacatgaaattgctccctccattctggccctcctgagagacaggaaatcaggtttcttgacatggtatctagatgggttatatgcccagttttggtaaacactttcctggcacatgagctgtctgccacttcctattctagttcttctccatttgtggctctgcataaggagttatccttctgtaaagtttcccaggcatgcaggaaatatcccagaaccacaggcatgctttttgttctccttaaagcaattggatcatggtgattccttcagcctaaaacatacttctttacctcattctcccagcaacttcctttgagaaacttagcgatcccatgaggcaccttcctttctccttgtttttccttcatgttcacctctaaactaacaccacccatatggaactgtaattgctttatatagctgccccacccccaggcactatcactaaacagtgaattattttaaagataatggttatgccttttacttccatatctccaggatctaatatgctgtctgaaagtttgaaggcattcggtaataatttgttgagtaagtgaatgaaagcatgaaaaaatgaatgaatgaatttcaccaccaacaaactttctgggttctatagaactcttcttatgactgagaagaacttagtaatgtgttaaacagggcaatcagtgttacaagtgtgtgagtcgataataattgatcagccacttgggcaaagcactgcattttatattattgggaagttccagagtaacaaatagtcatgccttacagtcctgaaggaagggatagatttggcttaactcacattgaacaacagctacacattcatgcgcatatgttatgccaggcaggcctagctacagctcttctcaaaaatgtgctggccctggacattgctgtgtaagagttacaggtgagtggagtcacatgggcttctctggagaggctttgcaaagtacagagaaagtttgaattatcttttaaaaagaggagaggcatgattgaataaacggcatgtttcaggatagagaagtggtttggaggaacaggtgattcctgtttgaaaagtggcagatagagagagttgctctgctggaaccccccggccccggcactagctaggctgcaactggtgatgaccctcatgaggaaatgggactcattaataaagagcctcaacttaaaaattgttgggtggagtggcgcacgcctgtaatcctagcactttgggaagccaaggtgggcggatagcttgagcccgggaggtcaagtctgcagtgagccaagatcatgccactgcactccagcctgagcgacagagtgagaccctgtctcaaaataaataaataaataaaatcaaaattggcaatttatatttgatatggacaggtttgatatagttcgttcccacgacttcctagtcacgtaagtacggtcatttttttctgtggggctggatggaggatgtagattctggaggaaataaaagtgtgtagagaatagatgaattacctagggagaggataattgggccaggattgtgactgtgggaatgcagagagagaaattagaacagaattgtaggggaattggttacaaatgggtctgggcatagagtaatgaagagatgaaaaggatgtgctttgaaaactacaagagtttgcagctcatagcactgaatgagttacacgctctgaatctttagttagcaaccactgttttctaaaatgaaataaagagaagaaaagaaaaaaaagggagagaagcatgaatgtccacacagcttttctgagaccaaaataggccaagctaatgtccagtagttcacctaacggaaacaaaaagaataattcacatgtagcaaatgatagctggctcctgcttattttttacctttatttttgtttttaatcctcactagcagctcctgattgtatcacgtgataacgtttccattctagatacgaggggcaggaaaaggtaaaaacaaacacattgtttgttgatttcacaaaaaggaataatgctcgtgtctggttggctccttggtcatattatcccttatctgccactccaattcctgccagcagcacctcagagatggcacctccccttgctgcttccgttcctctgcaggacacatggtgaggtttttattacgtaaaaatcccaagaggaagaagctctgtgttgataaagtcaatagctcattgcatgctgctagacaagctctaacttttaattctcttctgccaagtggcagtctgcaatgtctttgtggaacagacactgttccaggtgccagggaaacaattgggaacaaggaaggcaaatatctgcacctgaatggggcttccattacagcaggatacacacaaaaactctatagacttcacatggtactgaatgcttgagagaatgaaagctgattgcaatcaaagaggatggtcagggaaggtctccccaagaagatgacagcaaatagtaacacctacctagttgagttattaggagaattaaagcattttctgtgttaaaaacatctggcaaaccactgacacagggtcagaagaaatggctagccattatctttcaacaataaatttacaaagcataatgaaatataactgagtttgagctgctgggatttggttcttgtatgagatgaggcgataatttttattcacaaggccatgtgctccaaagaaaacaatgctatcacttataccacctgcttatggagagaaaaatatgaaagcaatgtcctcaaacctctagctgcatctatgcttctgcctaaaatctggtatcctaagtaggagagaggttgtgaattatcagggctttttcttgatacttatttttacagatctaatgcctatgatggctcctgccagggactgtttggcccaccactctacttctagctagcattgtggttacacagtttgtagaatgcagaaataaacttgtctatttatgaccaatgtcacagcacatgtcaaatctcagtgtcactgggccctttccctaaaggtctacaagaggaaatatgtcatgcttgagttaatgttgaggttgattgtttaacctggaactagaattccaaacatatatccttatgttacatcagttttttttttctcatttatctccaatgtgtccacaggaaatttccacagtagctgttctagcctcttccttcctatcatagctataccattccttctggtatggaaatcatatcagaaggttcccaggaagcgtcttccaggctgcggttccctggacggtcccatctcagctcagtttttcctcccccagctattgtgatgacccccaatcagcatagttataagaaattgtaatcacatggtgagaattaatgagaaagcctttatattggattccttctttttccagcaagagacttcaaaccctgctaactgcagtcttacagcccttggagggggccgtagctcaccattgttctgttctcggcaaacccagtgggagcttatctgttttctgggagaagcagagcagccagatgaagagatggggcagtgccaaggagaaaatgatactcagcatgcagtgcagatccctccctcccctgttccctgctgtcggcctgctgctcagagggaaaggtgcctggtggctctctgatcgccatcctttcttcacattcctaagccttttatttggtggaaggagcatctggctggatagcctcctccttatcccaggacacttcccgagttctctcttttggctttttaataccttattttccccttatgactgtaaagtggacagtgtatttatggttgaaaattggctgctatagcaatattaattttaaaaacagagttttggcacatattcaatattactatggaaacggccgcttctaacaattcactcataagatatagttcaaggactgaggtctgtgtgggaggtttttaccatccaccaaattgacgatctacttgtcagaatagcaattcacaagaactgctctccaaatttgtattccttttttaaaaaagttagtggatgagcattcgagagatgcctttattttactttatatatgtagatggaagataaatattccaactggcatgttaaagacacaatgtgtttaaaataatttttccatgaatcactaattctcttaattgcacataatggtcttacttggttatttgatgtaacactaaatacacacacagacacaactagtttcagaaacgcacatattgaagctggaatgtaacctgtaatcaattgacacattcaaacattttaactttccatcttaaactgtctccacatatttctatgtaactgatatacatacaactgaattccaggaaagacttgaagtaattcattccagtgtggtgttttccaggagccagtttttaaccccaaatattgccttcatttttaaccgcaaacatacttctgttggttttataaaacgcaggcatgagagaaaggacctctgggggctgatggttgcagcattagttcttgaattccctcactttaagtcaaagctttcatgtttgcacctctgttcacttgggaatgtgaggttacattttccaaaaaatcctgcaatgtttcatattttttcagagctccttctgatatgtttattgttttcacattatttcaaatgctgtcatcggccctaaatatcatgaaagataggtcctgatgctgacaacagaatttgtctcatttctcttatttccagctcattttgtgttttccaaattagattaactctcaagcaattagtaacagttgattctgataggcccaggttgcacacccttccaccagcgccacatcagcacagtgagagtgataacccgaagcgcctccttgttcacaaggatggccctgagtggatggtaggagttctgaaatccaaacaggatcaagaaaatcaatcaggggaaggtcacttggggtaataaacaagagtaatcacatggatcaaagttcttgtcctgtgcgtatgtcctatgagaagctctttatccactgaatgctgtaattcttagaacaattctaagacgtgggaattgttgtccccatttattatacttatcctacatatactgtgggaaaatggtatatgagcagagctcttaaccacttcattacacagccaggagtggcagaggtagggctgcatctcaggccttgaatttgctctttcattcttatgacatttctgagagaagtgggaaaacagtatatgtaggctaagtatactaaacaagtatcgaaattggattcaaatccctttctgtctgcttagcaagtgcatgctgtttccagttccccttcagaagaaacaagatgaaatttcttttctgggattaagaggaaaacacacattaacctatggtgctagcacattccagcatacaataatcaggatggaagtttcaaaataggttttgacagtctcaccatagaataccatggaataaccttgcttgggtcctatataggccagaacccagttaatgtttcagaataaattctctttgaggagaacaaatgaaacatctatttattttattctgcagatatggagttcaaagtaatcacagtttaaattaatcatacatacaatatacattttttaaaagatgttaatatgataactgactgcagatagcagcatgtcatttttcagaaaaaaaaaaaacaattctacattatatttataattaatttggggtatgtcttttcaggaaaaggttattcaaaagctcagtgttagagcacaaccaatccaaatagggctggccttaaatctcgtcctgcacctggaggcctccatcatcagttcatgtgtcccagcagtttcaattatcaaaagatccatcctagtgccgtatattttaagcacagttgaagaatagtggagcaaaaaaaaaaaagcctttcaaccatgggaatttaaaagcaaagggccctgaagaggcgatttcaaaaccctactcattcagttcactctaaagcttaatgacatgccctatttgatacagttaggggaactctttcatcaaaaactttatatgaggctgggaattgcaatattaggtttgtaggttggctcccttggtcatactgcaacgtcctgagggaattctagtttatcttttaaaagcaaatagaattagggaaaatgataaatggtatactaatgactactaatatgtttgtgtatttgagaacttcctataggctgtgctttttgtattttacattctttgtgttttatttggtcccatcctttgaagtagatgttaatattccattttataaatgatgaaaatgagttcctaagaggtgaaataacttgctgtgtttgcacaagtaattggcagagccacgaatcaaacccaggtctctgcctctgaagactgacctcttaaccacttcattacacagccaggactggcagaggtggggctggatcccaggccttgaatttgctcttttatttttatcacatttttaagaacagcaaagcaactgtagatgaaggacttggttcctcaggagtcccaaaatatgtgaaacaggtcagccctctggttcaacctgaattgaggtactaacaaggactcgggacccacccccatgagtccttcttcctctcctgttgcagcatagcagatgagaggatctgggaagcctcagtttacccaatgtaatcaatctcaggctgaatgagaagagaagggcctggaaaagtttagaaaacagagacaaaccaagtgatttttctcttgtgtgcatgggtgtgggcactcccaactctctcatccaggagaaccgccatttactccaacagatgacatgatttaccagacagattaagatgaaatcaacatctaagaacaagagtgtgcattttctaaagatcattggatagtactaaggtgtttttctggtcagatttcatctgctcttctgtgtcccagccttttgacctttcaagcccaactctgcggttctgttcctctttcccaggccagagttatctttattgataaaacatataattatttacaaaagcatggccacacagtatggatggagagtttgccctctagttgacataaactattttttctaaaaaactactgaactctatgaaattctatatgctttacttcaaaagctccagtcattgtcataacccagaatttttcacagtaatatgaaggagagatggagtagtaaacatatttctaatgatctaatagtactatattcttgaatgtctccaaggcacctaagaccagcttttcccagcctgacctcatattcttcctacacaaacctcatgtgaacccagtttttcctcatgtgagcccaatttcaatgactgacatcccaatccacctgctcatctaatgtggtatcaacagccatcttcatccttcctctcttccccactaccccacacaatctgacatggggtgatgctgaatttacctcagaaatccctgtcaaacattctttcccttcaattctcactcctttgctaaatttagacctaggtaatctcttatcatgactaataagataaactaacttctctgcctccaatttcttccccacctacactatctcccatcctccaccctgttaccagagcttatcaagtcatgcttttgcttaaatatcttcagtggctcctcactgactacaggacaaagtctgagtttagtgtggcattcacatttcttaacaagacccttctactttatagtattttctctcaccaactcttttcaccctttcccaattcaaacatacacattcatggtcaatgtattggtcaatatagtattttctctcaccaactcttttcaccctttcccaattcaaacatacacattcggtcacactgggtttcttactctttccctaaattctaaggacttttatgtcttcttgcgttttatgttttgtttttgtttttgttttgagacagagttttgctctatcacccagggtggagtgcagtagcctgatctcagcttacatcaacctccgcatctcgggttcaagcgattcttctgcctcagcctcccaagtcgttgggattacaggcacccaccaccatgccctgctaatttttgtatatttagtagagatagggtttcaccatgttggccaggctggtctcgaactcctgacctcaggtgatctgcccacctcagcttccgaaagtgctgggattacagatatgagccaccgagattgtctcattaaagtggaatttcctccttgaagtacttgagcatccactaatccttcaaaggacaatcatgtctcattccaatcttgctccacctactcctcaacacaattaattcatcacatggtcataacacctatctgtaatgtattatgattatttgtgtgtgtgtgtgtgtgtgtgtgtgtgtgtgtgtgcgcgtcttcctcttctcctatctccagaatttgagctccagattccaaacttttatttgtctttgtattttcatttcctagctcagtaaatgctcatagtaaatggtcaataagtattgctgattgaatgcacaaactaatgaaccacatttgagcaaggattattgtgagtagatcccagacaatactatgaagctgttaaaatattatattaattgtataataatttaaaccaagacacaggggacaataaaaagagactaaggatagaaaagatatttaaactctctaggatgttaaacacagatttcatttgtaatagattggtttggtaacgtggggatgagtcctagagaaagctaaataagaaggtaaaagagtttactactgatttactctgatagaaatatgtctttgaaaaaatcagtttaaaaattcaaacagtaactcctttctgtctttaatatttctgtgcaactcagtcacagtttcatgttagccattgttaaactgataagagctcaggtttgctaaaaagtgtttgcaaacacatcggaattaacattaatcaaaccactgtgtaaaaataacaactttgagagcccaggatccagctccctttgacagggctctacctgccgttgtctgctgctagatacttggattcagcgttaagcacatgtgcctttacaaccattcaattgccatgttgaatccgaatcagagtgattcctttggaaaccccctgcgagaccagcgtatcacagtccctcctctgtgtcaagaatttttcccacaagacccaactaatttaatttctttcctttcccaaagcaacaaaacaaaactgtaaaataaccatttcttcagtcccaaattagaacttttggcaagggaggaaagagatcatgaataatacgtggctatagatctagaatcattttataaatataagtgtgggctcatcttttgcctttgttgctacatgaatcatctcagtcactgagattaagagactgagcaaatatagtaggtatttcatgccatattttctgactgtagactttagattctagatatatgattatttgtaaatgatttgagaataagaaaatctgactttcttttaataccttggtctttttacagtactgagtggtaccagcttgctctggttggtcttcattcctgagtagttccattgtcctgaatatttatttgcctttgctatagaattcgcatcccaatgatttcaatctttccagttggcagatgacttgatctccgacattttcaccactattggctcagtgactgtcgccttgttactgatcctcttgctggccattgttgcttctgttgtcacctccaacaaaagggcaactcagggaacctacagccccagccgtcaggagaaggagggctcccgagtggaaatgtggaacttgatgccaccccctgcaatggagagactgatttaggagcattgtgtcccttcgagatggggatccacacactgtgaatgtgatgactgtacttcaggtatctctgacatacctgacaatgttaatctgcaactgggattacactggaactacaggaatgattcctttgaccaccttaaaaactttcacagtggttccgctcgacaccattgttttattatattatatcagccaattgcaaaaaaagtctgtgccagtaatttcagccttataattagcaaaaacatcttccagagaataaagtcttctgtggctttagtggctatcactgaaactctttcctcttttcaacctgggaacaaattttagttttcattttaggtttctgtactttctgtagtttctgtgtaaactgccatatgtttacatggaaactacaggaaaaaattggctacatttctcacttctcctatcatgtggtcaaagttattgttgtataccagcgatgggatgtatacttttgtccttcattcatggattcagagaaagctctgggaatgacttatggtccaaaaaagtgacccaatggcaacaaataaaaattgaaatgcagttgttctcctttctgagtactttttgcatttttgtgacattatgtgtgacaaaagtaacctctaggaacatttgaagaacctgcttatgaattagaccttttacctaaatcatttcaagttggttacattttcaaattattactctttgtaaagggttggttaaggcaaaacgcttcctagatagaaatcaaaacggggaaaactcagattctcaagttcgaaaaatcgagttcttttcttccaactgcttttaggtaaatcagtgccaaacagtgacattgtttaaaggtaagaactccaaagttaaatgtatgcactttacggagtatgtgttttaagactatgggatatttggagaaaatgctggggtttctattcttatattttcttctacaaagcatctgattatatttttatatgtgctttgaaatatatgaaacatgctactgctgtagaatataaataaaacttaagaatagatgcatatatattctgggtatacactcaacatgtctaatgacatgaatttttaaatctggtctagaagaacccatccatctcaattactcaaggacatcatttcagcaagtgcccttctcttctacatcatcagtttacccattgtcctggggcatccctatcagcaccaacatgctgtcatatttcctatcatataaaattctctcctgtggccctcatctcactccaatatctaccccattcctcaacaccccttttcagcaaaacatctacagaggagttttctgtatttttggtttcccttttcttgtctctcatcctctctggaacttaaactaatttggcttttctcatcaccactccatgacctccacatggtcaaacacaatgtccagtcctcagtcctcagcttacctgacctctcctaagcatttgaaacaattgtcactcctcttgaaatattttccacacaatgggacaccatttcatcttgattttcttcttacctcactgtccatcccctctccatctcttttgatagtttcccctcattccttaaactctgctttatttttttccatactgtttatcaccacctgagagactgcgtatttttttttgttgttgttgttctcaattttctctatctagaatttaggttatatgaggataagaactatttttttttttgactccagtatctctcacctggaacaggcctaacccatagtgaaaacacaataaatattttctggataaataaacaaataatgaatgaatggtgctcaaatttgtacctgccaccagagaaatcccaaagtgcccaagatttgtgtgggctgtcattggatgctctggtcatgaaactatcatggctctgtagcctatctaatgtcttactcaatctcaggcttttttatccatatctaatattgctttaagtgtaagtttaagaaaaagcatgtctccagtgtctacatgtgaagtatactatgagctatatttatttttgcatttcattagatacaacttcttaatagaagttcatatggaaaagaaagagctcatgcttgaaaaaataagtagctgagttaaaaacacacacacaaactaaaaaaaaatcacaggatataaaatgattctattggtttaattaatctgagtatttgctctattccagtacctagcttagagctttgcataggaatgtatgtccaaatacatggataaatgaatgcatgcaggcatgaataaatgagtgattctttccatgtggacactccaagcacgcacacatttacaggctgccccagcaagccaaatctctttatctttgaagaagctaaatattcaatatcttatgtcaagaatgcttccaaattagccccatgaagtatttgtactgaactatttttaacaatgtagacctcatcttagtggaaaagtgaagcatctgcatgatcaatgacggtgcagctttttaatagaatgtattttcaaaatttgtattaggattggtttcgaagaccgcaacaaaacaccacagcaattcctcccatgctcatttgcaatgtgacattgccacccctcccatcaagaggagtctgtttgtcttctccttgaattagggctggccttgtgatttgctgtggctgacagaatgccatggaaatgatgctctgccatacacaagaggcttgcagcttctgttttccctctcttggaaggcgaccctgagattgccatactgtgaagaagcttggaatgaaaataacatgtcaagagagagtcccagccatgccagacatccctgctgaacccggcctcagtcaccgtgcctgctggatgcaatcacttagtgacccacgtgagaacagcaaaggaaccaccagctcaatccacaaaatcatgagaaacagtaaattgttttaagccattaaggtttagagtgatttgttacatagtaatagataaatgaaacacaattattcacatcaataaggcaacctaaggaatacagcaatatgaggtacttctttgattctaatttctttgcttttagaactgctgctctgggaactggtggactatagagtattcatttgtataggaacaataattagtacattatgaataaaatatgacacctatatgtcagatttctctcaggatggcaaataagggtgaagagccacttaatccaaacacaggtccaggaggtgctgagggttatagtccttctagcgcagctgtttgcaggctttggggcatggtgtaaagtggacacagccggccaacttcctgccctagggtgaaccctggcccaaggcagccaatgtaaaaggcacacatctggtgtgagtttacaaggagtgacaggaagcctccttcaagcggactctcatgtggcttctgtagtcacagtgagtgcaaagagaagcaggaaatgacaaatgactgtgacttaaatcagctgtcaagccttcccctgttttattcctaaattaccaccgtataatagatcctcttatctgagactgagacaggtatggtcccagagtctggccctgtgtagccataattgttattatcattaccaattagtattagcagcagtaattgaagagtaacagtaatagggaatagaggtagaactagaagccatcatagcaatgataataatgattattataacaataaagagggatcccttcctgagcccttgctagaggccaagactatcttaagcttgctgcgctacatgcattatgtctcatttagacctcataacagcctttgagggaggaacttttatcttcttctcacgagcctctgcagacaaagaaacatagttttaaacttctgaaatgccccattcagctgatctgagcttaatctgaaaaatgggaatcacacctctattgcacaggcacattatgataacattattggaaaatgcttaactacaagtaagcacacaatacatagcatctattgttactattcagataagatgaagtgttagtaggacaaatgacaagcagcagtaacgtttaaatggtttccacactcctacctcctactttatctgccagacaaaccaaataggtaactactttcctcctatcctccttcccatctgtcttataatgtgtttgtaaaataagcaggttttgtgcagagaaagataattttttcatgtcattcccataactctgaattgcctcatgatggtggtcccatccaactaaagaatttaattcattcatctgtaataaaacaaacggtacataccagttgtatgtcctcagtgaaattgtcagaaataaatcaaaaggtctcaggtctctcagacctccaaacaactaatgatagagattttttttagttatacattgtagagatgacttattattatggttttttttggcccttttagggttactccttaaacctcttttgttagaaaatcaccatcatcttttttcattaacagcaagaaatattggcccatgtatcttgatttaaatcatccttctgataatgattagctagccaactttcaacctggttttatgctctgcaggggcatatctggaaggaatatgacttttcaagtttcaccctgctttcagcaaaagtgcagtttttactgctgtgtattgcattgaatagtgatgacaaaaatgcatgtttcccatttaaactgattctcctatgatttggtacccaggctttgctttacatggttccagaaacctgggaacagcatctatccaacatatttggcagtgcctgcctgaggacagctgctttaatcaccaatcacagagtctcctagaatgggagaaaacaagctccccttgaaaactgctcccaaatccacatctttcagctcgaagtggagcatcctgtagaggtgctcatggtttgcagcttgaggctcctggctcaaaattaaactcattcatggctgaaataaggcaaactgaatggaagcaaatataggtgttatgaaaagtccctagagtataagagctccaggaccccattttgactcaatccttcatgtcaaagatttggctgcagcatgaattaatttattcagctacatactcaacatccagctttgtatggttgcgaaagccttttaccatatgaggcgggtggtccacaagacaacttctaggttagctttcccatacagagatcattcaaaaactttattttgcaaggtcagtcccattttctaatgcccactttaaaaagaaattgctgtacatttgaatcatttggggattttgttttttgtaaaatataaataactagcactaaccacccagggtaggtttaatttgaaaatatttttttgcatgaagaaaaattaagccgaactttaccttaattaaaggttaaaaatcgtaataaaaattttattttattgggtttccaaagccattaggttttccaggtccagaatatagacatcccatatagaatatagacatgaacccaggctcaaatttttctaaaagtattaattattttttaaatgcattgataattggttctctgataaacagaagggaaggcagagggtcctcttgattggcgatctgaatagtacctggatttcgggtcaccacccctccactgccaaataccaatttcattcaaatattgaatctgcagtaataggacttaagtgtctcaaaatgaagaagagcaaaaatcatcaatttaataaactgttcgtctgaagcccctaatggccaaaatcagagattccaattatgccagtttatttagcatttatcatgttgatagaatgagagaccttaccatgggagaaaaaaggatgaagaaaatgtcactcacaattagagagtaaaatgtaatgtcgtcatccaaactgacagagggtaacttaaatcatttaaaatgaaatacaaattaattattccacttatcccagaaactggccaaacacacaccctactgaaaaaaatcaaatttgtttatatttactagagttccagtgaactttcagagttctagtgaccttctgaaagcatttcagtagattaacatctgccctcaagggttattagtctagagatgagactattataaaagactcaaaagtgtcaaaataaattcattgttgccatgcataatcttaatacctgtttaataattattctcaatttattttatttatttattttattctattttttttgagatagggtcttgctctgtcacccaggctggagtgcagtggcatgatattggatcactgcaacctccacctcctgggttcaagcgattctcctgcctcagcctcccaagtagttgggattacaggtgcatgccaccacgcatgactaatttttgtatctttagtagagatggggtttcaccatgttggtcaggctggtcttgaactcctgacctcaagtgatccacctgcctcggcctcccaaagtgctgggattataggcgtgagccactgcaccgggcctgcagtttactttaaaagggatgattagacctcttttcaaaggatatttctttctgtgttttttgatcaaaacaataaaaactagagattataaaagtaggtgaaaatatttcaagatggcagatcaatttatagttcaaaactcaatttagattctaatagtgtttaggaacaaatttggtcaaagttagtcatcttccatgaaaatcattgctgacaagaggctatatcatttaatcaataatatagacgaagtgaaaacagatttgggggatgctatgatatttttgttcattgttataagtgagatatcaaaagctcatttcttaaagttaggttattttttcctcaagactgtaaagattgctgcctttagatgccagttaggatgcgtacagtaattggtaaatttctgtcctcaggtttggaatgagatttataatccagccaaatatcattactctccacaaacagctatattaaaaaacaggtatttgtgatcattgattatttgaagcaataattgaatatttgaaggcatagattgtgacctttctgaccaactgtatgtaatcagtgcttaatttaatccaactgggtgttgtagctgctatttcccaccaaatttctgagtgtaaccctcttttttaggctcgattatcttgctgcttattagtgaaagattccttaattcaaagtcccatccagcatttctgaaactccaatccctacactgttcatgctgagtcttttgtttttcttatcttaatgagaaatatcaattaacaacctctactctccccttctacaacaattagatacaaggcactatcctcttccttctcaagggtgactcatgttggagaagagtgaaaatttttgaatattgaagtctctttagtgccctatgatgagttgacttctgtatctgttcttgtcaggaatggcagcactggtaagtcatccaggctgtgatggtggcctgcagcagtttccatcagccactcctattctcatcaggctgactttcagaggccactgctggacaagggtggtgaggatgtcctcttgcatcctatcaactaccctaggccagtagcagctgcacaacttagcattgctcccttcacccaacctggatctcagagctgcctggatctcagagctgccccttaatcaccagggagcaactgtaggataacacggctcctgcaaccctgagtttagtcggagactaggccactgctactgtcacactcacatctcctcagaggcctccctccattccagaccaccctttccctactcccttggagaattcaagcaaagctctccacctgttcctaaggatggtctaatctcaggacacacagacaagaacctggctaggccaggattctaccagagaggtaagcacacttaactctaattagaggcctagataggtatgtggacagtcaaaatctgtctagcaacaaaagccctgccatcttagtgtaaacagcctcgggcagcttcagctattttctctggatcagtgtcaggtgacccagttcactttctcttatttcagcataattggcctttgtgacttgtgaagaggaagtatgatctaactttttctttctcagtactatttactttccagcattgatttttccgttttgagtttgaacttcacgtcttaatcattttcttgctacctcttccatctaaaactaggaagcaaactaagctagcttgtgacctctgggcatctctcctaaattctgcaactctcaccttctatcatgtattagatcactgaggttaaattaaatattacaggggttgagcacagtggctcatgcctaaaatcccagcactttgggaggcagaggcaggtgggtcacaaggtcaagagatcgagaccatcctggccaacatggtgaaaccccgtcactactaaaaatacaaaaattagctgggtatggtggcacccacctgtagtcccagctactcggaggcctaggcaggataatcactcgaacccaggaggcggaggttgcagtgagccaatattgcgccactgcactccagcctggatgacagagcaagactccgtctcaaaaaaaaaaaaaaaaaaaaaaattctataggaatttgatgctctttttagagtcagtccttcccttaaccttgactaggttctttgaaactggtgtcagcaaaatccttcttttgctgacagtttcaaagatgcccagaccttgaaggtttttagcactggcttatcccacctaagattgttcaaaacacaagtttttgaatcactcaaacatatctgggacacacaaatctgattttaaaacaagtacatatatccccttcggaacactaccccagcagcctaagaaccacccccatccccacagtggccgtggcagaccctgcccaagaaaagtctgagctcagacccacctaaccctgcccacaacaagcagtatttatccacttgctctggtagcttaagacaaaagacataaattttgggagctttatggcaacatccattgcctgaggaatcagaatacttcccctggacaacttagggcagttcaaatcccactgctacaaatgcagctggtcctctctggaaagtgcaacctcctggctgaaggccaacaaactcagacatgtacagtacctcttgacagaataacattgtgaccaggaaggagaaaatggctgcatgatctcagctaacaccactgcctgaaacaccgtgactaaccagaggtcctgcgtctatgtgacaatttcactactagtataaccagcatttgagagagccagctcactaagcctgtctacaaccaaggattctcacaatctatcttactcccctgtgatgccatcagagtgggtgctggtacctactgctgggagacttgaagacaggtcgtatcactggatcctttgcagacattcccgaggaccagcctggagtctggtagctgcaccgggtggctagacacagaagagcaataacaatcattgcagcctggctctcaagaagtcccattcctaggctaacggggagagtccaacatgaagggaatacttccacagggtactgtggaagaaaaaattctgaacagtaggccttgagtcctagatctttctgctggttggaagtttcttacaggagagacacaattgcagcactgagagcagtagggaaagtctgtacctctaccccaacaggcaggcagcctctgtgataatgaaggattttggagaaggggtccttgttctccctggaagaccactgcagacacatctggggcttctcacatgggaacgcagcatggatgcacttatagacagccttcctggaacaattcaagttgattacagccccagaggaggagcactccgcagattcaggcctgcacaagaggcagagtcacaatccctccctacttggaatatcaacattcttatagatgaaaagaggtgcctttctgatctgaatagccagtacactggggcaggagtgagactatgaggtggatagctttcctgcaggcctggtaggggagctgaggtagttcccactgttcatcctgataaaacctcagcacatctaattaagagctcccccagcaccttcaccaaggctgggacctctgcccaccattgggtattacatctacccacctgccttacctacaagcagtgcctacccagggatacctcgcctattggcttgaagccttaattatcaacttagtaaataaaatactggggaaaaattaaataaataaagtgtacatcgtgagagaatgagataagcttcaagagatccctgccatttccaaccccataggagacagtgaactcacccatacactaagtacataactactacacccaggatctggaaaagccagtgcacaaagactctatataactaaggaactcatatatagtcttcactcctaaaagcacc

SEQ ID NO: 438 - DNA, 114385 bp, Homo sapiens
cagccgtccagttgttttatgacttgtgtgattgaagcatatggtggcttgtggcatgttcttaggcaaaccactcacctccctaggtttcgttttcctaatttctcaaacaagggagttagattaggtggtctatagttccttccaattgtgatatttcactatataacaatatagttataatagatcatagcacatctgtaatgaaaaaaagtgagttcatttcttaacaagtacatttacttaactagttggagtcattaaagcaaattaagaacgaaattcttagttaatctgaacttttctgggcatactgatctgttccctaacgcgtctgaccgtggaaaagtggatcagcaggagtgggactggctctcagctttgccatgtttggctctttctctgctgtgaaactcagtttcttcctggatcaagaggttaatttctgccggtgttattttacagtgttgcaaagagataaaagccagacgaaagaagggaaagtacttcagctttgattagggatttttttttctgtccctgtgaccatacactactcaattctgacagcttcgcatgagtctagcagaaaattgagggattcactgttattccttaacttgcagaggtccagacccgcccacatcaaatggtgaggtccccactttcaactttagctgttgctaaatctgtgaccctttcaatgaaatccaaggatctcagcttaaaaaaagttaaaataaaataaaaactaggtgtttttcagaggcggtttgaaacgcctctctgaggttgtcagagattgtttttgttttctccctttgcccttcttggaatgcaccaaacataaaagcattttttttcaagctttactttcactttcgagagtgccgtctatttgccacacacttccctgatgaaatgtctggatttggactaaagaaaaaaggaaaggctagcagtcatccaagtaagtgaaggtgttcatttcacgttcttactgggcagggtctctcttgctgagtagagtttgctagcagaatgcatgtggttttagccttctttggtctttctttgatctggtgcttgaaatctagtcagaattattcaggaaggaaagtggaagaaaagggatatgatatgggcatgggagaagggtataactcagaacacaagtaatagcaccaatatctagttaatgtgataatgtatttatgcagtatttaatttttttctctgtagcattctgtacctggaaaaaacacattagggaagctatggaaatcattttgcaacagtctttttagcaaatcacatctttgccttaaagaaacaaaactccaagaggttaaaagagcgtatccccttttgttagttttattggctggaggggagacaggagctggcattgtatgacaatgtcttagataggagagaacattcaggtatgcctaggagtaagtaaatggctttctttcacctaatgaaggataatggaagaagtggagaagtggaaagttgttaaggtgtatgggaagatcagaaactggtatcggcaattgtggggtactcgggtaaaaatggagttggcttcagcaagttgattcccaggtttacagatgattacgtgctggtatgtgtcttcatatgggcgtgcctgtgtatgaacctactacaaaggttgcaaagtttacaaatcaaactatggatagtggttaactccaggtagtctgcctccagaccccatgtcctaaccatcaggcaatattgtctctcacttggacaaagaatgtgaattccatgtgccctcacaaaatatttccaaaattctaaggctgagtgagtctctttttaattttttttcattttctttatttctgctagatctcattcaacagcaacgttttcttcactctcatttcatcctttaactgcatttttgcttgttttactgaagcatgtcctagaataaccttttcatacagatcgtatggctataaacttactgaatttttgcatatctcaaaatacttatacctttttatttagttattcagatggatgtgaaatttccctatcttattttattttattttatttcattttatttcatttatcgatttagagacaaggtctcgctgtgttgcccaggctgaagtacagtggcatgatcgtggctcactgcagccttgacctccctggctcaagcaattctcacacctcagtgtcacgagtagctgggaccacaggtgtgaaccactatggccagctaatttaaaaaaaaattttggtggagatgaggtttccctgtgttgcccaggctggtcccaaactcctaggctcaagggatcctccagcctcagcttcctaaagtgatgggattacaggcatgagccacaggtaattttcttggcctggtcaaaggtaattttcttgttttttagaggtaaggtcttgctctgttgcccaggctggagtgcagtggtgtgatcatgattcattgcagccttaacctcctgggctcaagcgatcctcctgcctcagcctcccaagtagctggaactacaggcttgtgccaccacacttggctactttctaaaatatttttgtagatacggggtctcactatgttgcccaggctggtgttgagctcctgatctccttctgcctacaccttctaaagtgccgggattgtggggatgagccactatgctttgcctggatatgaaattttaaattcaaaataattttctctaaatgtttggaaagcttatctctattgttttccagtggttcatgttactgatgaaaagttttttattaatcaagatctcttttctttggaaatgaaggttttaggatttttgtgtgcatggttgcaattctgaaatttcataggagtctctccaagtttgttcctctttcactcctcctgcctagcatttggtgagttttgcccactgatgaaatgtcttcagatggggcaagtccttaagtcattcagggatatgctttgtaatggattagtccttctcagcaattctgacctatagcaggagccctaccagaggggtacatctcacctaagcaaggagaatgtattgtagggaccttacctatgagttggtaaatagagataggaagttctgaaggaactggaagagaggtttgggacactctcagagagggggcaggtggggagctggtccccagcatttgagaggtatcattgccagccctgcatccttcacgtgcctgggcaagtcagcaaatgcatccttgctggcctagctgtggcattcctcatggcctgtggatataaagaatgtgcacagctttacaatgattagtgccagagttgtaaaggccatgagatgggaatattagtttatggaagccagttttttttgttgttttttctgtttctgagaactaaattagaatattagtaaaatcgctatttttaagtatattagaacaattctatatactcacattagttctgttttcctaggattagtcacctaaggtgattttattacctgacacttacctggaataattttcatgtcatgacttttagatcttgtggaatatctatttagatatcattaccactgcttcatctccataccttgtgggtgtatttgattttttaaaatatctgaaatttggttgttgatcacaccacagagtatcacactgggtacacatcccaccaaaataaagtgtgacaatgtatggagttgagtggctttcctgagctgactaaatgcccatggaaagctattgtatgagtgcattctcacattgctctacagaaatacctgagactggtcatttataaagaaagaggttcaattggctgatggttctgcaagtggtgcaggcagcatagcagcctctgcttctggaggagcctcaaggagctttcacccaccacagaaggcaaagccagagctggcaccttcacatagccggagcaggaagaagagagaaggggaaggtgccacacacttttatttttttattatttattttggggggagtgggggcgaagtctcactttgtcacccaggctggagtgcatgtggtgggatctcggctcactgcagcctccgcttccctagttcaagcgattctcctgcctcggccttcccagtagctgggattacaggcacccaccaccacacccagctaatttttgtatttagtagagacacggttacaccatgttggccaggctggtctcaaactcctgacctcaggtgatctgcccaccttggcctcccaagtgctggggttacaggcgtgagccactgcgcccaaccaccacacacttttaaacgaccgaatctcataagaattcactcactcactatcgggagaacagcaccgagggggtggtgctgaaccatctgtgagaactctgccccatgagccagtcacctcccaccagcccccacctccaacactgggaattacaattcaacgtgtggtgtgggtggagacgcagaggcaaaccatatcggctatgtattcaacatatatttatttcttcagagccaacaaagtgccaggtcttgttctaggcacagacaacaccgtatggaataagaactatgtcctctactattatagcttcacattctagtgagaagcaataattaataataaataatacacaatattggataatttccatcaaccatagcaacggaaaaggcaatctagaagaagagcaagatgggaggtttcgctcactgaacttcaagacttgttgtaaagctaaagtaatccgaacaatgtggtattggcctaagaactaacaaatatttcagtggaagagagtagacagcccagaaatagaccctcgcttaaaacatttactcggtttctaaggaaagcacagaacaatccggtgggggaaagaagtctctttaaaaaatggtctgactggaccaggcgtggtggctcacccctataatcccagcactttgggaggccgaggtggatggattacctgaggtcaggagttcaagaccagcctggccaacatggtgaaaccctgtctctactacaaatataaaaattagccaggcatggtggcgcgtgcctgtagtcccagctactcgggagcctgaggcaggagaatcacttgaacccaggaggtggagactgcagtgagccaagatggcaccactgcactccagcctgggtgacagagtgagactccatctcaaaaaaaaaacaaaaaacaagatctgactgactggatatacacacaaaaaaccatgactcctacttcatgcatacacaacaattaacttaggagaggtcacacaccttcacatagaagctaacaccataaagctttttagaggagagtatctaagtaatgggagtaggaaaatttcttagaggagacacagaaatgataaaaataaaagagaagatgataaactagatttcatcataattaagaagacatcagtaagaaaataaataggcaactcacacactgggaataaatatttacaaaataggaatctgacgaaggactgacactcagatacataaaaaattcctacaacacaataataaacaggaaacaatctaatagatgagcaaaatatttgaacatataagggaagataaatgaacaataagcacatgaaaattgttaaatatcgttagtcggcagggaaatgcaaatgaaaaccataattagctatcactatatgttcagcagaatgattaaaaataataataaaaataggtaccaaatgttgtcaggaaagttggtggtgcaacactttcccaaaggatctggcagtttcctgtaaaaccaaatggcctcaccaaatggcccaggcattccaatcctagttatttaccccaaagaaatagaacacagtcatgtggcacttaatcatggggatatgttctgagaaatgcatcgtgaggggacttcatccttgtgggaacgtcacagggagtgcttacacagaactaggtagtacagcctgtggcgcccagcctgcaaaaccagacagccggcgtgtgactgcactgaatactggaggcaattgtaacacaatgggaagtacttgtgtatctaaacatagaaaaggtaagtgaaaatgtggtacaaaaggttacaaatggcacttccatagggcacttaccacgagtggagcttgcagtactgggagtggctctgggtgagtctgtgagtgagaagggaagtggatgtggaggcctcggacatgactgtgcaccactgcagactttatgaacactgcacacttaggttatactaaacctatttaaaaattttactttcttcagtaataattaacttattataactgttttactttataagagttttaatttttcaaaactttttgactcgtgtaataatgcttggtttaaaacaagcacattgtacacctatacaaaaatattttctttgtattcttattttataagcttttttctatttttaattttcttctttttttttaactttttaaacgtttttgttaaaaacgaagacacaaacacacacattagcctaggcctgctcagagtcaggatcattaatgtcactgccttccaccacgtcgtgtcccactggaagctctttaggggccacaacacgcacggacctgtcatctcttatgacaacagtgccttcttctggaatccctcttgaaggacctgcctgaggctgttttacagttaacttaaaaaaaaattagtagaaggagtacactctaaaattatgataaaaagaatagtatagtaaatacataaatcagtaacattcatttattatcattatcaactattaggtactgtaaataattatgtgtgctatattttatataactagtagtgcagtaggtttgtttacaccagcatcactacaaacatgtgaggaatgcattgcaccatgatattatgacggctagattagtaggtgataagaatttttcagttccattatgatctgcagtgactatttatttatatgattgtaaaattgtgattgaggctgggcacattggctcatgcctgtaatcccagcattttaggaggccaaggctggaggatcacttgatgtcaaaagtttgagaccagcctgggcaacatagcaagaccctatctctctataaaatttaaaaaataataaaaaattagccgggtgtggtacatgcctgtagtcccagctacttgggaggctgaggtggaaggaacccttgagcccgagagttggaagctgcagtgagccatgatagtaccactgtactccagcctgggtgacagagtgagaccctgtctctaaaaataaataaataaatacaaataatttttaaaattgtaaataatatttactgactttagatttgctgaattaatgtaggccaaggacctcatatgtaatcatagtttcagggtaaaatgctaacatttcacatcttgacaatgtcaagcaatgttatagctgacagttttaggaaatgtaagaaaggaagaaatgtgaagaaaaatgtatttatttatttaaaataaaataaaaattaactggctgggcacggtggctcacgcctgtaatcccagcactttgggaggctgaagtgggcagatcatgaagtcaagagatcgagaccatcctggccaacatggtgaaacctcgtctctactaaaaatataaaaattagccaggtgtggtggcgggtgcctgtaatcccagctactcgggaggctgaggcaggagaatcacttgaacccagaaggtgaaggttgcagtgagccgagattgcaccattgcactccagcctggtgacagagccagattccatctcaaaaacaaaacagaacaaaataaaacgaaacaaaaacaaacaaaattaactaaagaaaagttgtgaatagaatgagagaaaaatataattaaattccttatctttatagtgaaatgagtaaatgaagaaatagaagatcaagaatattaagtttatggaggtaatcatgagaattacagatagaacctatcaaaagagagacattgcagctgcaactggcattaaggtgaaggataggaaggaagtttggatgttttattttttacctttctgtactgtttgacatttttccgtttgatgtatgacttgtataatatgtacttgtatggcataaaactatgagtaataacatcatacatggtcatattttggtgatatattttacaaggaatataccaatgcatttgaaagccatctgctattaatgttgctcatactttttaatgtttcttttctacagcagaatcatgagacagactttgccttgtatctacttttgggggggccttttgccctttgggatgctgtgtgcatcctccaccaccaagtgcactgttagccatgaagttgctgactgcagccacctgaagttgactcaggtacccgatgatctacccacaaacataacagtgttgaaccttacccataatcaactcagaagattaccagccgccaacttcacaaggtatagccagctaactagcttggatgtaggatttaacaccatctcaaaactggagccagaattgtgccagaaacttcccatgttaaaagttttgaacctccagcacaatgagctatctcaactttctgataaaacctttgccttctgcacgaatttgactgaactccatctcatgtccaactcaatccagaaaattaaaaataatccctttgtcaagcagaaggtaagttgaaaatgtctattgttactaatgtttttaagtcagttacccatccttagacttactatctaaatatcaaggaaataaagaggaagaaatttgatctaatccaatttgccacaaatattgccattataatagaaaatgcttccaaaagagaaaatatactcttaaatcagtttcatccttaattttcaatgtttgcctctctcgctttctcccattagaaatagaacttagacgcaagagatagaagtaatgaacagagaagaatcagaatatcccctaagaacatggaaactaaactttcaatgctgctgatttagcatgtgaagtcgtgacaaaagtcttgagtccaaattctgacttaaataaaattaacaaattgatacaatgatcaagtgaattgttcaactaaaaattacctactcctggtttcagaaatctcctcagtggctatttcaatgactttttcaatagtggtgtcactttttcaatgattcctttttcttttcaaaactttgctcgaattttagttttttttcttttctttttagttgatgtttaataattgcacatatttatgagatagagaatgatttttcagtatgtgtatataatgtgtaatgattaaatcagggtaattatcatatccatcatctcaaatgtttctcatttgtgttgtgaacattcaaaatacgctcttctagcttttaaaaaatacacaataaatcgtagttaaccatattcaccctacaatgctttagagcaccagaaaaaaaaaaacgcatgttattgtttctaaatctgaggcaattattaagtgcttttctttaaccaaagcgattttcaagttacttcattttatggccttataaaaaattgaacattgctcttcctcagatgccaagaataatgtacaaatgtaaatatgctgtgaaacataaagtgatttgctccctagctattttaaatcttttcttgggtcttcttagagtctaatgtggatgaaatatctttgaatacaaaggcctcaaaatctggctagagaaatcattgcaaaatgttatttttgtaaagacttaaattaaaaaacctgcttctcgttaacagcgattacattagactttgccttaactggtatcgctttcccttaccttttgcctgaatttgaagcatacatattcaaaaatagcaaagggtgataaaaacatcccacagtactgataaagcaaacaaaacttaatattctgtactagtcatgactcaaaatttatataatatgaccctttctcagtataaaaatctatttaaaatttcatagatggcaaaattctcatgctttttaagaaaacattctgttcttttttctgatacttattttcaaggttaaagcatgacactgtgtgtttgataagccatgtgaaaatttcttgcatcataagtaaaaggttatgataaataagttcataaattagcaatgttccttatatcataaataagcttaagtcttttttattttggtaagagaaataaaatgattcttgaagtaagaaataaaatccttcctacaatggttgcaagggtgaccatcacaaagattataacgtaacaaagattaatcagatcaaagattttttattatgcttactgttagtattctacagaataatagagaggtgttgattttgctgttgaagtatttttcagatgtacttacatttaaaagaactgtttttgacagcaagactctaacatatgcatattattttttcccttcagaatttaatcacattagatctgtctcataatggcttgtcatctacaaaattaggaactcaggttcagctggaaaatctccaagagcttctattatcaaacaataaaattcaagcgctaaaaagtgaagaactggatatctttgccaattcatctttaaaaaaattagagttgtcatcgaatcaaattaaagaggtaagaagtaaggtaaaattattttgcattctgcctttaaggtggatagtccctatctgtgtcacatacacaggaatgtaatgctctctagcctctgcctgtcttccagcaatccttcccacctactgcttgggggcattggtgtcatcctcctgagagctcaggcagccccaggagaggtcgggagacgggactctgccgccctgcagcactgggtggaacccctgtgccgtgaccttgcgaacatccttaacatctctgagtctgtgtcctcacttataaagtggaaatagtgctctctcacacaaactctctgacagagttattaattaaagagtacgatggtcaagagccccaggttcacagtcgggttagctggcttggtctctgggctttgtcttttaacaatcatgttatcaggcaagttattcaagttctccctctctagcctcccagctttcaaatgggcgtgataatgactctgcttcataggactgtgtggtaaagaatttaggaccgtgtctggcgtaggcagtgctcaggaaatgatcagcagcagtatgtggttataaaaaccttcctataatgaagtcagcttaaataactgacaggactgtctctttttggaatcatgatcttcaagctaatcattttctgtcacgggagagcaacaactatctggaccggtggcacaggggtaaaagaatttaccaagacagttgcaggtggagaaaggcacatttattcgtgaaagtaggaaactacattgcgagaaggcaacgggcatatcagcaagagaagctgactgcaaagaaacaaaggcttgctggggattttacagggtcttgtttatgctgtgtgctgaagagggctttgagctgcactgacagcgcccaggttgcagtgggctaactcgcaggggcctggtgatagctgggcacaggaagattgtcagttatttgcacaggagggctacgtgtcctggatcatgaagacagactaataatttacctgctcttttgctttctctcggtcccgccaactgactacttttccctaaataggactctgcattttcacatacaggtttgtctgtattttacactcattttgttccaggctataagactactggaaatccttaattacaactctattttttttttcagacataaaaataaatggcgtacaaatttatcctaagatattaagatgttttgtgcaagctcttcattttattttttaaactgcatttttctatgattaagacatttattgtagtaatcttattaaatatatgaataaatgagaaaataataataaggggtgattttaaaaaatcactcaaatgtccatagtcagaaacaaccactgttagcatttgggtatatttatccctggcttttctccaaataattataaggaaaaacgatagcttaaattcttactgtactgaaattcacactgttaaggcacttaactgtgtgtcaagtgctgtgataaatttttaaaaatattttatgtatatagtatttttaatcaatattttattttattttattttattttattttttgagactgagtttcactctttgttgcccaggctggagtgcagtggcacaatctggactcactgcaacctccgactcccgggttcaagcgattctcctgtctcagcctcccgagtagctgggattacaagtgcctgccaccacccctggctaatttttggatttttagtagagacaggatttcaccgtgttggccaggctggtctcgaactcctgacttcatgatccacctccacctcggcctcccaaagtgctgggattacaggcgtgagccaccgcgcccagcctggagggggctctgatttgtaatgtgtcacttgggggacagtagggctaatgcaaaaaaagagagaagtatagaagaaagggtgctttatcataaacaaatgagttaaaatgcaaagcagaaaattatgaaattaagtatgataaatctgcatgatagcattattttacaggcattaaaattaagctttggaatgcttcttaattgtatgggagatgttcataatatgatattaaatctaaagagcaggagacatcaatcttagctactcaggaggctgaggcaagagaatcgcttgaacccaggaggcaagggttgcagggagctgagatcgcaccactgcactccaccctgggggacagagcgaaactctgtctcaaaaaaaaaaaaaaagaaaaagaaatcagagccctttactcctctggcggtttcgactgcctgccggaactggcctccattctctctggattcctcctctcccacctgctgttctcttgtccccgaagtgagtcccagaacagccaaggctctggtaagggtgtaggacggagcagaagggagctggaaaaacacgatagtaaaagaaagtcaggagaaaatccgggtggaaagacgagagggagagctagagctcagagttccagaaaggaaagtgtgccgtcaccgcctcatcataaaagccatccacaacttccttccatgaggctcactgagaacagcggcaccaagacacaaccaggaactgccccaggagtgacttcacgagcagtttattcattgcaattgttctcatggtgataaagaaaaagtaccaggagatggatcctggactggaaggtcagagaagcctccctgaaaaggtggcatctaagctgaggctgtgaatgctgagcagaagttagcccgtggccaggggaggtcagaggctggagtaagaggtgggcgctgcaggaaccgagtaaggaaggactcgtgcattacaggaagggggagaaatgctctgcccatgggatgtggtgaagggtgagcggagatggagtaaagaactgcatctggccgggtgcagcggctcaggcctataatcccagcactttgggaggctgaggcgggcggatcatgaggtcaggagttcaagaccagcctggcctacacggtgaaaccccgactctactaaaaatacaaaacttagctggacgtggtggcgcatgcctgtaatcccagctactcgggaggctgaggcaggagaattgcttgaactgaggaggtggagtttgcagtgagctgagattgcactgctgtactccagcctgggcgacagagcgagactccgtctcaaaaaaaaaaaaaaaaaaaaaaaaaaaggctttcaacagcattacagagtctgtgttcttttgattgttaacctctttttttttcctacctttagttttctccagggtgttttcacgcaattggaagattatttggcctctttctgaacaatgtccagctgggtcccagccttacagagaagctatgtttggaattagcaaacacaagcattcggaatctgtctctgagtaacagccagctgtccaccaccagcaatacaactttcttgggactaaagtggacaaatctcactatgctcgatctttcctacaacaacttaaatgtggttggtaacgattcctttgcttggcttccacaactagaatatttcttcctagagtataataatatacagcatttgttttctcactctttgcacgggcttttcaatgtgaggtacctgaatttgaaacggtcttttactaaacaaagtatttcccttgcctcactccccaagattgatgatttttcttttcagtggctaaaatgtttggagcaccttaacatggaagataatgatattccaggcataaaaagcaatatgttcacaggattgataaacctgaaatacttaagtctatccaactcctttacaagtttgcgaactttgacaaatgaaacatttgtatcacttgctcattctcccttacacatactcaacctaaccaagaataaaatctcaaaaatagagagtgatgctttctcttggttgggccacctagaagtacttgacctgggccttaatgaaattgggcaagaactcacaggccaggaatggagaggtctagaaaatattttcgaaatctatctttcctacaacaagtacctgcagctgactaggaactcctttgccttggtcccaagccttcaacgactgatgctccgaagggtggcccttaaaaatgtggatagctctccttcaccattccagcctcttcgtaacttgaccattctggatctaagcaacaacaacatagccaacataaatgatgacatgttggagggtcttgagaaactagaaattctcgatttgcagcataacaacttagcacggctctggaaacacgcaaaccctggtggtcccatttatttcctaaagggtctgtctcacctccacatccttaacttggagtccaacggctttgacgagatcccagttgaggtcttcaaggatttatttgaactaaagatcatcgatttaggattgaataatttaaacacacttccagcatctgtctttaataatcaggtgtctctaaagtcattgaaccttcagaagaatctcataacatccgttgagaagaaggttttcgggccagctttcaggaacctgactgagttagatatgcgctttaatccctttgattgcacgtgtgaaagtattgcctggtttgttaattggattaacgagacccataccaacatccctgagctgtcaagccactacctttgcaacactccacctcactatcatgggttcccagtgagactttttgatacatcatcttgcaaagacagtgccccctttgaactctttttcatgatcaataccagtatcctgttgatttttatctttattgtacttctcatccactttgagggctggaggatatctttttattggaatgtttcagtacatcgagttcttggtttcaaagaaatagacagacagacagaacagtttgaatatgcagcatatataattcatgcctataaagataaggattgggtctgggaacatttctcttcaatggaaaaggaagaccaatctctcaaattttgtctggaagaaagggactttgaggcgggtgtttttgaactagaagcaattgttaacagcatcaaaagaagcagaaaaattatttttgttataacacaccatctattaaaagacccattatgcaaaaggtaggtaaacattgtgaaattttaagtgtgtacttgcttttcaattaaatttctttttttttttttgagatggagtcctgctctgttgcccaggctggagtgcagtggtgtgatctcagcttactgcagcctccacctcctgggttcaagtaattctcctgcctcagcctctcaagtagttgggattacaggcacgcgccaccaagcctggctaatttttgtatttttattagagatggggtttcaccgtgttggccaggcttatcttgaactcctggcctcaggtgagcttcaattaaacttttaaatattaccaatattactcacaactcaaagaatttttaaaataaaattaagaaaaaaaaaacctgagtttcagtaacagtttaaactctacagagtatttttaaatagtattgcttctggctgttaaaaaccgtatattaattcttcaatacatttttttacttagattcaaggtacatcatgcagttcaacaagctattgaacaaaatctggattccattatattggttttccttgaggagattccagattataaactgaaccatgcactctgtttgcgaagaggaatgtttaaatctcactgcatcttgaactggccagttcagaaagaacggataggtgcctttcgtcataaattgcaagtagcacttggatccaaaaactctgtacattaaatttatttaaatattcaattagcaaaggagaaactttctcaatttaaaaagttctatggcaaatttaagttttccataaaggtgttataatttgtttattcatatttgtaaatgattatattctatcacaattacatctcttctaggaaaatgtgtctccttatttcaggcctatttttgacaattgacttaattttacccaaaataaaacatataagcacgtaagaacattgtctactgattaatatacaatcagccactgagcctatgacagcttaaggagtttgaaaacattcctcattttaagaaaagttagaggtatatgagggtttgtgatgatctttttgtattttggatgcacttagaatgaaagataattgtttcaatgggtataatgctatttcctttgtaaaagagtaaaatatatacccatatttttaacaagtttaattacagtattttttcaatggaaaaactttgtattttagtaagtacttgtctcagtgttgactttgttaaatgttaaatattttttaatatacatacccaagggcagaaaacatttgcaattcatttttattagttaatgagatgattatttgaatgaatattgacttgtattttcctgagattatgagtttctgctgtgggagggtggaaacaattctcttactaaaagtattgtaggcaggcttgctttctgaaggctaatcactatttggctttgtggaaacagaactttcctcccatggtcacagactcaggagatggcgttggcaaaatcacttggtcccactgggattctttgactcctgatcttgaaaattatgataataaatgcatcttagatattcctatgtaattagtgatgatgatcgctgtataatatattcaaaggaatgtattattttaccataaaataatgtgctacgcataaggtagtccttatctagaaagactatttttatttttgtttttttgtttgtttgttttttatttgtttgtttttgagacagagtctggctctgtcgcccaggctggagttcagtggtccaacctcggcccaccgcaacctccacctctgagttcaagctattctcctgcctcagccacccgagtagctgggattacaggcacatgccaccatgcctggctaatttttgtatttttagtagagatggggtttcaccatgttggccaggctggtcttgaactcctgacctcaagtgatcctctcgccttggcctcccaaagtgctaggattacaggtgtgagccaccgcgccccgcctttttattttgttttacaatacaacaaaaaatttttagttttacaataaaagagaatctgattattggaaatagacctgaatagctttttgaaatatttatagttctagtatttaaagagaaacctgaaattataaagctgagttaatttctatacctgaaatgttcatttgtctgctgaattcagggagcatttgagatgtcacattttggaactttgatttaaatagttcagtattcccaaggctgagttccatgaccctggaatgagaaatatccactgtacctctggttctgaagagtctatagtcggccaacactgtgaatgtgtggaggactaattgtcactttcatgttatttgccaccctgacagctgagacactgcttttcagcattttagttaagatttgctttttaactgtgcaataatcattttattttggcattataaaataaaaatcacaacttctgcttttcttatatgctttgtgtgttatcacacaaatattctcaaatattcataagatattttaaataaatcattgtgaattagtcaatatatcaagttgcttaatatgtcatatatcaatgctatttaatatataatatctatatttaatatattgatatgttactggtggagagtgtccaggttcttggtgctttgaacaaggaattggacaaaatgcacaaagaatgaggcgacaaaagcagaggtttattgaaaacgaaagcacaccccgcagggtgggagcggcccgagcaagcagctcaaaagccgggttacaggattttctggggtttaaatactctctagaggtttccattggttacttggtttatgccctatgtaaatgaagaggctaaagtgaaattacaaagttatttacttgttgtgcaccctacgcaaatgaatagctgtcacagctgaggtagagttacagtgatttacttggtggtagaatgttgggatttttccatttgattgagttctaggaagcctttagtttccctgcctgcagaccccattctcctgcctcagatatatcaatgacatattcaatacatcattaagttgcttaatatttaagaggttaagatgcacaggtaatgacctctaaatgaatgccaataaaaatagtaaaaggtgtaaactctgactcctatctgacctaggtaggaagtaacatccagaacttctgcaggctgtcctgtgtaattgttctccggaggaacccttgtccctggggtttgagagaaggggatcgaggaaaaggatgtttgtctgagctcttgtttgatttgcccaagtgacttgacttgtttgaatcctctcagggtgccatcatgtaatctgtccactccaacttcttcctgtttttcacattgcaaaacaaaacccaactgaatcgacactgagtttaaaataaatcttggtatttaggttgtacctaaaaatgataacttttagactgtaatcagaggtagatgctatcaatttgttagtgaggaggggaggagttttcgatgccacttagtttacaatgtctaattgttcaaatatacatctaggttgtaaaggagactcaacggtaagttatagtgaccattgaaaaatgtaaaggggcttcaaatcaagaacttagaaggaatttcttgcaatctattgagacacaaagcagatgagtggttgtctgggcctaggaacaggaatggggagtggctgcaaataggtggaagagaccttttttgggtgatgaaagtgctctataattgggttatggtaataattgtacaactatgtaaatttactgaaagtcattgagttggacacttaaaacaggtgaattttatgatatgtaaattatatattcacaaagccattaaaaattgtattttttgagcagctacaggtgcctagccctgtgttaactactatggtgaacagtaggatgggatttagaggtgtgggcaatacaagctgggtggaaagggatttccaaagatggacctgggcagggaggactccacagaggagacccagccccttccaaggtgggtgagatttcaatgagtggagaagaagatggcagaatgaacagcaagagagaagttcatgagggagacatgaacttggtgtcgggagatagtggggtgccgaaggggatggaaccaggctgcagagagcatggcagagatgtttagatgcaatgttttgaaattgtgactttatgggtttaaactgccaaacccagacatcatgatgaaattccctcctgggatctatgccttagatttaggtgtcagccagttaaacagaggaacatagactataacttcacagtccaaagccaggctggctctcacataacaaaaggggctttaagcacttttttcccctataaacatatacatctgtgttaaaataacaaaggacaatcactcattagttactaattacactaggtgacatattagccactcttggctcttgcaactctctagccttgctccactgtcctgtttatgggagaaaacagttgtgccatgtggctattttcacaaaccattctttattctttgtgtgcattgggcaagagtcatcagacttttcaatggtggaactcttccacttttgtttgaggacttctgggtagacagggttggcttatttagcttccttttctcttaggtcagttccccaggaaacaggttttgggatggaggtttgcatgaaggaagtttcaggggtgctctgatttataagtgagtgaaataagctggatcgggaagagagagaataattaactctgatgcaattcacaattgcagctgagttcttagccagccccatggggagctctggagctggaatgaccctagagaattgggagaaatctaggcaaaggggctggacccctctccatgccctcacatcaaccagtcacagacacaggcagccccagggaggaagtgtgaccttaagtaaaatgttttgccaaaagaaattcaagggcaggtgcagtggctcaaacctgtaatcccagcactttgggaggtggaggcaggcagatcacctggggttgggagttagagaccagcctcaccaacatggagaaaccccgttctaataaaaatacaaaattagccgggcgtggtggcgtgtgcctgtaatcctagctacttgggaggctgaggcaggagaatgcagtgagccgagattgtgccactgcactccagcctgggcaacaagagcaaaactctgtcaaaaaaaaaaaaaagagagaaagagataaaggaaaggaagaaagaaagaaaggaagaaagaaagaaaaaaaagaaaggaagatgaaagaaagaaagaaaagaaagaaaaattcaaggagaaggccacagttgtgaaccgtcagaagcgaactcactgtgcagctggaggaataagtgcctggatcctgagagcagagctccctgtaaaatggcctttgcaaaaattgttaacagtgagaaagttatgatattgaagggatctgacctaatcaactccatcttgcttctagtcttgtttatttctgggtgcaggcaaactaactttgggaagaacttagttcatagtttaacttcgaaacaaagatggtaacttccctttcccaaaacaaacctccttcttgccagggaaccagactgcctttgtaggaccaacaaattagccacaaggtttataacttccttaattactcctgcagacaacatcactattttagaatgtaagattggcctttcaagatgtcttttcaagtttttgcatttccgataaataacggctcgacccacctgccaacaagttctgtagctccacctaggaaccagctcagtgtaagaggacagctttggctccctatgagttcatctcccacccaaccagtcagcacttcccattccccagcccctacccaccaaactatccttaaaaaaccctagtctcaaggccaggtgtggtggctcatgcctgtaatcccagcactttgggaggctgaggcgggtggatcacttgaggtcaggagttcgagaccagcctgcccaacatggtgaaaccctgtctctactaaaaacacaaaaaaattagcttggtgtggtggtgggctcctgtaatcccagctactcaggaggctgaggcaggagaatcgcttgaacccaggagacggaggttgtagtgagccgagattgtgccactgcactccagcctgggcaacagagcaagactccgtctcagaaaacaaaaacaaaaaaaaaccctagtctaccaattttcggggagactgatttgagtaataaaacaccagtcttctgttcagctgggtctgtatgaattaaacttttctctattgcaaatcccctgtcttgataaattagctctgtctgggcagcagagagatacttgttggtggttacacctgtttcactacaacacccaccacgccttttcaggtacttaagaattaaaagggcaggtgcaatggctcattgtaattccagcattttgggaggccaaggtgagaggattgcttgaggccagaagtttgagaccagcctgggcaacacagcaagactctgtctctacaaaaaatttagaaattagtttgacgaggtggtatgagcctgtagttgcagcaacttgggaagctaagctgggagaattgcccgaggccaggagtttgaggctacagtgagctatgatcatgccactgcactccagcctgggtaacagaatgagaccctataaccacccaatgggtgtatcttgcctgctgcccagatagagctgactggaaaatttaaagaacaatttgatgagggcgggcggtggcacagagaatggggaatgctgattggttggacgagagagaaaatcatgcggagttgaagctgtccttttggactgagtcggctcttgggtgggagccacaagaccaagtgagcccgtttatggatctgcgtggtgccaggagatccatcaactgcagggtctgaaaaatacctcaaacatcaatgttaggttgtataacgctgtgttattcataggagcaattgaggaggctagcgatcttgtggcctctggccgcgtgattccagagccgtcacttctaatcttgtggctgacttgttagttttacaaaggcagtctggtccccaggcaagaagggggtttatcttaggaaagggctaccgtccttgtctaaagtcagttcggcctatgcccaggagtgaacaagggcagcctggaggtcagaagcaagatggagtcggttaggtcaggtctctctcactgtcgtagctttctctctgctataatttttgcaaaggtggtttcaaggctctgcctctaaaattgaaacaagaattaaaatatacagagctcggctggtttgggcactaatgcaagcttccaaagcttcaaacatttttttcttttttaaataaggtctccttcaaaaattctgagaaataaatgacttcatgaagagccaatgttttgtgtttttttaaacaaacaaggatgttttcacagtgttaatgtcctccagtcaaagacaacgaacacacccgcagttaaagaagttggggttgcgtcgttgcagtgaggaaggaaacacaccatggggtatctgagtaagaagggggttgaaaaatcctattatataggatttgggcttaggatgggtaaattcaggaagaggagactagaacagggataaagctgtaaaagaaacagcgatcactggccagatgtggtggttcatgcctgtaatcccagcactttgggaggccaaggtgggtggatcacttgaggtcaggagttggagaccagcctggccaacatagtaaaaacccatctctactaaaaataaaaaattagccgggcgtagtggcacgtgcctgtaatcccagctactcgggaggctgaggcaggagaatcgcttgaacctgggaggtggaggttgcagtgagccgagatcacgccattgcgctccagcttgggcaacaagagcagaaatccgtctcaaaaaaaaaaagaaagaaagaaagaaaaaaaagaaaagaaagaaagaaacagcaatcactgagctgagagaggagtgtttacggtattttgagggtggcacagtgaccttatttttgtctggactcagacaaaattatgacgtggtggtgcttcgtgtcgctttctagtacagagcagtcttgcggaggctggtatgtggtgagtgtgtctgtgtcccacgggagaggagcgcaccagccccgtgggtggccggctgctcccgcacccgccccgtgggtgcccggctgctcctgcgcatcaaggcccgctcccttgttttccttcccaactcccttcacgtggagatcttcttggctccttgcagagatctctctctctctctctctctttttttttttttttttttatctgagtgagtacttggtagaaagggacagaagctcaaagttgtttaggcaaaaaggaggcacgtttgtgggacagcccaacccggaaggggagctggaaaggggctctgacatcaccacgcggtgtgtgcctctctctgcatgacggcggcatcggtttgcacggtttgcccaggatctccgaggctgccatttcccatcaacaaggcactagacctctttcctagtgtggtttccaaaacctcaggacaggcctctgcgtggtctagctggggatagatgtccacgtttgtggccatgggagtagggtgccggggttggcagcacccactagaaccacatggagagaatggcaggaggaatggcccccacaaaacaagtcaatgctatttcccaaagaggggagccaggcagcaaagcagggtatgtccaccctatgagccatgaggagctggtctgctggacaagctggactcgtaaagtcctatcagaaacctcccttgttctttcttcctcaaaactctctttttttttcatcctgccatttggctgaagcctctggcttattagagggcttatcagacacacttagatagcacaaagcatggcccagcatcctggtgcaaaactcccgtcctgtagtaataaagcacaaaccctttcccagttggagatttcctcttctctgtccgaggcccactgcagcctgctggacgcccgcatccgggactggcgtggtgttgacttcctttggctccacactccccctgctctttcacctgctacctggggctctgagcatctccaggatctgaggggttcagcacgcagaaggagagagataaaagacagagaagcctttacttggtgggcacaggtaccatctggcccggggcctttggcagcataatgctgaggtgctgcctctttctttcctgaatgcttttgtcatttcttcagaaatccagcttcttcccttgcagcagaactcacaggctctggttagccactcccagcacaggttcatccatgctgctaggatggaataaaatgaatccaaagctttccattggcctgtcccaatccaggttccaaattctctcctgctatggcttcatacatctaaggcattgactggtgttcctcactagtgttgtaagataacatctcgtgaaaggggtccctgccaaagggatgtgggaaagatggtatactaccttctcctctcagaaatactcaatgcgtaccagcatattgaaaaactaagatgccggctataaagaaagctatttaaccttcattactgagtcagttgccaaaccaacttgattatagaacgcttctagtggtaactgttatcagcatcgtgacaaaggcatgttctgcatagcacaattttgggaacactctaggtaaacttaattattctagttctagcacctcctaagaaattctccttttcataccttgcccaccttagatgtcacagtttgttttttattgccttctcctccacttttgcacccattttttttttttgagatagcatcttgctctgttgctcaggctggagtgcaatggcatgatctcggctcactgcaatcttgacctcctggactcaagtgatcctcccacctcagcctccccagtagccaggactacaggtgtacaccactacacccggctaatttttttgatttttagtagagatgagttctcactatattgcccaggctggtcttgaactcctggcctcaagcgatcttcccacctcagcctcccaaagtgctgggattacaggtgtgagccacttaacccaccctgcactcattttttttaaagcttcagttaaatgccattcctgctggtcaatggctttagccagaattttggcagcactttcttcccctccttttcaagcctcagatgtggatgccccagattttggatgggccagcgcatgaggtggggaagctcaaataccagaccaaggaagtgagttagtggaaatgaggagccataaagatgcttttatggtggaaggagcatgggttgaagagctgggttttaggaagagtgagatagtgggatcgattaggaacagactgaagttcttgagatgcccctatttacataggacaagttcagattgaggcagaaaaatagggtctggaggcagggaatataagcccaattcagacttcagctgtgacaggaaatatcctctccacagagcctatgttgtaaatgactttgtaactttacttcaaactctccatttacatagggcataccccaagtaaccagtggaatcctctagcgggtatttaaactcccaaaaattatgtaacagggcctttgagcccctatgctcaggccgctcccacactgtggcgtgtactttctttctttcttttttttttgagacggagcttcactcttgttgctcaggctggagtgcagtggcgcgatctcggctgactgcaacctctgcctcccgggttcaagcgattctcttgcctcagcctccttagtagctgggattacaggcgcctaccaccatgcccagctaattttttgtatttttagtagagacggggtttcactatgttggccaggctggtctcgaactcctgatctcaggcgatccacccacctcagcctcccaaagtgctgggattacaggcatgaggcactgcgcccggctccgtgctttcattttcaataaaacccttcattccttccttgctttgtttgtgtgttttttccaattctttgttcaagacgcgaagaacctggacaccctccaccattaacatattgaactagtgtgaccttcaagacccttcgcagctgggtcgagtttatctccctgcttgattttgtttggttttgttttaccacatctcctatgcttggtgccatcacccctgactgctctgtgtcctcgcccatcacggtcgtggctctttgctcctccctctgcaagcagcggcccctcctctcctctccagtgggacagagccaactctgtgagaatccgtccttcatagcgctgccctttccgtcttgcaggatgaatcgcttcattactcaggtgtccatcatactttatccatgcccttagtctaaaagcatactgtgttgcagacactgttataggatcggactctgtcctgagcccttggaataggatagaactttgaacacagagagctccatcatactcatcttggtatccccactatctagaagggtgactggaccatcgtaatttgtcaaagaagaagctgttggaaaagtaaatgttagattgaagttgtggcaggaggtaaagaaagggaataggcacatgagattgtgtggaaatacacttttaccaccagcaaatttcatctccagtagctctgtttctgagaatgaaaacaaacaagagaaacaggatgctccggcgttccctccagcctcctccagctctgcaatccctactccaagaacatgccagcactccaggaagaacggtgtggggttctaggtccccacttaaaaccttagtttatattctaagttttttttgtgatcttgttctcttttttttcttgcttcatgtgtgaccattccctcatacttacatagtgcctgacacagagtaggaattcacaaacgtttgccaatggaataattaaaggattattgaatgaatacactctgaacaacattgtagctctctatgacagcagggagaaatcctctcagttctccaagtgtgcctcaccctttcaaatttctatccatttgtggggttctgttttcactgctctgttctctcctttccttggctacatcttgcagttgcagggttagatctggtgtccacttctcctagaagccttcctaaacacaccttgggatgactgttagcgaggcctttaccctgtgcgaagggccttggttaggaaggacgtaatcttgtgaacagagtgagtgcccgtaagtgtgcgacctggagatccaccgtgccagtgcaaggatctgcacacctcctggggggaggcggggctttgccttggccaccatgtgactttgaagggagttctcagttgcggcctcttttccagtctgctactttgctgaaaatcgcccttcttcagagcaagggagtttaaagagctgttcttcttcaggttgttttggtttcaagcaatttccactgggacgagcactgggtccagtgagctcgtccttcctcagagaaaccctattacgtacccagtgatgagaaacagaaggcccctgcagactgcctcgatcacagttcaaccccactcctggcagcttagtgattctgcagcttcctcccatgtcatccatctctgctggctcatgtgtcatggtctggccttaaagtatgtggtcctaatatcagatcccagcttagaagagaggggaggaaacggcactgcccctcgcctcaccctccctccttagggagcccctggtgatttctgagcaaaattgtagagtgtataaactgggagggtgtattgaagggatggctcaggactgtggttagaaaattgaccttctttttaatcttggcacagtggattttgagtattgtactttcaaataacttccaggaggtgtcataaggtgtgctccaaactttaaggagagtctccccagttccatgctctgttgttcatcttcctcctctccctcttctctctctttttatctaccttcaatctcctttccctccacttctgctctccctgaattgtgccccagtctagagacatgcttagcaggagaacacaaactctgggggaatggatatgtctaaagtctgtgtgcatcgctgttcttcttgtgttttatgagcctcttaccaaagcactctatgatataacattggcatgtcatccagaaatacaaaggctggctttgagaaggtctctcgccgtctcttgaatgatagcatttgaaatggtgaaggaagtgctccgtgcatgcattccattaacagagcatagaggtgctgtaaatcggtagctgcccttttagtctaataacaatggacagtcagactcttcactggagctcccaactacagcagacactgccagtcacctgcccaacagacacccacacctcgcaccctttcttggtttaggggtgctaattttgttcgggggcaacatattcggggaaagggatcccttctagccctagaaaaatagcattatttctctctctcttcctctttcttttctttcctttattgttattattattattatttttagacagggtgtcactctgttacccaggctggaagagtgcagtgacatgatctcagctcactgcagcctccacctcttgggcttaagtgatcctcctacctcagcctctggaagagctgggaagacaggcgtaagccaccatgcccagctaatttttttatatttgggctggacttgaactcccgggctcgacccatctgtcagcctcggcctcccaaagtgctgggattaaggcgggagccaccctgctccgtctatttctctttctgatggttagttcagctgtggacttttgacctggttatagccaatgggactcaattggaggggcttctggaaagcagtttgttctttaatgagagagggtgacctgagccgccttcttacctgggatgtagctatttatttatttatttttgagacagagtctcgctctgtcacccaggtgtgcaatggtgagatctcggctcactgcaccctccgcttcccgagttcaagcgattctcttgcctcagcctcccgagtagctgggattacaggcatgtgccaccatgcccggctaatttttgtatttttagtagagatggggtttcaccatgttgtctaggctggtctcaaactcctgacctcgtgatccgcccaccttggcctcccaaagtgctgggattacaggggtgagccaccgcgccctgccagatatagctatttaaagaaagatggctggtgctgagggtgacaccttggaaacaccaggaaacaagccatacaccctgacaatgtgtgactgaaagagaatgagcttgagtgtctctgacgtgggtaattcaccgcagcaatcccagaagcagtgaattgtgggcttcctaccctgtgagctacttaagcatcttgaatgctcaagctaaggccagcgagggatttccctgttctctgcagctgaatgtgcctcacctgcctccgtggtctggtcctccgcctgcatctgctatagtactcggggaacggggtcatggtccatcaggaatcgctgtgatgtaacactgcctttgatcactttaaaattgttcttattgttattttattttattttttgagacagtttccctcctgtcccccaggctggagtgcaatggcatgatctcggctgactgcaacctccgcctcccaggttcaggcttctcctgcctcagcctcccaagtagctgggattccaggtgtctgccaccacatccagcctaaaactgttcttattgttattttaatagttttccctcagtagaatcctgagcccgcaatcaaatagcaagaaaatttgcccgaggcttttttttttaattattatactttaagttttagggtacgtgtgcacaacgtgcaggttagttacatatgtatacatgtgccatgttggtgtgctgcacccattaacttgttatttaacattaggtatatatcctaatgctatccctcccccctccaccaccccacaacagtccccggtgtgtgatgttccccttcctgtgtccatgtgttctcattgttcaattcccacctatgagtgagaacatgcagtgtttggttttctgtccttgcgatagtttgctgagaatgatggtttccagcttcatccatgtccctacaaaggacatgaactgaggctttcatttattgtgtttatcactgaaaacaaatacatatttgttgcaaacaaattttgttcacattatacaaaaaggaataaacttggaagcaaatgtagctataatttccttctagatatttttctctagttattcaatgtaacctggggtcatatataacaaaaactaacatctactgagaatttgccaagtgctgtgctctgttccagtacttcacatgtgttagttaatgtaactcttacaaggcaccattcagataattacagccgaggaaactatagaacagagagaagtcttggtgttgtttagtggcaaagacagaccatgagcctacatagttcagacccacagtccattagtctgcaatgcctccctctagtgcttagtaaatgcttgttgaatcaacaaatgtttctcattgttcagaagtttgacatttttataataaaaattgacagtattttctttgtaaaataccgatgtcatgctaattgaggcgatttaacttcttaaacagattaatcaggttgttttaactttcaggtttccaaaacacatcttttcatagcaacatggtcataatttcctaatgctttctccatgatgtagccaagtgttattatacacatcagaaagacagttaatgaaattgttaatcaatgtaagcagaataattttatcacataaagcactactctgacatttcttttctttttgagatggagtttcactcttgttgcctaggttggagtgcaatggcgtgatctccgctcactgcaacctccgcctcccaggttcaagcaattctctggcctcagcctcccaagtagctgggattactggcatgtgccaccacgccctgctaattttgtatttttagtagagacagggtttctacatgttggtcaggctggtcttcaactcccaacctcaggcaatccgcccgcctcggcctcccgaagtgctgagattacaggcatgagccatcacgcctggccttaccctacatttctaattgtctatataaaatcattagaaagaaagattaactatttactgtatttactttcattgcctgatcctgcttgagccagaccacatcacctgaggcccatgttctaagaatgacatgctgctggtaattaacagagaagcctggccgcatctacaaaaggctgttgatggatgaacaatgggtacaaaggactggacaagttgctaagaatggcttatcacgtttgcaattatgggtcattttcaaaggaaggccctccaaagaaaaggacccactattctttcagtgtgccttcttcatggggctggctggtcagaatgctacacctactaccgtaaccaaggatgatacttcttccccaccaccaccatctcctttttatgattcttgcattctccctatagatttaaaacaattacgatgaccatttcaatttgtagccagttttttagagtgaatttacccactaaagactttcatagaggtacaagcaagatactatgatcttgaagtaccccaaaattaattaataccccaatcatggatctttcctaggattgccataacaaagtgctgggtggcttaaaacaacagaatttttttttttctcacagttctggaaatgggaagtcctcactgaggtgtttgtggggccctgtaggggaggagtcatccctgcctcttcttagcgtctggtagtggccatcagcctggagcacccttcggcttgcagctgcttcactccagcctctgcctctgtcatcctgtggtgctccccctgtgtgtctgtgcccacatctccctcttcttaagagtatacgcatcgtactggacaaggacccatcctactgacctcagcttaacttgattacatctgtgaagatcctatttccaaataagatcacattcacaagaactgggggtgggacttcaacacatcttctgggggcacacaactcaaatgtgcccacagctgggacacatgcagacacaccttagagacagaatgctttcaaggccaggatctggaagggtatgcagctgttctctagctttatttattattattattattattattattattattattattattattatttgagacggagtttcgctcttcttgcccaggctggagtgcaatggcacgatcttgactcaccgcaacatccgcttcctgggtccaagcgattcccctgcctcagcctcccaagtagctgggattacagggacccggcaccacacccagctaatttttgtatttgtagtagagatggggtttctccatgttggtcaggcgggtcttgacctcccgacttcaagtgatctgcctgcctcagcctcccaaagtgcttgtccatagaagagaagtggttattgagggaaacatggaaagatctagaaccagagagcccaagacagcggcatgaatgcaccactgttcaggaacagttgctcctgaaggagaagggtgctggactctaatggttaatgccccctgtatgtgaaccatatgattccttccctttgctttgattccacactcacctaacaaccattggaattaatttggtcctaaagggattcctcttatggggaaagagcagaggatggaacactgcatcagtgctttttttttttttttttttttgagacggagtctcgcattgtcacccaggctggagtgcagtggcgagatcttggctcactgcaagctccacctcccaggttcacgccattctcctgcctcagcctcccgagtagctgggactacaggcgcccaccaccacacccggctaattttttgtatttttagtagagacagggtttcaccgtgttagccaggatagtctcgatctcctgacctcctccgcccgctcggcctcccaaagtgctgggattacaggcgtgagccaccgcacccggccgcatcagtgctttgtgagtcagattagtggggctccacacagagacactggtcagctgtgaaggtgctgggcccatcagatttctgagtctgaaatatcaggaatcctgagttctggcagcaaacaagtgctacccccaaggatctaggtgagctgactcgaactttgctccacaatggccctcccttgctgttatttcaagttccatatgttcagattcaatggagcgactagccccttactcactgaaagcacatactctagaaataacttctatttgcattgaaagtgacctgatatattaaggatttaattactccatgaatcagaataagatccttgtaagatgaacaaaatctgtgggaaactgctttgcagtcctgaatgagtgctacatgaaaacagtccagtgttcggagggaacgtccagacttctgaggctacctggtgagtgctgcagaaggggaacaagggagcacgagaaaagttcatggttcaacagcagcctgttcctggtgtctctgcgttgtgacggagttggcactgcttccctggtttgcccccaaccctctccctcttgttaccattgctgctctcagaggtgtctgttcttaattccctttttctctcattttgattcttcgctgtgtgctggtgcttcacacgctgacgactgcgtgctctcgcctctccgaacatccaagggcctttaaaatctcaccctagtcacccatgtctcttacttcccttaggcacacaaatgctctgctgtccccaagcgaatgttgaccacgatggctgccatcacctgtgcttgtcttccagggcactcacgggacactcagcatatgacgtgaagcagattattccatgctctgggaagagaaccgctctttctttgcatgtctgtgcttaatgcaatcttgaagcagacaagtgcccagtacatgttggtggcagttagatgtagaaaagggatcatgacagaagacttgttaactgcctccaaataacgcaaaacttagcattacctggaagtttaccgtggctcagactccagtttgataacttacaaaagattcaagtatataagcatgaatgtcagtttattcactgccagacttaattcatctcttttccctaccccacatcaggaaatgtatctcctgagatcctctcctgaatattaatggacaaactccatcaatatctcattactatttttttgacacagggtctcactctactgcccaggctggaatgcagtggtgcgatcacggctcactccaggcccaagcgatcacctcagcctcccgagtacctgggactacaggcatgcgccaccaggcccggcattttttttttttttaaatatttgtagagatggggtctccctatgttgttgcccaggctggcctggaactcctgggctcaagccatcctcccacctcccaatcccggtgctgggattacaggtatgagccaccgagcctggctgcagtatcttattttttaactctgttcaacactgaccccacacccctttagatgctcgcacctatacgctctacctttcacacatatttttcagattaagcaaaatacaatttattccactgaatagaaaacgttgccttccatatctgtctttgaatttgtagtcgttccgattataatttgagttctcaaacatttgaattacacagtctcttggttcactccgacaggtgtttaaacaggtgtgcgtaggtctttctacttcagctctcagagccggtcttgtttgcaggttagtgggtggcgcacctcgcggttgctcccaccccacccttagtaacagggtttgagtaggaccctggggtgggggagtggatgctgctgtttcaagctcgttcgcccaaatacatctttctacccaccttccctatcgtcagagaggtggcctgaccccagcacgtgcaagcttgtcaggctgggtaagttccagaaccttctggagccaggattctctttcccagccctgggccctgagctcggcggatgggatctgcgaggctcggggcgcaggggaaatgggggcgtgttcctttaaggcggaaccaggcggggagtgggacgtcccccgcgggcacagcccgagccgcacctggggcccaattagcctggagcgcggccgggtgtgttgaacgtagcaaccgcgggcggcgggcggcgggcggcgggcgtctggggcgggcggcggccgcgcttcccggggctcctggcccttcggccctcgggggtctcacggcgctgggacgaggcggggctgctctccgcagccggggcgctcggcggacggacccgggccggggaagggcgaccccagcggcgcggagctgagcgtcctcggggaggagagggagccaggggcctccggggctccgggtgcggggacctcaggctcctcgccccggcccgggccgcctcggccggatctccgcggtctgaactctcgggcggcggcgaggacggcgtgtccactgtcgaggcatgaaggctgctgtgctggaccttgggtctctcttggccaaactcttcgagacctcgacggcgccccccgcaggcccctcctccagaccctcgggaggtgctgccgctgcagggtcggggggctccagggcgggcaccccgttgggtaccgccccgaccctcctccgcgccctggctccggactccccctccgcctcgcggcggtcgcccgccccgctgctctcctccccctactcccggggctccgccgccagccgcgccgcgggagcagtggggaccctgctctcttggcccagtagccctagagcgggtaaagccccgccccagccccccactccctccggcgggggctgctcccctgctcgcctggtggtcccagcgcggccgccctcgggccccggcggggtctgggccgcgctccccaggaacccgctccagcctggccccggagagcgagagctcggcgcctgcgtggcccccggggctggccccagaaccctgttccttacgctgcctgacatcggcgaggagggggcctcggacggcgactccggggatggcgaagcgtgagtagcagcgtggtccgggcgcgtgtaccttttgccgggacccccgacccctccgcctgccgcactcaccttcgcaggtgcacttcaggaaatgaaatatttgtagtaactttcataaccccctgggcaccctccttgcacgtttcctgggtttttactccttggctttgcgggctttcagacataagctgtgacatgctttgtccagctttctcagagtgaatcctaaggggccttgaaggaagggacagaattttgtttctcttctaccagaagcattgctacttagagtgtttgtttggttttcttaaggactttttgaagtccctttctttgtctcagaatatagcaggtgtgcagggaaaccgaatacacacgtctgcagcaagtgttttaagaagtggtgagacctggtgctttcctaatgtctaaggaccagtccctagtcttatcctaagtgggatgggtctcctttgtgtgacatctagttaatttacatatgcatgacatcatctgacacaaatggagttgtaatggccaggacacgtctgattattaccctagagctcctgagagctttccacagtgccctgagtcactgcagaaacgttgacttcatgggaacattttcactgggaatcggaggccgattccctcaacacacacacacccacacaacacccctttcacttccaagagtcgtgataaaaacattgctcttttaaaatgtgttttagaactaggatgaattttaatttttagagtggagcatatcgttagctattcttgagtgggtaaattttcatcctgaatgctgcaaagaaatagtgaaatggtcaaagacagatgagccaattcacagactgaggtttctgcattgtaatctagtgaggccattccctactccctccaaaaaatcctgagtaatttttgcattcatactgatcctgactcactcacaatttaaataattacagtttcacaaaattgaatgatattcatgtcaatatgaaaacaagcggccgggcacggtggctcacgcctgtaatcccagcactttgggaggccgaggcgggcggatcatgaggtcaggagatcgagaccatcctggctaacacgatgaaaccccgtctctactaaaaatacaaaaaattagccgggcgtggtggtacgtgcctgtagtcccagctactcggaaggctgaggcaagaggatgatggcgtgaacccgggaggcggagcttgcagtgagccaagatcgcaccattgcgctccaacctgggcgacagagagagagactccgtctcaaaaaaacaacaacaaaaaagaaaataagcagttaagcaaaaagttgttcccactcattaaaaaatactatattatgacatatgtttatcaactgatagttttccctatcagttaattgcttttggaaaactcactggaatacatatgcctgaggaattagatctttgttattggcaactggtccttaacatttatgcaattaatgttttatgagcaaacagatctacacactgaccttaaactctagtcttagtgcttttaacaaataggcactgaaatatgcagcatggccagtgaaactggtgttagtttcaattcttgaacatattagctcatgtttatattgtgcaaatatttggaatagatactttttgaataacactgcatttggcattatttacataagagattattctgaattaacaaatgcattcaattttatggacagtgaagaaattgaatttttaaattattattactttttgagatgaggtctccttctgtcacccaggttggagtgcagtggtatgatcactgttcattgcagcctcaacctcccaggctcaagcgatctgattctcccgtctcagactctcgagtagctgggactacaggtgtgagctactatgcctggccaattttaaaaatgtttctgtggagacggggtctccctatgttgcccaggctggtcttgaactcctggcctcaagcaatcttcccacctgggcattgctgggattacaggcatgagccactgcatctggccatgaaattgaattttaggtaagtgccatgagaagtaatatacacagctaggtgctttgcagaatcctcctgagtttgtgtgttcctactgtctgcagcagcaggtagaggcacacacaggcaggaagcagactggccctctgagcataccatttttcctttcagatccacgactactcacattcccttcctctcatcataccccactcctttttcaatcactaaaacataagagacaaaggggaaggaagaaagtattaagacggcttttctttcaatactgcagactttgcaccttgaaggattctttttccctcctggatttctgtggtagtgatttataacaccgaataaacaaacataagacaatgaatttaaatttgctcctaccatctcatctgtcacttggcagatagctgctgctgttagcctgtgtggttaatattaaaatcaggaatttaaatttcaaaagcctggaaacttggaaagggagaaatgggtaatgtcagagaaaaagtttaaagagtgatgagaatgtgaatacatataaaggaaaccgtaaacctgtctgcaagaaatgcggatctaattttaaagctgtggccctgagttctaaaggaaaaccctattagcagtttgtacttttttgacaataacgcatacattttacatttgcctgattctgtacttggctttaaaaaaaaaaaacaaaaaactaaaagtagtgaaattaacttgagtaggaaaatatgcaaactctcctgcaatttagaggcttttttccaagcaaagatgctgaatagcagcaggggtttttaatctctgacccaagaattccgtaagtgaaaggcccatggaacagaggctgccccttttgctccacagggcgtactgactgcacatctgagccagaggcagaggatactgatctctctgtcttcacctcactttcctgcatccctggatacgtgatccaacacctttgatcttcaccttggcttccctgtccatttcatgtatatattatgcctcagtgtttttcagtctcactcatccctcttcattacctcttttcatacttctggtttgaaccacacaatacaccttgtaaaggtcttattctcaatctctggtttttttttttttttgagacggagtcttgctctgtcgcccaggctggagtgcagtggcgcgatctcggctcactgcaagctccgcctcctgggttcacgccattctcctgcctcagcctcccgagtagctgggactgcaggtgcctgccaccacgcccggctaattttttgtatttttagtagagaaggggtttcaccatgttagccaggatggtctcgatctcctgaccttgtaatttgcccgcctcggcctcccgaagtgctgggattacaggcttgagccaccgcgcccggccggtcttattctcttatttgttctgcaaatgtaagaattcctagcaatacgtaaggtggatagatagataattgctgtgtatgaatgttggtagagtgtaaacttctagtcaggaagtatttatagcttgtataagtcatagttattagcaagcatatattcactctttttttttttgagtgattgagttccattgttaaaatcacattactgtggaaacattgcagtggctgcttgaagggcctgtcagcatggctggcagtaaagtgactagagggacttatctcgattcctctgacactgaggcagcctccagtgtgatgaagcctgtagacccggaaaccagacgaggtggattccacctcaaaccgattgctagctgagtaattctgggcaggtcattcatttcttccctagctgtagtttttctttcttgataatatggaggtgataatactttctgcatagaagtgctccagaaattaattgaaataataagtaatatatggagaaatgctaaaaaagtgttatctatgattactacctgcttcttggcacagaaatgaaaattgagagccatgttttattgaaagaaacattctaggtgaagaaaaaacagagaaaaatgattcattatatttaccatgtggctgtaataaatggtgtcttttagttcagttatttgggagaacaaattatagtacatgccaatctttcatcattaccttccctgcatgacttacagaagataagggttagtttaattaacattaccactgagtgctgtgtaacacccagaaggaaatgcatttaccactctgggatcaaacttttaatctgcagaataatcagtagcatcacaaatcatacatttgtgtagcccttgtcttttcctccactgaaaccctgtgatttatattcacatcttatgtccattatcagactataaactctttgtcctgtgacacttaagggaacacatgcccataaaagacatttagcaaatatttattgaatggatgaagaaaatattttcttcctcatataatccactgtcatgggtttctaatcttacaacaacccaggggcagtttaaatgtctttcttgaagaataattattgtcttaggtctttttgtttcatcgtcttgagtttttccaaagttagtaatgcttgctgctgggacttagcatttcctcagggatgaacggtggctcagtgtacaattgtcatataagcgttactttctttttttttttttattatactttaagttttagggtacatgtgcacattgtgcaggttagttacatatgtatacatgtgccatgctggtgcgctgcacccactaactcgtcatctagcattaggtatatctcccaatgctatccctcccccctcccccaaccccaccacagtccccagagtgtgatattccccttcctgtgtccatgtgatctcattgttcaattcccacctatgagtgagaatatgcggtgtttggttttttgttcttgcgatagtttactgagaatgatgatttccaatttcatccatgtccctacaaaggacatgaactcatcattttttatggctgcatagtatttcatggtgtatatgtgccacattttcttaatccagtctatcattgttggacatttgggttggttccaagtctttgctattgtgaataatgccgcaataaacctatgtgtgcatgtgtctttatagcagcatgatttatagtcctttgggtatatacccagtaatgggatggctgggtcaaatggtatttctagttctagatccctgaggaatcgccacactgacttccacaatggttgaactagtttacagtcccaccaacagtgtaaaagtgttcctatttctccacatcctctccagcacctgttgtttcctgactttttaatgattgccattctaactggtgtgagatggtatctcattgtggttttgatttgcatttctctgatggccagtgatgatgagcattttttcatgtgttttttggctgcataaatgtcttcttttgagaagtgtctgttcatgtccttcacccactttttgatggggttgtttgtttttttcttgtaaatttgttggagttcattgtagattccggatgttagtcctttgtcagatgagtaggttgcgaaaattttctcccattttgtaggttgcctgttcactctgatggtagtttcttttgctgtgcagaagctctttagtttaattagatcccttttgtcaattttgtcttttgttgccattgcttttggtgttttggacatgaagtccttgcccatgccaatgtcctgaatggtaatacctaggttttcttctagggtttttatggttttaggtctaacgtttaagtctttaatccatcttgaattgatttttgtataaggtgtaaggaagggatccactttcagctttctacatatggctagccagttttcccagcaccatttattaaatagggaatcctttccccattgcttgtttttctcaggtttgtcaaagatcagatagttgtagatatgcggcattatttctgagggctctgttctgttccattgatctagatctctgttttggtaccagtaccatgctgttttggttactgtagccttgtagtatagtttgaagtcaggtagtgtgatgcctccagctttgttcttttggcttaggattgccttggcgatgtgggctcttttttgcttccatatgaactttaaagtagttttttccaattctgtgaagaaagtcattggtagctttatggggatggcattgaatctgtaaattaccttgggcagtatggccattttcatgatattgattcttcctacccatgagcatggaatgttcttccatttgtttgtatcctcttttatttccttgagcagtggtttgtagttctccttgaagaggtccttcacatcccttgtaagttggattcctaggtattttattctctttgaagcaattgtgaatgggagttcactcatgatttggctctctgtttgtctgttattggtgtataagaatgcttgtgatttttgtacgttgattttgtatcctgagacttcgctgaagttgcttatcagcttaaggagattttgggctgagacagtggggttttctagatatacaatcatgtcgtctgcaaacagggacaatttgacttcctcttttcctaattgaataccctttatttccttctcctgcctaattgccctggccagaacttccaacactatgttgactaggagtggtgagagagggcatccctgtcttctgccagttttcaaagggaatgcttccagtttttgcccattcagtatgatattggctgtgggtttgtcatagatagctcttattattttgaaatacgtcccatgaatacctaatttattgaaagtttttagcatgaagggttgttgaattttgtcaaaggctttttctgcatctgttgagataatcatgtggtttttgtctttggttctgtttatatgctggattacatttattgatttgcatatattgaaccagccttgcatcccagagatgaagcccacttgatcatggtggataagctttttgatgtgctgctggattcgttttgccagtattttattgaggatttttgcatcaatgttcatcaaggatattggtctaaaattctcttttttggttgtgtctctgcccggctttggtatcagaatgatgctggcctcataaaatgagttagggaggattccctctttttctattgattggaatagtttcagaaggcatggtaccagttcctccttgtacctctgatagaattcggctgtgaatccatctggtcctggactctttttggttggtaaactattgattattgccacaatttcagctccttttattggtctattcagagattcaacttcttcctggtttagtcttgggagagtgtatgtgtcgaggaatttatccatttcttctagattttctagtttatttgcgtagaggtgtttgtactattctctgatggtagtttgtatttctgtgggatcagtggtgatatcccctttatcattttttattgtgtctatttgattcttctctctttttttattagtcttgctaggggtctatcaattttgttgatcctttcaaaaaaccagctcctggattcattaattttttgaagggttttttgtgtctctatttccttcacttctgctctgattttagttatttcttgccttctgctagcttttgaatgtgtttgctcttgcttttctagttcttttaattgtgatgttagggtgtcaattttggatctttcctgctttctcttctgggcatttagtgctataaatttccctctgcacactgcttcgaatgcgtcccagagtttctagtatgttgtgtctttgttctcgttggtttcaaagaacatctttatttctgccttcatttcgttatgtatccagtagtcattcaggagcaggttgttcagtttccatgtagttgagcggttttgagtgagattcttaatcctgagttctagtttgattgcactgtgatctgagagatagtttgttataatctctgttcttttacatttgctgaggagagctttacttccaagtatgtggtcaattttggaataggtgtggtgtggtgctgaaaaaaatgtatattctgttgatttggggtggagagttctgtatatgtctaataggtccacttggtgcagagctgagttcaattcctgggtatccttgttgactttctgtctcgttgatctgtctaatgttgacagtggggtgttaaagtctcccattattattgtgtgggagtctaagtctctttgtaggtcactcaggacttgctttatgaatctgggtgctcctgtattgggtgcatatatatttaggatagttagctcttcttgttgaattgatccctttaccattatgtaatggccttctttgtctcttttgatctttgttggtttaaagtctgttttatcagagactaggattgcaacccctgcctttttttgttttccattggcttggtagatcttcctccatccttttattttgagcctatgtgtgtctctgcacgtgagatgggtttcctgaatacagcacactgatgggtcttgactctttatccaatttgccagtctgtgtcttttaattggagcatttagtccatttacatttaaagttaatattgttatgtgtgaatttgatcctgtcattatgatgttagctggtgattttgctcgttagttgatgcagtttcttcctagtctcgatggtctttacattttggcatgactttgcagcggctggtaccggttgttcctttccctgtttagcgcttccttcaggagctcttttagggcaggcctggtggtgacaaaatctctcagcatttgcttgtctgtaaagtattttatttctccttcacttatgaagcttagtttggctggatatgaaattctgggttgaaaattcttttctttaagaatgttgaatattggcccccactctcttctggcttgtagggtttctgccgagagatccgctgttagtctgataggcttccctttgaggttgacccgacctttctctctggctgcccttaacattttttccttcatttcaactttggtgaatctgacaattatgtgtcttggagttgctcttctcgaggagtatctttttggtgttctctgtatttcctgaatctgaacgttggcctgccttgctagattggggaagttctcctggataatatcctgcagagtgttttccaacttggttccattctccccatcactttcaggtacaccaatcagacgtagatttggtcttttcacatagtcccatatttcttggaggctttgctcatttctttttattcttttttctctaaacttcccttctcgcttcatttcattcatttcatcttccattgctgataccctttcttccagttgatcgcatcggctcctgaggcgtctgcattcttcacgtagttctcgagccttggttttcagctccatcagctcctttaagcacttctctgtattggttattctagttatgcattcttctaaatttttttcaaagttttcaacttctttgcctttggtttgaatgtcctcccgtagctcagaataatttgatcttctgaagccgccttctctcagctcgtcaaagtcattctccatccagctttgttccattgctggtgaggaactgcgttcctttggaggaggagaggcgctctgcgttttagagtttccagtttttctgttctgttttttccccatctttgtggttttatctacttttggtctttgatgatggtgatgtacagatgggtttttggtgtggatgtcctttctgtttgttagtttcccttctaacagacaggaccctcagctgcaggtctgttggaataccctgccgtgtgaggtgtcagtgtgcccctgctggggggtgcctcccagttaggctgctcgggggtcggggtcagggacccacttgaggaggtagtctgcccgttctcagatctccagctgcgtgctgggagaaccactgctctcttcaaagctgtcagacagggacatttaagtctgcagaggttactgctgtctttttgtttgtctgtgccctgcccccagaggtggagcctacagaggcaggcaggcctccttgagctgtggtgggctccacccagttcgagcttcccggctgctttgtttacctaagtaagcctgggcaatggcgggcgcccctcccccagcctcgctgccaccttgcagtttgatctcagactgctgtgctagcaatcagcgagactccgtgggcgtgggatcctgtgagccatgtgcgggatataatctcctggcgcgccgttttttaagccggtccgaaaagcgcaatatttgggtgggagtgacctgatttttcaggtgcgtccgtcacccctttctttgactccgcaagggaactccctgaccccttgcgcttcccaagtgaggcaatgcctcgccctgcttcggctcgcgcacggtgcgcgcacccactgacctgcgcccactgtctggcactccctagtgagatgcacccggtacctcagatggaaatgcagaaatcacccgtcttctgtgtcactcacgctgggagctgtagaccggagctgttcctatttggccatcttggctcctccctcatgaccgttactttctattacagtcatatgaccattactgtcattaaagataataatgaattcaacttggttttccatatcgagtatttgcttatacccgagaaaacaattttgttctgtcttatgcgtaggcttttgctttaaattatcctctttctttgttgttatatttaaattttttttttttaatttgagacagagtctcactctgtcaccaggctggctggagggcagcggcacgatctcggctcactgcaacctctgcgtcctgggttaaagtgattctcctgcctcagacttctgagtagctgggatatatttaaatcttgaaaattgtatttgagttagcagttatatgtttttttgctgtgtgtttaaagaacacatgttgagtgttttctaagttcttatccaacaagcatggcccttgtgccaagctcataatgatagtcctatgggatttgaacccttcagcattgcgtaatcataacagctcatgtaaattagtatagtttttagagcacagattgaagtcagatcgaatttgattcaaatctcattttgtaacttttcttagaatgctaattaagcattcacattggctacctaacctctttaagctttaccttctcattcataaaatgggaattaataataatgcctattcaaagagacattgtaaggattaagagatcatctatacaaacttgtccctgtggtggctggtacataagcacttaataaatatctattacatgatattcactattctaaagatattcttactacccacagcatcttttgtacaaaatacagtttattgctatgatctgcagtgtaggctaatgtattctttaattaattgtcaacctgtatttaatgaatatctattccatctaagatccacatggagctagatttttgagtaattagggaaagaactggaaatggatcttatgaaaaagcaggaaaaataagataaatgatccaagagtggtttcagacacactgctgtgagcacacagctaagagagaagaggaggcgcggagatgatgctgaacgaggggcgatgtcaggggtctgagttctaaagaatgtccaaaagtggggcacatggacacctggggcttgggagggcactgtcggagaccaaagcagtgtgagcaaagccgtggaggcccagagccacatggcgtgaggctttccatttgttaggagcacagctgttgtgaaaagcgttaaaactagggagagcctggatactgggctctctttagtaaacactggaaaagccaggatttaggtagagaagtggcaggagcaggctgcactttaggagggttgagctaatgtgcagggagctagtaggaagctctaggaataaacgcctgagaggtatggagcctaggaatgaacacagtgaaaagaaagatattgaactgacaaatctcccaagaccggcaacacataggtgaggctgaggaagcaagaggaagggctgaagatgatgtcaggtggctgggaggagagtgccactcataaagggggaccacagaagatgcgggtttgtcatgcagatgaggagttcactctgggatacacaccttgagttgaggtctagggaaacatctagagaagggccaggcacggggctggacattcatggtggaatatggcaggaagttaaggactggaagtataaacaggcaactttgcacgtacaggagttggtgaacacacacagtgatcacaaactatacaacagatgacatcacacaccacgcaagatgggagtgctctttactgttgctgtgggagtttcaagaccctctgaaatgaggagcgtctcctttctctgctggaacagtgcttctcaatgtgtgtgccattagctacctgcttgcagttaccaggtagctacttgttccctgtccatgaagcggtaagtgcagaaagggagaataagcatttagaaattttatagcagttggcagaggagctttatgtctgttgactctaataattaaacatttggattcacattttgaggatttttatcattttattttttgatttttattatgttttaaaagtatttacatacaataaattggaaaaatgatctgacactacagatagtttgaagaacactgaggtagactttattaagatacctttagaccacactcagcaaaacatttcaggacaccaagaaaaaacaaaacagccaatgatgacattatcttttactgtccttaaaataccgggctaagcaatattcagatagtatcctctgattgaagatgagattctttaaattgttcagacgatctggagttgagggtgtgcccggttcacggtgtctttgagcgctgcggtcatcggatgcagcctccagccaagcacccactgcctgggaggagggagcttcccattcttattcctgctttaatccaagcttgtaagtttcagttttgttttgttttcttttgacataaaaacaatgaggagtagagtctattgctttctctcaaaataaacctttggatcattcaatgtgaggagggccaaaggtaagtgaaaatgctagggaaaaaaatatcagttaacatttacaaataccattccacatatccttcacgtacaggggacactcttccctcatgggtgcagtctggatatttgtttcatttcacgcagtcaaaccacgcacctttttggatatgcagaattttacaattcataggcaaaaatttcaaaaattacctcacatttaatggtctcacgaatagtgttacacagacacacatttaacaggacatgattttctagacaccatgtactacgtagtactcgtcaagcaaatggataaatactatttattatgtattgaaaaaagagttgcccctttttgagaggtagaaataatgaagatgccatcttctgaaaagcacagaaacaaaataaaggctttgtcatgattaatgattatggaactttgcaatgattaaatatcattcagaagcagatggtctttggcagtgactagaaaaacagccaagctaagactttcccttctgttgtttaataaagaggttattaaggcaaagttgaactaaataaaatgttcttctcaaatgcatgtatacctatataatcttagaatcattgccttctttataaccataacttgaaattatttttaaatattgtggaacttctatataatgtcagtcatgaggatgaggacacaactcaccttggaagctcctgttcatatcaggcttttaaagttaataattctatttcagagaatgtcgctctttgtatagaaaggtaaagtggggatgtattgtaaaatgcaacatttaattcaattccctagtatcaaacagtgtgaagacttggaaaccatccctgtagagatgcaggactcttcataatccagttgaactaagagcctacatcaaataaaatgaaccccttccctcaaatagaagttttcttgctaaattaatgcaaaaaattgaatcctaaggaactacagtttgaatatatgaagcgcagtttaaagaagcaggtgataaattcccaagggaaggtctacctcagacctctgttttacttgttttaacatttttataagcatgtttcacagatgaatgtgatcattgatcaactacttactattccataaagccagggttcttagcatttgaagtaacggctggtatttcagggtctactagacaccaaatacagcatgcatgttttatggacattatcacaaatccccaaagcatacatacaaggcaggaattttattttcattttacacatgaagaaattgaggctcagaataagaaattgtctaattccacctagctgctatgtgataaatgtaagattgaattcctggaaatcaatctatatcttccacacataggtataaccaggtatttttaatgaattaagatagtaatgaggattaaaatctacttccaaagtaattcatggtatttccaccagaacaaaataactccaaagaattatactctttccaataaaaatttaaaaatcacgttagtaagaccgggcgcggtggctcacacctgtaatcccagcactttgggaggccgaggcaggtggatcacgagattaggagtttgagaccagcctggccaatatggtgaaaccctgtctctactaaaaaaacacaaaaattagccaggcatggtggtgcgtgcctgtagtcccagctactcaggaggctgaggcaggagaatcgctggaaccagggaggtggagcttgcagtgagccaagattgcgccactgcactccagcctgggcgacagagcaagactccatctcaaaaaaaaaaaaaaaaagttagtaatctaaaagtatctttctcaaaataatattcttttttttttttttttttcttttgagacggagtctccctctgttgtccaggctggagtgcagtggcgctatctcggctcgctgcaagctccgcctcccggattcacgccattctcctgccccagcctccctaatattcctattagtactgataaagagaccataataatccatttcaaagtacaaataaatgtcttttgtaataaaggcatgacttattaaaaataaagcattcattttttcaactcttttccagttttttataattatgtttcttgtaaattattttatgtatgatgataccaaatatattttattcatactagaacggcagtaatgagcaagcattgtcttactagaaaaaatggagaagcaattagagatggcattgccagggaaaggctgttcctgcacgtcagcattttcttaattagatgtttcacttaagggtttggaagaagccttataattaaatattgacaactgtaatccttgccaggcactaatgttcatgtttatctagtgagtatatttgtttaacatttaacattttggatcttttttgactgatttctaacataaatgatacaatcttgaggatctataaaatatagttaaaatatatttttaaaatgtatttttaaagatgtattaaagtgacaatttaaaacttagtcattaacttcaattctttacagtgaaatttctttagtagagcatgtcagaattacattgagaagatcatgggatcctatggaagatgtacggagacattgatggcaattgatattctgacgcacacaaacttactatgacggccctgacagccgctgcacacgttgaccccacctaacgtgggactgaaaacgatgagtgtggtgctgccatcctacacccagcagttgtctgtcttcattctctcttctgaccctgttgaagttctgcttctgctcttttgtctctgtcttgcttttgtggtggagtttaaccttggacttgatgaatacatttggctcttgatataatcctcatagctcctgagaatctgactcaagcgcccctgtgatttatctgcctgaattctctgttaactgtgccgaccaacccagatccagccccatgaacttaccaagacagtgacttcctggctggcaccatgctaggcctgccagggagatcagaatagccaatacctgtcttcctttcactagtttctcacttgtctcaattatgtctttatattaagtgagaaaattgctgacaacatatagataaagatgttatgaagaagtctgaaagaagctattcgtaaagaaaccatgagatgaatgtagacagtaggctgttctaaaagataactggcctgctgtctttaaaactgtcagtgtcaggtctggggaaaggcggaagaaccattttctttctatatgaaaatagactaaagacatgtaagaacaatttaaagtatggaatttgattggatgctagtttaaaaatatagctatagaagacacttggggaaattagatttgaatattaaagagaatattggagtgagtactagttttaagaaactgtcattgatttccttagatatgataacagtttgaggattatgtaggagaacatccttttaggaaatgtatggtaaggtagggatcagtagagtgtcatgatatttgcaacttcctttcaaatggtccggaataaaatatgtttctggatttaatatggtaaaatattaaccatggttgaatccaggtgataggtattttattttttggtataaatctttcaactcttccatgtttttaaaaaaatgttatagtaagaagttggaaaaactattgtatataagaatcattattattctgacctcaacagaaatgttaaatatttacttttcatgggaattgttcataaataatgtaaatatttagaggatgaatatctaaatgatgaaacaaaagatcgtaagtaaattcttgcctccttttttggagactaagtggttccttaacatttgtgaaccctaatgttccaaatttcatatttccacctttcttgaaagcatctggtaatggtgactttcttttatagaatttcaagccttcagagaagaatctaaagttctgaagaaggaaaaatggaaattatgatagagcctagaaggaaagaaatgaatatgtttaattttgttacaagggaataagaaatggtggggaagagaagacggaggagatactttcattcataggccatgcctctgcattcaaacactggtcattctgatgtggagtccagtgttaatccaaggaaccaggacaatttgaaaaggaaatgtcacattactgagttttcaaaggatgtccaaatcttatttttgcaaaatatggctgtttgtatagtttatttttggcaaagtatggttgttagtttatgtagtttatacagttaaaagatttctctagtcattgcaagttttcttgtctgtacctttatgagatgggtgaattttcgtctcatggacatgtgctgatgttgggagacagttctccctgggccttttgttcctgtatgttcttgctggatatgcagaaatgcaaggcccttcatggctctttattaataagggccattttccagggttgcattttcaatgagcagcctgaagagatgagggagaaagagcacgtgagccactggctgctatggagcagctggtttgcaagctcggtgttttttgtgacacgacccactgcaggatcaaggaccaaacactttccctctgggaagtggggtccaggaaacagacatgaattctgatactgtggctgctgcttttgcagcaagtaagaaagtctttcatctctggtctaggattcttatgtttcctctaagcatccacaaaattgtgacaaactaatgtgctggcttttcagcagagtaaaatgaaatcccagacccttcacggtccttgatagccagcatagaatagttaagcagcaaatatttatgtgacaatcactttcttaaaaaaaataaaacactttttgtacaaagcagtgacagtagctgaaattgctaaacaaaattctattctaaaaatttgccatcttaactagatagctaaaattttctaatgtgtgaaagaaggggctacacactcacacagacaatgagaaacttggtagtgggtggccactttgtttctaggtcatccactagaggtacatccccaaagaggtgtatccttggtcagaaaaggatggacttacgataagataccaagatacatctacagaataatcctgtgagtaggaaatgcaaaggcactatattcctccagagtggaggcagagggtgggttggctttcggtttcttgccatttttgttttttgggttaatttttctttcttttttttttattatactttaagttttagggtacatgtgtacaacgtgcagctttgttacatatgtatacatgtgccatgttgctgtgctgcacccattaactcgtcatttacattaggtatatctcctaatgctatccctccccgctcccccccaccccacaacaggccccggtgtgtgatgttccccttcctgtgtccatgtgttctcattgttcagttcccacctatgagtgagaacatgtggtgtttgggtttctgtccttgtgacagtttgctcagaatgatggttttcagcgtcatccatgtccctacaaaggacatgacctcatccttttttatggctgcatagtattccatggtgtatatgtgccacattgtcttaatccagtctatcattgttgcacatttgggttggttccaagtctttgctattgtgaatagtgccacaataaacatacgtgtgcacgtgtctttatagcagcatgatttataatcctttgggtatatacccagtaatgggatggctgggtcaaatggtatttctagttctagatccttgaggaattgccacactgtcttccacaatggttgaactagtttacagtcccaccaacagtgtaaaagtgttcctatttctccacatcctctccagcacctgttgtttcctgactttttaatgatcgccattctaactggtgtgagacggtatctcgttgtggttttgatttgcatttttctgatggccagtgatgatgagcattttttcatgtgtcttttggctgcataaatgtcttcttttgagaagtgtctgttcatatcctttgcccacttgttgatgggcttgtcatttttatggaacacagtgtggtcatgtgtccacagccatacaagtcaatgactggactattggaaatccttgctgttggcatctcacaaaccttttcctttctctcagtactttttctctaagtaatgatgcagttcaggccctcagcttgttgttttgtgatatgtgccagccacctgcttctcgaaccatatctttctcgttggatgaacacagagccaggatgcctgctacacccacatcccctgcggaggtctcttgatgatagccactgctgagggaagcagccctaggcagccccacaaacacagtaatgacgctgcctctcgggagctgatcagagcacgctgggaagcctgaggaagatagtccgtccgtcagccagccagcaatcagtgacatggtacaggggtagctctatccaagcagggatgtcaatgcagtgaaataggtttctcacgagaatttgcacacgaggtaaagggagagtcaacagcacaggcttgttgtcaggtttaagtgagatcattcccataaggcactcagcagagcgcttggctgaaatatggggcttaataaatgttggggaattaacactactattattgtgaatagctgaagctgaaggatactgagagaaggcaaagaacagagaggccgtgggcaagctggggccatgaatacccaaccgtttggaagggaggccaaaaagaaatacgaggtagggatgagatgttgaagaagcaacgtagaggagtggaatcacacgaacgagtgtggcaccctctctgtgtcctgcagactcgcactggcaagagcgcgaggtaacagcctgttctccagctgcccggaggctggatgaccttcacaggccccaaattctaacctctagagcctgccatctccttcctcccttatattcctgtttgggtggtgtttcccagactcctgtgggatctggacgcttgtttccaatatttgaaaattatttccacaaaatgaaatcctttcattagtatcatatcacttgccctgtccatactactcattactaggggtacctcgagtaagcctcgcgccttgttaccaaaaaggataccttgacatacttgccctttccaactcacatcttcccgagatgcccctttcttgctggctagatagaatttattcactctctcagcttctctaccatatggtggtgtgacggtcaattttatgtgtcaacttgactgagctaagggacacccagatagctgataaaacgttgtttttggatgagtctgtgagtgtgtctccagaagagattaacattttcatcagtagacgcagtggaatctaccctcaccaatgagagtgggcatcatctaatcccttaaggggccaaatagaacaaaaaggcagaggaagggcgaattctcttcttcttgatctcggacatccaactcttctgccctcagacattgaagggtctggtgtttgggtctttagactccaggactccaccctcgaattctcaagtctttgaccttggactgggggaagtcacgccatcgtcaccccattgacccccctggttctcagatcttcacactcgggctggatcacaccactggctttcctggttcttcagctcgcagatggcagatgatgcgacttcttagcctctgtgattgcgtgagcctgttcccctaataaatctcctggtgtatgtctctgtatcttattggttctgtttctctggagaaccccaatacagggggaggaagagacacttgctctttataaatgggcggtgtatcacaattctgtggtgattttgagctaattttctgctttggaaccactgaagaggcttattgaagactggaatggaatggaattttgtaatggtagagctgtcgcgtatgccaattacaagtgttgcgggcaggacagttacttcacaggcagaagtagtgtctgtgtgattctctgagaagccctgccttcctgccaggcagaaggtgctggagctgactgcacgggccaacaggagcaactgtacacctctcgccaactccaccctgagtagcatcacactgggagtttgaaatcagccaaggaggaactattttcaccctgcatgcccacaaatctcaactcagagcttcggtttcttccggagagttagtctaccagcacactgctgctaggaagtataagaagtaggtttacttcacagtaaacatccttccagtctacctggattccacaggtagattgaaacaaggggatgcttttgacaaaaggctttgtgatgactgcttctgtcacaggaatgctcagaagagatgtcaagaggctggcctctccaaagtctcacagctggagtgtgggtaccaggttctgtctagtggctttcaacgtttgttttctgtcttacagcatccatcagaggatgacatgtccatgcgagaagcagtttcatgagtgtttgttaatgtgatcactgcagttatattccttactcttcagacaagcaagaataagggaatgtgtgtgaaagaggtagtctgaaatattctggtggtttttgttttgttttggagatagagttatgctcttgtcacccaggctggagtgcagtggcacgatctctgctccctgcaacctctgccttccaagttcaagcaattctcctgcctcagcctctcaagtagctggaactacaggcctgagccaccattcccagctaatttttttgtatttttagtagagacagggtttcaccatgttggccaggctggtctcaaagtcctgacttcagttgatcctccccactcaccttcccaaagtgttgggattacaggcatgagccaccatgcccggccttttttttttttttttttttgatacggagtttcacttttgttgcccaggctggagtgcaatggtacgatttcagctcactgcaacctccgcctcctgagttcaagcaattctcctgcctcagcctcccgagtagttgtggtgacaggtgcatgccaccatgccccactaatttttgtatttttagtagagatggcttcaccatgttagccaggctggtctcgaaatcccagcctcaggtgatccacccacctctgcctcccaaaattctgagattaccggcatgagtcactgcgcctggccaatattctgttttttaatgcaagtcattgataaaattagtcctacatttttgtggtcacagcttacgactgatactgaggttaaggaccatgagtttagatgatacaagagtgaagggaaattgtgctctgcagggactcatgttgcaattttctgtctttgggagccactcagctaaatattataaaaaaaaaaaccaaaaagagcaacggaaccttccctggaacaccttagctcacgatgctttctttcttccttataaggacatgtcttatatgtatttttgtttattatggggaagggctgagctctgcttaatggaaatatgtctagtatatttcagagctcatggttttttgaaattcaaggtccatattaaattcagtttatttagaattagagtgttcacctttattatttaatgtacttcagttgttggtttggttaattttcacactttaatattcacactttgagcttagcattgtatgtctgtgtgtgtacatatatgtatgtgtgtatggatggatggatgtctgtgtgtatgtgcatgtgtgtatggtgtatgcatctgtataggggtgtgtgtgtatgggtgtgtatgtgtgtgtgtctgggtatgcgtcttatgtgtttctgtgtgtgtgcatctctgtgtctatgagtatctgtgtatgtgtgtcttttttggtgtgtgtgtgtccacgtatgagcctgtatctgtatgtgtgcctgcatctctgtgtgtgtatgaatgtgtgtctgtgtgtgtatctgtcactttgtgtccatgtatgtgtatgggtgtgtgtctctctgtgtctgtgtatgagtgtgtatgtgcctctgtgtgtctgtgtgtgtctgtgcatgtgtgtatgtgtctctgtgtctgtgtatgagtgtgcatgtgtgtgtgtgtctatgtgtgtgtgctccgaatacacttctaatctgtaccttcctgtccctgttgagaagcctctgtttttgctccacactgaccaatatggccaatattggtcaaggattgaccaaaggagagagcaaggatgcagctctcctttccccataaggaattcatgaactgtaattgcattaaatcacgaggaaaaactgtgtatttcactaaagatccccttgaaagatgaatgtgattcatatcacacaccgtacaatatctcacttcaaaagttctcttgattccgcttccagcaagggtggactggattgtttcagaccaaccaccagctgagagcaactagagaagctgaacactaggttaaagaccacgcaggaattagggtgaccagcaaatagagcagcaccggggactgaaacccagttttagatcttctcaattgctgattggattaaggtgacctgggactgagagagcccccagcacagtctgctataccaagcaaatacaatcctctttgaacttaagctgcaagcaacgactctgtattgtttaccagacaccagttaaatagaagaagaaagaaatgttaaaaataaatgtacacgtcaagtgtttgcatgtgcaaatattccaactaaaaggaagctgatgtatcttgtattagaccaagtagactcccaagtaaataggaagcattggtagaagtaccaagggccagttcatgaagattaaaggccactctgtgagaagatataagaattcttaatttataggcaccaataacatcgtttcaaaaaatatgtaaagatgcacccatttgactaacttgcagcagctaatgtctgctgccaaggtttcctctccagatgcaagaaaaaagtgttttttgccattcctgtccatcagcctgtggtagccaagattgaatggaagagtataggaaatacagaacacagataggaggtaactgttacaacccagacataaacttgtaaacggtgcaaaacctgttttactccaaaaaggaatctaaaattggactttatgaaatctctctctctctctctctctctctctctctatatatatatatatatatataatctatatcgacagaactaaaaggagaaatccaaaattgtagtggaagattgtaacagtaattgtgtataattgtttgagacagagtcttactctgtcatccagactggagtgcacgggcatgatctcagctcactgcagcctctacctgctcggggtcaggtgatcctcccacctcagcctccccagtagccaccatgcctggcattttttttttgtatttctgtagatatggggttttgccatgttgcccaggctggtctcaaactcctggactcaagcgatccacccacctcaagttcccaaagtgctgggactacaggcatgagccaccgtgcctggccaattatgtataattttttggagtcaatttgtttcagaaaaaataccaccaatttaccttagaaagattcaaacaatacagtaattcctctcatagatatgagatggattgaaaagctacagtaaatagtatgttactgatgcaaaggtagacaaataggccaggagagtacagtagacaagccagaaacacctatttgtacatggatgtttggttgctgcaaagttggtgttgcagatattggtgaaaagatggttgctatgaactgaatgtctgtgcctttcccccaagttcctatgttaagcccctaactcctagtgtgttggtatttggggagtaactaggtttagattaggtcttgaggaaaggccccttgtgacagggttagtgtccttataagaagaggaagggcaggcgcagtggctcacgcctgtaatcccagcactttgggagactgaggtgggtggatcacttgaggtcaagagttcgagaccagactggctgacatggtgaaaccccatctctactaaaaatacaaaaattagccaggtgtgggggcacatgcctgtaatcccatttactcgggaggctgaggcaggaaaatcgcttgaacccatgaggcagaggttgcagtgagctgagatcatgccactgcactccagtctgggtgacagagcaagactccaactcaaaaaaaaaaagaggaagacagtttctcactctcccactctccatgtacacacaaagaagaaggcatttgagcacacagggagttggcagccttcagcaagccaggacaacaccctcacaagaaccaaaccagctggcaccttgatcttggacttccaggctccataactgtgacaaataaatgtctgttgattacgctgcccagtctgtggtgtcttgccatagcagcctgagctgaatgaggcaatggtcttttcaataaatagtgcggaaccaactgtatatccttacagaagtggaagacacctgatacctcaagtcacactacacatacaaaacaatttcatgtggactgtagatctgaatatgaaaggtaaaacaatgaaacttctaggagaggacatagatgccgattttcatgcatctcatcctcgaggataggtaaggacctctgctaacagacaaaataattgctaaccaaaaagtaaaagttacactgcattaaaattaagaacttctgttaatcaaaacagaccatttactggaaggttttaaatgaccccaaacaagctttgtaaggccagctagccctttaactgtagttaattgttgggaaaaaattcttttgtatttctttttgaatgggtttagcttctgttctagctttcttattatctccataaaagattggaacacaaaacacaaaatagctccatattaaagcttagcaacacagataacacgtcatttccacagcagaggcttggtgatgctaatcatttgacaaattaccttggtacgagattttccagtttatgtcacttttaatgaagggcagatttttaaagacctgttttctatatctgaaaagtaagccatcagtattgtcatgagacaaaattacagcaaatttagttcaaaaatctcagtgaaatcaatgaaattgatttaaaagctacagtaaataagactgtgttattgatgcagagataaacagtgggccatgggagcccagtagaaaagccagaaacagacctatttgtctatgggattgttgcaaagttggtgttgccgacattggtgaaaagatgattgttatgggctgaatgtctgtgtcttctaaaccaaaaaatatctaagacaggtctcaaccgatttagaaattttgccaaggttaagaatgtgccagggagacaggtctgtgcctttttccaaagatggttttgagggcttcagtatttaaaggggaaaagcaggctggaggggataggagggtatggtctcactactgaatccacttgttccaagacaaaaggagcagggaggggaatggccaattcggtgcttgtccaggcttagtacatctgctctttatgcaagataaggtgaacataggctagccacctgtgaagatattgaaccttttatctgtagctctctgcctgtcaacaaaaggaaagatagtttcttgcatgactcaactttcagcttaagtgtttccttttggcatcctgaactggggtcccaagtttctgttttgctttcacagtctttccctaaattcatgttcatgttaagccctgaacccccagtgtgatggtatttggagatggattttttaaaagagacattgacgctgtgctctgagacgagctctgcctatagagctggcctgcactcagcactgcttaggaatgtgagtaaaggcttctgactcaacactgccccctcctccctaggcattcactggtgggtaaaggttagacaggagtcatgtattgtctcgacttctttccaccctacacactacattctgcaagctgggaggtgattttttaaaaaatgtgataaatatgcatgagacagaatttattttaacaattttaagtgtaccatttagtggcattaagtaccacattcacagtgttgtgcagtcaccaccgccatccatctccagaagtttttcatcatctcaaacaaactcactacctgttaccagtaactccccgttccttcctctcctcagcacctggcaaccaccattctgctttctgtctgtatgaatttgactactttagggaccttatatatataagtggaatcatacaatatttgggcttttgtgtctggcttatttcacttagcgtaaagattttaaggttcatccatgttatagcatgaatcagattttcattcccttttaagacaatatttaattgtatgtattaatatatactaccttttgtttatccattcttctgttgatggacatttgggttgcttccctcttcagctgtgtgaacaatgctgctatgaacattttttagagatggggtcctgctctgtcactcaggctggagtacagtggcgtgatcatagctcactgcaaccctgacctcctgggctcaggtgatcctcctgcctcagcctcccagagtaccagggaggacaggcatgtgccaccacacctacctactttttaaattttctgtagagacaggatctccctgtattgcccaaggtggtctcgaactcctggctcaagtgatcagcccacctcagcctcccaaagtgttgggattacaggtatgagccactgcacctggcctgtgtccctgcttttaattctttcagtgtataccaagaagtgggattgctggatcctatggtaattttgtgtttcacttttgaggaatcacaaacgatttttttatactagctgcaccattttacgtttccaccggtgatgcacgaggattcccattcctctacatcttcaccaaaacttactttctttatctctttttaaacagccactctaatgagtttaaaatggaggactgatcttttttacattttttggcaagggcttccagacagcatcgtgcgatgctgttgaagatagacacatcccagcctcagagattaaacctgagcaattatgatctttattttcttcttttgcaacattttagactggtattttcctgggtctgaaataggaagaaagctgcatgtgaagcatgttcatggctgactctgtactaggtgccgcagcaaggacaggaagagccttttgcttttttaggtgcatgagaaagacagcgagaacacagtcatcctgagagtgtctggcagcctgagttctcctttcagctttggtcagctgagagccctggatcaccaagtaaagaggaacctctgtgctctcccaaatgtcttcgttagtcagacctaggttttccctgggtatcctgcattgccctagaatctgacagttttgttgttttacatttagaaagggtgttctgctggtgttcccacccaaagatggaataggatttacttacaattaaagctgttgagggaaagcctagcagcctcgtgtgctgcaggtttgcaggaatctggattctggtccctggccttcaccaagcagcagcaggcctgcccttctgagacctcgctttttcttctctggaatacgaaggctttcattagttcctctactccttcaaacattgattaaaggtgtgctgaggctagggtgacacaattcaatatgacgcagttcctgggctcaagcagttttttaggtgggaatgcgttgggaggacagaatgtataacagatgaatcagggcggtggctctcgaagtgccatcctgggccgcagtaccagcagcacgtgggatcctgagaaatccacattcgcactgcagacttgctgcaccagagaccggggtggggcccagcaacctgggtttttacgagctctctggtgatcctgctgcatgttacaatttgagaaccactgaattcaattctgacctgacaaactgcagtgcagacataagacagcgggcaccacccctttgcctctactctcacgttttttactttagattgtgtattaaacataaaatgcatgcaatctcccaattctagtgttctgaaattccatctgtatgtcttgaaatttagtaagagatttatgaagacattgtgttgtaatgtcatatacatatgagtggtggtagaggtaataatcagttctcattatccctggtagtcatggtctgtgaagtcaccggaaaccatgatgtagtgaatactgaaccatagctgcagaggaaatacagggttcgcgtcctgtgagtctccagtctcaacatttttgtcaactgatcgatacctgagcttgtctaatgtgtgttcgtgttgaaagacacctcatttaatatatagtagcgacttgctaacattgaactcaccgacagcgctgtctatacctcgtgcctgaaagctgatcaacatacgtatttccttctcaaggcacaccacagccttctggcgcttaggaacactcggcagctttagcacagcactccaagaccactttacacagccagatcacccacaacaagcacaacaatttggaagacctgtgacagcactgaatagacccacaaaagtgcacacttgttgacagcgtgagagctgaaacaaggcagggtcgccttgtgtgaccgcagcggggagcacgcagttgaagggactcaggtgtgtcattgttctgcacatgtgcggaggggcatggaggcaccacgcgtgtggagttggggcttacagatgtattttagcaagtaggtgaatttgcagagggtgaaccagagaataataaggatcaattgcatcttaatatttcagttacataaaatctaatgtacaacagtggtctagcaattactacgaagtctttgttttctgctgtgctgtttaaaagagtaaatcaaacattgaaaaacacattttaggaaaatttggccttattgatgttgcagtttgcccaattgaactcttcatagaatatgtttggatagttatttttatgttgaaagactgtttaattatcagaatttttgtaaaacagtttttagattattcttttttcactttatactaagtatagtaaacaaatgtgtaaaagtaaaaaaattggatattaaagaatgtcattggacccatttgttcaatatattaggttgaaacaatgaaatttctgtttctctggttcaaagtagtataatatggacaatttcatatgattctgcctaataattactctccgtgataaattttagcacttactttaaaaagttgggtttcagaacttaggtatttcattttgaataatgtactaattctatatttttctataattttctataagcttgtggaccttattgattacctaggactttctatgctttttatactcttcatattaaaagtctaagtatttttcatccttttttggatacaacatttatagcaatttcaaaatgtcctgataatctgtgccatgtataggagctttagcgtctctgtatgatttgtagggagctgtgggagtgtgccctgcagggctgcaggtggggtgctcaacaagccaggctgcccacagcctaagaaggtggctctgcctttccgtccacctgtctgtgcccgagttttctcactggcagaatggcattaacagcagtgcccccttcgaagaatgattgtgaagctcaaatacactgattgatctctctctctctctctctctctctctttctctctctctttctctctctctctctctctctctctctctctctctctctctctaagtgcttaaagcagggcctggtgtgtggtacatattcaggaaatgttagtggatactatggtagaacatatttgttgtgtttaaaatagaccaataatgaaaggaactttaacagaaatcagcaaattggatttgagatgaatctttgaaagctaaacttttaaagctagactggactgatctggataaagctgtgtacccttgggaatttactggatgttgctgaccctcttttttttttttctatataaaagagtagccacctttcaggtggctgaaggttttgttcatgtggtggtgtgaggtttacgagtaaggtacattggtctctggctctaagtgctggtcagagcgaaagcataccctgtccctcatgcacattcatatcatgtgcatggtatgatatgtgcatggtacgcactttctgtcggctgtgcgtaccacctactgttcactgaaatgctgacttctgattgagacaggattccctatctattctggaatgaaaattcggcaaatcctaaatcttgcaaaaaagaaaccataaagtattaaaatctgggcaaggatttttttttttatagtgatgaaagaggggaaatgttgacatctggtggctttctggcaatattgcatgccaccatttcaatattacatgcagcctttcaatcccaatctagagctatatcttggtttacacaggctattcctagaacatgctcataaaagaaaaattctgttatcatttaatatcatatttatttattgcaatttcctggactcatttaaaacaatgtacttataaatttcaccacttaggtaatttttaaatattaaataatatattctatatttttctataattttatataagctatggacttcatagtttacctagcactttccaagatttttatactcttcccattaaaataataaaacatgatattgttttattagtcttctatgaaggaagttaccaacttgtaaaatatatttaaatgtatagaggaggttaatgcaagcatttttaaaacagactttttattttagagctagatttacagaaaagcagctccctattattctggtacatgtgtcacaactaatgaaccagtatcaatccgttaccattaactaaactccacatttattctgatttcaccagagtactattcagggtttttcagagaagcagatcagacaggatgagttagtgagtgagtgtgtgtgtgtgtgtgtttgcatgtgtgaagagggagagagattttttaaaaataggctcacgtgattgtggaggcttggtaagtccaaaacctgcagaggtgacagattattttgggggttacaattatattttagcaaataggtgaatttgcaaatagtgatccagagaattgcagagattggatgaggtccacccccatgatggagggtcatctgcttcacgcagggtcccctaaactgtattaaccgtcaccaccagttttccccagtgcccttcctctcctccagggtccacttgacattacatggagttgtcacgtctcctcagtgtcctctgatccgagacagtttctcagactttcttgttttgatgatcacgacagtttaggggagtactggtcatgtgttttgtagaaggccgctccgctggggttcgccttgtgtttttatcatggtgagactggggttatgggtttgggggggaaggccacagaagggaagtgcctttctcattgcctcattgcaagggtgcgtgtcaacatgacacatcacggatggtgccagccttgaccacctggctccgggagtgcttgtcaggctgctcccctgtaaagtcaccccctgcttccatactgcactcttggagtcaagcttccatactgcactcttggagaagaaggtatgatgcccgcctcctggaaggggagacacacaccactggggtagagttcttctgtgggaaatgtgcctcttctccccatttatttatttatttgtttatttctatcaatatgggctcatagaaatgtattttgtactttagttataatccgatagcacatgatgtattttgttactcaggttgttctagctttagccatttggggctctttcaggatggctcctgtgacatgctctcattcttctgttgttttggtttttgttttttgagcactttcctacagtctggcagtacaagatgctccaggtacattttatattgccctgcctcagcccccaaatcggccactcctccatggagccctggtccctctattggagaatagtatttggtgtggtctgaatgtttgtatcccccaaaattcataggttgaaatctctctccaatgaaatggtactaaaggtggggcctttaggaggcgattaggtcatgattgcaaagccctcgtgagtgggattcatgcctttatgaaggaggccctgggggcttcttcacccttttggccatgtgaagacacagctggaaggcaccatctaggaagcatggagccggcaccagacactgaatctgctaccaccttgatcttggacttcccagccttcagacctgtgggagataggtaatggcaaaaactgcagttacttttgcatccacctaatacgtttctgttgtttataagtcacccagtctatggtattttgtcatagcagcccagatggactaggacagtgttaggaactaagatctaggcactggaggtgctcattgctactggagacagctctatggtatagagagatgacatagttgtatgtatatgtttgtatttgcaaagcaaggccacagttctgatatgcacaagtttcagtttatatgatacccatgtaaagccaggactgctcgtactggataaatgtaaaaaactgtatgtaacttttgtgtattatattgcataatattaaaatgaactggtttaatactccacctaacaaaaaaaaccactctcaatgctttaaatgctgaaaaaaggaataatttacaatttattatgtatctatatgcagtttccaaaatttgtctctaattcacacaactctacaaggaagacagtaatattagccttgttttagctaatttctgctcacagcattaagttatcagctcaggattgcatggctagggcaagacagagccagcacgtgaaatcaggtcaatttttagaggagttgcttataatttttggaataactttatatcttatattactaattaattttcagagggtgatcacataatcacatataccactttttatttttattttttgagacagtgtcttgcttcgtcacccaggctggagtactgcagcctccatctccggggctctaagtgatcctcccacttcagtctcccaattagctgtgactacagatccatgtgaacacacctagcttttttttttttttttttttttttgtagagacaacgtctcattatgttgcccaggcttgttctgaactcctgagctcaagagatcctcctgacttggcgtcccaaggtgctgagccactgtgcccagcctataccattttattttatcctaatgaattcgccaaactaggctaagggagatcctattattttaggaattgaggtctcccatttaatgactctaattactgatcccagggccccatgccattaaaatgtaaaacacttaaacaataagatagaaatagttatgtacttttcaattctcaattagggtttaaataatcaatgaaagatggaaaatcgtatggactaagtacaggtaacattgtattaggttctccagagaaacagaagcaataggagatacatgtctacatctatatttgtatatatctgtataaagagatttattacaaggatttagctcattgattatggaggctgacaagtcacaaggccttcaaggtgaatggccaagttggagatccaggagagccagtgaagtagttctgatccaacttgccagcatctggtatttttaagaatagccattctgactgatgtgagatggtatctcattgtggctttgatttgcatttctctaatggtaagtgatgttgaactttgttttatgtgattgttggccacatgtatgtcttcttttgaaaagtgtctgttcatgtcctctgcccacttgtttatgggttgtttttttcttgcaaatgtatttttaagttccttatagatactggatattagacctttgttggatgcatgaaatatgttattggtgtaaaatacacactggatttcaaaacttagtacaaaaaaattaaaaatatctaattaccaatttttatacagattacatgttaaaatgataatttatattagattaaaatatatcattaaaattaattgtacctgtttcttttactttataaatgtggatactagaaaatttaaaattgtatgtatttacattatatttctactgggcagtggtggtctaaaccaatccaacgtgaagattttatcactttaatctttaagcaagcagcatagctttaggttttgaaatttgagagaagagacaaatgaattaaggaactgttcaggttttgaacagaagtcataagaaatatagaagtcaagacttgctgggtttgtgaaactttgaccatcacagtctctctgggcaaaactgaaaaatggcctctgtgcaaagatcaaatcctaggcaggggtaaaggtgaaatcaaaggtttggcttaacaagacgtcagatttaggggtgtctcatagatccccaagataatagggctttaaaaaatcataagagaattggcccccggcagtctcaaaggtggaccaagggcccatctcaggtcagtgtggtttgtaactaatggatggggtgaactctgataaaattcaaagaaacccacaaggtattggcagagtgatggaagcgccactggcttgaactaaaagaggcacagacttttggacccccttccccagccttccctggaggaaagcaggctgagaggctacttagttgcaaacctaggccatttcttttccctgaggaagtctcggtagaagcaacagcccagaggacagagctaagggctggggagaaggcaggaagcagaagtgagtcctcctcaaggcaaggcagcaggagcctgctggaacccgcagtggctgctgcctggctccgccacctctcttgttggacaggtgcccactggggatgtcctggctctgtctcaccattgtcggttgggtgtggagaaggctgttgccttgtctctctagttcgcaggtcttcagatgtaaaggaaatacccaagcagaagcctcatctgtacgcggacatgctttagatgatgagacttctgagcatcttgaaagagctgagtgtatcgtgcatgtgtaaatgacctgtggccagaggacggttatggcggattaaagacggctgtaggttcttcccattgagagctggggtctattttccatctctttcattctgggactgctttgattatggagtacagtggaggtgacactgccagttgccaccttgaatagagctgacggcttctgcctcgctttcttggagccctaagctgccacgtagaaattccaacgacttcactggagggaccactcagagaagtgttgaagctgcatgagagaaggctcaactgagcccagacttccagccacccccgactgcatggtgtagacacatgagtgaagccttcttagagcctccacaccagaccaccctccacctgtatgccactgagcaaccccacggggagcagaagaaacactcaacctgccgcaattcctgagttctgtggattatgagcataacaacatgactgttgatttaatctacatttggggtggtttgttatggggtaatagatatctgggacacattcacacatatacatcctagctgtgtgacctcgaacatgttacttaaggtctctgacatcagtatttttatcaacaaaattgtaataatagtgtctacctactatgggtgttaaatatatgtaagaatatatgtaaaataatatatataaaagtaaaagcagctagcatatgtttggatcttaaatgactttgtgttcgatttttactttttttttttttttttttttttttgagacaagagtcttgctgtcttgcccaggctggtcttgaactcctgggctctagtgatcctcccatcttggcctctcaaaacactgcggttacaggtgggagccatcacaccagactcctttcttttgtttccctggcatgcccatcctcccacccctggcaatataaataatatcagcaagtctgtgtgggcttaagataccatagttttcctgatagatatgtatacacatacacacacatcacacatatacacatatacatgtatcaggatttaaaatctcattaattttataatttataaccacttaccacttttataaaagtggggaggattccagtgttcttagttcaacaatggattactgttttgtttgtgtttgtttttttgagacagagtctccctctgtcgcccagcctggagtgggtggggcgatctccgcctcccaggttgaagtgattctcatgcctcagcctcctgagtagctggaattacaggcacgcaccaccacacccagctaatttttgtatttttagtagagactggggtttcaccatgttggccaggctggtcttgaactcctgatctcaagtgatccgcccacctcagccttccaaagtgctgggattacaggcgtgagccaccctggctggactactgtttttgttattggtagtgatttcttgtcaccgtgctagggtggtgcatcagaaataaactgggctttttagtaaaaactcggaaatacatggtttacctctgtaaatacgggatacttggcaggagaaattgtacctgttgaaacttagatggcctcagctctcaaaagagactggctacggcaggacggggatgagtgttgtaccggcacccagtgcactaactgtcattactaaaatccctgtcgtgggaaaggcatgcctcgtgcagtgcccaccctctgagactcaaaaatgtagttcacctccgcgacctcaccccttcttcccttagcatgtgaaaatgacggcttggcagtttcaccagctcacaggagagcgtccagctgctctgctcctggtataatcctgggcctccaaaactgaaacgagcacatggtaacgcaagcggcaggcatgctcggggtgtgcaggagatgcaccggcttgtgtgagccggtagggcaggacgggcgtggaagggtccacgtctttagtatgcatgcttagatctagcgttcctgttgatggagtaatggttctcgcattgaccagatccggggcttcattttttaaacctcattcgtccactccccaccccagcctggtgtgcgcaccctttgatggggcggggataggcgagatggtcctgtggttctctgccttcttctggtgaattaaaatccgatttggaagagagaagggcagccagcaccagtatgcacagcccccggccccagagacccgggaaggagtagggaggccgggccgtgcgcggaggagtggccgctgggttggaaacccggcccggcagggagcggggaaggcgcgctttcccggaggtcggcgcggggccggggccggggccggggcccggagcggggatgggcgggcgcagccgggattagctggcgggcgagggcgcagcgcagggaggaggaggggaggcggcgccggcgcgggcggggcggaggatctggagagggaaggggcgtgcgagccccgcggaccccgggcgcgcccgggccgcctgagctgggccagccgcgcggcgggcgcgggcgcgggcgcgggcgcgggcgcgggcgggtggggagccccagccccggggccgcgggggcgcgtgaccggctgtctgcgtggggcccgcgcgcggtgcctctgcctgacggtgcccgagcctagcgcggagcctggcgcgggggctgcgagcacaggcccggggctgatcgtaatcgggtgagtctcatccggcagcagggctcgccttctggccgctctgcaggcgatgtgcgcggtgttctccgcccgcgggccggctgcgtctggcccgggcttccctgcaggcactcgggaagcgtcaggccggccccgggcatggctcacgcggggaagcgttcgccgccaaagggactccttcgtcactgcggtcgctcctgggacttgctggtgttgggtcagggcggtgtgagtgttccgtgctgaggagcggcttcccatggccaccctggagtgcccctgtgtgtccccccatccagaaaaccagcctgcattttaacccgttcagagtacagtgcttatgtcagacagtcctgtcaactaggaatagaaaattttgaaagctgctgtcactgacattagaatttctacaaagcagtgtggcagaggtttgtgggctgtcaagaagcaacctaaaacagtaactctggatgatgattttcctgacagctggaatggagtcatggagattggaactcacccttaacctccatgcgccaacaaatgagtgcagtctagtttagtgactgcacttcagtccaccctacgaagacctgtccccaaatcaacagccttgctctatttaaacagtatggacaggaactagtatagaacttgcatgtctatgtttagaagcttcatggacatgccaccatattcaagttttaaaatacctgtgggatgcatcctgtaagttgtgtacactttcttagactgtgtaggatacagaactagtccatagtttataggggattaaagaggttcaacattatgcatgagggaccagtaaccaatccttggttagagaacagagaaaccaaagaaccaaaacaagatgtgaaagagaaaaaaaaaaagaaaaagacaagaaagggattttgtaggctctgctgttaattcatgatgttagtaacttgtgccactggagagacaggcaggtcagtggcctggttcctcgaagaaactctgtccctatcttctttgtgctcttgggcaatcattgagttacggacttaaattcctgttcacctcgtttttttgtgaattgtgtggtcaagtttgtatgttattacactgaactctgaagctcaagaaattgcttaaaaggagatacagaggggaaggtcagagaggaaaaaagagggagaaatggcatggagtaggggagttttaaggcacctaattcgtaataattggtgtgactgttacccaacttcccatttccccctgccctgcatcccaagacctcctgggctcagctctgcgtccaagacagtgggaagcctggtcctggaaaggatgtggtgtgatgtgaagagagatgagttcctccgttttgtaaataattttctccttaatttgaaaagagcttccaccctttcccctgaaaaagagtgaatttcctagaggaataaattattcattgaaacaaactcgcatgcgtcccattttgaatttggcttcaaagttgcacaaaagcaggaggaggagctagaagcaggatagaccgtcttgagcagagcagatgctccgtttggcggtgaaaaccatttgggggaatatcagctgcccaaagaagagctgtgactttttaacgagtaaaacgttatccaatagtgtcttgaatctggggaatattttcatgtcaggtcacgatgtaatcctatgtttcaggcataaacattcagagtaattctgtagtgaaaatgagttccgcatttgagttgctaatttcgtcttcgccgtttgagtctttcaaccgagggcatcttttgtgtgacgagtgttatttcaggtgcttagcttaaaagatgaataaggtgtcaaggtcacaacaaaaagttaaaatgtgaaaagatctatataatacaaaatgctatgggaggtccaaagaaacaagaacacagcatcttcgtagagtagcaggtgatgatgataatagcagtgagaggacagtgcggtggctcatgcctatagtcccagcagttttggaggccaaggcaggaggatcacttgagcccaagagttcaagaccagcttgggcaatatagtgagaccccatctctacaaaacattaaaaagttagccaagcatggtggtagacacctgtagtcccagctactagagaggctgaaggtgggaggataacttgaggcctggaggtcgagcttacagtgagctgtgatcctgccactgcactctagcctgtggagcaaagcaagaccctgtgtcaagtaataataataacataacaataataatagcagtgagcaggtaaacccgatttatgtagcactgactgacacttcatatactttatctacagatgtggacactgaattcaggagaggaaaagttaacttgcttaaagcctcagtggcagagcaaatttgaaccccccattattattctgtagatatgtatcacaaaagaacaatgttttagctaattcatcatgctgagttttaaaattatttctcagtcatatattaactcctataccagtatgtttttcttagtgttcaaaacaaatctatttgatgtaacttttagttgttattttatgtcattagtatttgtatgtttacctaaaaagttactgagtcacatgtaaacaagaaataattaatggcttgaaagcaactgaagagggctaaaggtaaagcagtttgtcagcataaagcgtgtcctttattcttttctctggggccctttctttaacatctttatcctcagagttacctggttgtccgtaagatacctaagcaacaaagagaataaaaacaatcatataattctattattctctcttgcatgagacgtatctatggaaggtagatgttctcgccaatctgtacatggtaattactttgttttaaaaattctctttgttggctgggtgtggtggctcatgcctgtaatcccagcactttgggaggccgaagcgggtagatcacttgaggttaggagttcgagaccagcctggctaacatggtgaaaccctgtctctactaaaaatacaaaaattagctgggcgtggtggcaggcgcctgtaatcccagctactcaggaggctgaggcaggagaattacttgaacctaggaggtggaggttgcagtgagctgagatcaattaggtagccttataatcgaaagcaaaagcaaactttttaaaaatgcattttagagtggtgttctaactagaaatattgaaagttgaagtttttcctgattcatgaccatatcttatgttaatatatgttttatttgtaagggaaaataagatttctattgaagaacagaagttgttgattattaaacatcaggaagatattttgactagaggaagtaaatgttttaagcggttcattgaaaggacatttcaatgattaacaggaactgtgctacaccagttaggcttaatagtttatttaacatctagatatttcttctgttttagttcttcattaaattttaatatcttctaactcttgaaaactcagtatacccacaaacagcaatgctagattaaagcaagttaggtgtctgtgtggcttctgagtctaaagaatttgatgtttcttaattaatatgggattaatgatttttttactggaggagtggttgggttttgtaagtaagtcccttgtccctggtcaagggacaactgggacctgaaatccctgaaatactgtgaactgtttggggcaacttttccttctctggctgagtcacaaaaagttgatgttgtcttcagttcacataaaggtacatataggttaatggcaaccttgattttaagaaaaagaaaaatgatgacatcctaagtctcagtttcatcaggatggggtgtgtgtgtgtgtgtgtgtgtgtgtgtgtgtgcgctcatgcacaggtgggtttggagggatgtggcagaacgagaggagcaactttgtataaaagagaaattttaaaagtcttaatgaataaaactatattattacattagggagactcgtcatgttttattttatttccagaagaggactgtcagaaggacgtagaaggcacggttttactgtgaggagcaaagattctttacctacgcattttacaagaaatgtgcagaaagccattgataaatatacctggtaagaattcaccttgcttcagattacaaaatcacaaaatgcccgtaacaaatgtgggaaggaagttagtgactggccatgaatttctaaaagtaagatgcagttttatttttaacctagtgtaaacatcacactgtaaaaatatttcaaaattagtatactgtgaaattaataaatatatttaatgaaagaaagaggaagcaggctcagaaaagtgaagccacttagccatccaagcccttccagcaaatgtgatttctttgctcatgttcattcctgcagcaaatccttgtcatccttttcctccagcggaagccatacacccacgggagcccacacctcttggtctgggtcggccacacagagctctaccaccggctcatccacggagaggggctccgtttattcctggagagatgacgtatgtctcagaatattttggataatcttgtaattacagtttatagtgaagagttgcttccttatattcaaaattatttttaccaattataaaagcatgacctattgcatacatacatgtacatacatgtaaaagcatgtacatgttacatgtgaaaataatagatcacgaaccgtggaggaaaacagaactccctcgtgaccttctggccccgtcttagctgcccgcagttttcttgtttccaccctgcagccggctctccgggtgtgtgctccttgtgacttcttggatggtatccatggccggaaattcaggacttgaataagaaagaaatgctggaaaagtaaaagctgtggcagccactgtgattagagaactccccgccagtattcccagtcggatatttcaccttcaccccctaccgctgggggcgctgttgcctctgaactgcttttgtctgtgtgagcctgggattctggctgggcgagctctgcctccactgctccagcttgctcaggagctcactggctccagtctcctccctccccctccctccaagggtctccgtggatcccaggacacagccctcctttttaaggcccacctggctgcagcaccttgggtgttctgttttacctcgtttatgctgggtgttttgttgttgttgttgttgttttttgcttgcttgctttctctctctctctgtctcttttttttttttttttttttttttgagacggagtctcgctctgtcgcccaggctggagtgcaggggcgcgatctcggctcactgcaagctccgcctcccgggttcacgccattctcctgcctcagcctcccgagtagctgggaccacaggcgcccaccaccacgcccggctaattttttgtatttttaatagagacggggtttcaccgtgttagccaggatggtctcgatctcctgacctcgtgatccgcccgtctcggcctcccaaagtgctgggattacaggcgtgagccaccgcgtccggccttttctctcttttttttttttaagacagagtcttgctctgtcactcaagctgaggtgcagtggtgccatgtcggctcactgcaacctccgcctaccaggttcaagcaatactcctgtctcagcctcccgagtagctgggattacaagtgtgcaccgccatgcccagttaatttttgtatttttagtagagacggtgtttcaccatgttggccaggctggtttcgaactcctgacgttgtgatccgcctgcctgggcctcccatggcatgagccactgcgcccagcctctttgctttctttaaaagtggttccccactcccactgcacatgggaatccgcttctgtccgcagctgtgcagctgtgattctcaggggagccggcagggcaggtgcaccgagggggtctgaaagggactcagctcagcactgctaggaggacctttcacgcacgcagctcccttacttaggggcagctgcctccttcctctcccttacgcccactcaccaccatccctcaagcccgccttccttggtagaaggctgagcaccactgctttactctgtccaaattctaggattcttttagtacaacgtttaatggaattaccagggaaattcgtataacttccattaatactcaggcctcaccctaataaccacacttcttaggataactaaggatttttttttccagttcattgatttaaggagattaatggccttttctacaaaagtaattttcttttctgtggtatcaccagaagaaaaaaaaatcttgtattttgcaggtgtgcttaggtgtgtcaggcacagctctgtgaggagctgcctgtgtttgcagacatacagatgtggacgtgtctgtgtgtctacgctgatgtctgtggcagtatgaacacgtccatctatacctctatctatgcaaattcttgagtctcataacttccgtggcagaagttttctctatttaacagtaaaagaatccgaggctcagaatgagatggcatttctcagaaaggtaacagctagagcacaggtgtgtctgactgcaaagccaccatctttttaccaagtgatgcaccctcctacatagtgggtgacagtaaatgtataagtagcgttgatccagaagcccgcagttctgtaacttgcagtgttgtaaccaagtgtgcatttctgtttaggaatttgacgaagccagttcacagtcagtgcagcggttactctgggaggtggaggaaatgttatttgaagggaaagtgaaccctcagacccagagtctgctggccgaatgcggggagtggacaagaagatccctccatttgaggtgggaccttggtggtggaagttctctggggtgggttttccaagcacccacccctgacctgcctcgatacattcagtacatttggtgtgaaagtgcctgcccagtcagaatatggatgcagagcgcagtccttcactgagagatcactttcctcttacggcgtctgaggaaatactgagacattccagtactcaagcgccttttaatttgtgagaagcaaattcaggccatcctgagaagggcatgacacatatacgaatgcaagaatggtggaggccacctcttaccttcacattcactgtgtgtgagcagcacatgtctgtcttcatcacagaacacagcgagggtgggcagagatgatttgctgaacggctggatagatgggtcttcccatctcacccattccttatgtagggaggagcatgtgttacttttcatatcaaagatggagaatatggattgggtatgaaggcaagcttttcttttctttttgctttttttttttttttttttttttgagatggagtcttgctctgtcgcccaggctggagtgcagtggcgcgatctcagctcactgcaatctcagcctccttggttcacgccatcctcctgcctcagcctcccgagtagctgggactacaggcacctgccaccacgcccggctaattttttttatttttagtagagacggggtttcaccgtgttagccaggatggtcttgatctcctgaactcgtgatccgcccgcctcagcctcccaaagtgctgggattacaggcatgagccaccgcgcccggccaaaggcaagcttatctttcagtcactcagccaacgtactgggggacagtttatcaaagttacctgagttcctgtggattctgtctggggagaatgaatcagaacactcatgtaaatgtggctggatttcctggttacattcactaggtaacttttacagaaatcttgaccaactagggttgtttttttttttcttttcaacccttaataagccacctgccctaaagagtatgatatgtccactagatactagttgtggatactcacttttctggggatgatcactcaccagaaattcgggagctcacacttattcttgtcactgctgtcttacatcattgatagaaatggagggaaggtgggaaaagattgtcaggtacataagccaagtgtgcatatttatatatttgtattcttgttatgtttgtgtttaactgtgtattagttaatatgtatggagggcttctttgtgcccagtgttgccttagacacctgagtctgtcatatatgatctctaagccattcatcagccctgcaaggtaaccattattatcctgttttgcaaatgaaagacaaacaaatgaaattagcctgagaaccttgcctgagactgagtcagtggaagaacagtctggcctaaactctcaaagtcacacttctgtgatgcgtgatgcttcccacgttcccatacacatcttatcatacacatgccttcaaaatcattgtctcctacttttaaaatctccaaacattttccctttgtctgatcaaaaatgtcagtagcttctctttgacctcgcagagtattaggaagacagctgatcctgcccactgacaaaggcgtccagcatttccagggcagcactcctgcctccgcagtccacagacccccgctcagtgcctgcggacacagcagcaacatcagagagtatgttcagataagtgactctcaaaaagtattgttagctgtattttagttatactttttcatgtttatctcatctataagccttggctccacccattttggaaatttagattctgatgaagggcaggtacagagaacaatttttataagaagcttttgattctgaattgatgataggtgtatatgtgtgtatatagagagatgtgtaatatatatatggaacacacatgcacacacatggtagttaccttccatgtttgttccaaaggcgctgtgaaaggtggactgggtgcaggatggaaaccgcctcactgtgatggattataagcctccaggcggtggcagcaggagaaatgaagctctgtcctgtcgtttctgttcactagcagattttgatgactctatgccattcacacatatttggtgtgccgtgacacaatgcagtcctttcactgcaaccaaagagggtacaaactcatagaataatttaggcttttaagaagcccttaaaatgtttaatgatgcctgtattaaagtgtttttaaggacgtgagttttgtccaatgtaatattcaaccgttttgggagggggggattctgtactttacagataattgaaagatccgccatgatcgtttaagcattgcgttcttggtgttctataaactcccatgtagaatctgtttttttcccataggttgtgcatttctggctctcaaatagtcccagcagcactctcagcctctgccctgccaggccctgatgacacaggggttgctgacctaacggcacgttcatccctggaagaagaggtttaccatgtggatggaaagattgaggagtatttcgcttttgacagaaaagaggagtaaatagaatcttatttgacattgacctcataaaataatattaatttatttgacatttattgttatcgtatgctcattaagtgttttgtgtattttttactcacccaaaagatttctgttcttttgagagtaatgtactccccagagcttttggattcctagccagcggtgcacgtgcgggagcagcgaagagggtgttcagtgcccttgtaaaagcagacaaggctcctcgcagccctggtcctgggggctccaggttccccagccctggctgcccaaaagggcctaaggggagttcctgcctctgtactaaattcgtattttgttctttttttttttttgagacggagtctcgctctgtcgcccaggctagagtgcagccgtgcgagctcggctgactgcaaactccgcctcccgggttcacgccattctcctccctcagcctcccgagtagctggaactgcaggcgcccaccaccacgcccggataattttttgaatttttttttagtagagacggggtttcaccgtgttagccaggatggtgtcgatctcctgacctcgtgatccttctgcctcggcctcccaaagtgctgggattacaggcgtgagccactgtgcccagccttgtattttgttcttaatcaaaaactacaactattacatgataaaactttgccccgtgattgaaaattggcacattaaaaagtaacactgataaaacaagtcttaacacatttgagaagactgaaatcaagcatcttttctgatctcagtggtacaaaactgaaagtcaataacaggaagaaaactagaaaactcacaaatatgtgtaaactaaacaacctgctcctcaacaaccaggcagtaggtcaaagaagaaacctaaagggaaatcaaaaaatataatgagacaaattaaaatggaaacacaacatattaaaaccaaacttatggggtacagtagaagcagctctaaaagggaagcctatggcaataaatgcctacattgagaaaaaagacatatctgaaataaacaacctaactttatacttgaaggaatgagaaaaagaacaaactaagcccaaacttagtagaaggaaggaaataacaaagctcagagccgaaataaatgaagagactagaaaaaaaaagaaagatcaatgaaaccaggagttggtttcttgtttttattcatgtgtaatggaaaaaaattatatatgttaaaaaagaacgatgctgtttaacaaagaatgtttattaatatatgtatacatgtacatacgtgaatgtgtgtagatagaattattttaactctaagcattgatcttttagtaattggagtgggtttttattcttagtgatgatgaatgtcttgaacaaaaaccagctcagcccggtaggaaatggcgcaaactcggacttcctcctgtttccccgcgtgactgtgtcaaagatgccgtggcagcagaagtgtttgatcacgtctggacaaatatggtagaacttttggaagagctgattagaaaacactgggaaactacactcacaggtacttacatgcagaatttagcttaatgaaaagaaaaagtccctgttcttcggccctgggctcctgctccccagcttggccagacctagaacgtgaccagtgagaagacaagtgggtgttctgactttactcatgagtgctctttagtcccttcaaaaaggacgctattgttttttgtgttataaaaaataatgcagggctggctgggtgcggtggctcacgcctgtaatcccagcactttgggaggccgaggcaggtagatcacctgaggtcaggagttcaagaccagcctggccaacatgatgaaagcctacctctactaaaaatacaaaaattagccgggcgtggtggtatgtgcctgtaatcccagctactcgggaggctgaggcaggagaattgcttgaacccaggaggtggagattgagattgcagtgagcagagatcacaccactgcactccagcctaggcaacaagagtaaaactccatctcaaaaaaaaagaatgcagggcaggcatggtgactcagaactttgggagaccaaggcaggagaattacttgaacccagaggttcaaggccagctcagcttgggcaacatagtaacaccctgtcttttcaaaaaatacaaataaaaagttagccaggcatggtggcacatgcctgtaggcccagctactcaggaggctgagatgggaggaccccttgagctcaggaattcagtattgaaagtgagcactccatcctgggcaacaaagcgagaccatctctcccccaaaaatagcagtgcatatgcagtctggaaaacacacagatacacaagaacaaggctagaagtcatgttttttgttatagtaaaaataatttacctaactactctctaataatgagatatttgtttttcattgttcgtgacattatctgtaatgtaaaatgtaaacattgctaattgaatcatgctttaatcctcttacatacaaaatattctctaaacttaacattgaacaaaaacaaatcataaaaatgtcagtgatggacattaatgaccagttttattaatcaatttgtacaataaggcaataatcacgttaacctaaatcctgttctttttccagtatttaaggaattagttgggctttatcatgtgctgagaatctgtattgcccactgtgtgatctgcttctccaagccctgcaaccacagttccagcagccagttgctccacaggggtctctgccctccgtggtaacatgtggagtggccgtagcatgggctcgtggtagctcaagcacacatattctctttcaagagtgaattttaagtatttgtattagataatctgatgtttcttgtaatattgattcttctgttgacacagaagggaaaaaacagagagaaacattgaaagtggctggaaacagatttccgcacgtcctcgttccacacgctcacgccgatggagccagtggccccccgtccggacacgccgaggctcacggcatctccctggcttctcgtctgaacccgccccaggtcggtgctttcacacccttctccctcttgccttcactctgtgtgtctgtcacctcagtttgtcgttctgttaaactgcagtactgagatatttggggctgctttccacgctgcccgcagaggggtccatgcaggctttccatggtaacttaaagggaaaccttcacagtgtcacaatgcctggagacctggacgtcctgcctatgaaggacgaggatgtgctcaagttccttgcggtaggagcccacgcaggcggcaccacccttggcttccagatggagcagtatatccacaaaaggacggaccagcgatggcatctctgtcataaatctgaagggacctgggagaagctgctgctggcagctcgtgccattgttgctgttgaaccctgctgaggtccctgtcttgctccaggaacactggccggcaggctgtgctgaagctcactgctgccaccagagccactccagctgctggccgcttctctcctggaaccttcactcgccagacccaggcagccttccgggagccatgtctgctggtcccaggcgaccaccagcctctcagagaggcgtcttggctagcccacctcccattgctctgtggaacacagattctcctctgtgctgtgtggaagtcgccatcccgtgcaacaagggagctcactcagtgggcctgaaggggtggctgctggctcagggagttctgggcatgcgtgacaccatcccccaggaacacccatgggagtccacgcctgacctctgcttctgcagagaccctgaagagattgaggtggaagagcagcctgctgctgatgcagctgtggccaagggggagtttcaggggaacagattgctccagtgcctgctgagcattgccgcccagcccgaggctgcagacccagcccctgcacacactgccgcccaggttgagggtggagacccagcccctgcacgcactgctgctcagcctgaggctgcagactgctctgaaggtgcaggtaccccctgtgcctattcagccgtccctactgcagactggagcactcagcctgccaggcaagcctgttctgcagctcccaatgctcaggcccctgaatgaggaggatcaaccactgagcggtctcaagctgttcttccacaggccaccagcaagatggaaataaggccgatggaaaataaacatcagtttctatttaaaacaatgatattcgggtctgtttgcaatgtgattatttcatgaagtttaacagaattaccacatggcactgctctgagatgtgaagctgttttctacattttgggagattaaaaaaatgctttcccctaatatttcgagctagtttgaaaattataaatgttctcctttctttccaccaaagtgataaaagaaccaatgagtatacattgggcttactcagcatttattggttgtagttgaggcgttttgaggagatacagaggtgaatcctagtgatacaaaagccgtgacacagggtcaggtgcaatacattctgtgagggtcgcgcaaaaaaaaacaaaaacaaaaaaaaccttgtagaagaatcaaagagagagtgatttgttctgattacaggagggggattggtcttttacattgaaggtaaaatttgagcaggaatgagcaaggctcttgtgggagagaactctgggtgggccatttcaggccaagcaaaggcgtggatgagtaaaagatggggcctgtttggggactgtgactgggctgagtttaggggataagaaactggcaactgcagcatagtggcaagaacaggggattaggaatcgagaggcctgagaggagtattcttctggatatgttgtttagcttttctgaactttagtgtccttagcttataatgagattattatcttgtccaagggattattgtgaggataaaatcatagaaatacccaagagctcctactacagggtccagcacatactgagcgcgtaataaatttttcttgaattgcatttttattgagagatgtggtcgcaggtgaggctggaaaggatacacttgttcacgcgaggcctgtagtggtgccaaggaggttgtttccactgcccaccttgtggggggagcagagaacacgggtaaggcaggagtcctagtcctgagctacacagaatttatagtatagttggagggagcccagccatgtcaaacaacacacacacacacacaccacacacagacacacaccacaccactcatacacacaccaaacacaccacacacacacactgcacacatccccccacacaccccccacacaaacacacaccccacacaaacacaccacataccatacaccacgcacacaccacacaccaaacacataccacatacacactacacacaccacgcacacacaccacacaccaaacacataccacatacacacactacacgcacacacaccacacaccaaacacataccacatacacacactacacacacaccactcaccacacacaccactcaccacacacaccactcacacacacactgcacacacccgacacaaacacaccacacaccaaacacacaccccacacaaacacaccacacaccaaacacacaccacacacaaacacaccacacacacagaaaatacataccacatacacacacaccactcacacacacactgcacacaccccccacataaacacaccacacaccaaacatatatcccacacaaacacaccacacaccatacaccacacacacaccacacactatacaaacacataccaaatacacacatacacacacactacacaccacacgcacaccccacacatgcacacataccacacacaccacatatcatacacacaccacacacatacaccacatgcatacacaacccacaacacaccacacatgtacacaccccacacctacacaccccacacatacacacacaccttcacacataccacacacactaccacacaccacacacacacctcaccacaccccacacacaccacaccacaccacacacacaccacatcacaccacaccacacacacacacacacacacatctccccacatgggagacagtctagctgatagcagagtgaaacttgcgtatatagactactagttctgggcttgatgtctgcatttaatactccgtgattgtaaatcagtccctgtttctcaaaacctcaatttcctgatttatgaggtaggaagctgtgagaattaaaggagataaaacattttgtgtagtgtctggtgtagagtggacgttcaataagtgttaccttttgttataatcagatgctaattatatattaatagtctatataatcctttgtaattagatttttgtgtaattttttaattagatgtaatgttttgtaattatatatattttataatgagatgtgttttggatcataagtcctctgggagtcagaagaaaaatatacttttcacagagtagggtaagatatgaaccaagccctaaatgacaggtgtgattcgttaacatgagaaaggaagggaggctcttcaaagcaaaagcaaaactgcacctggcgtgggagcttctaaacccgcgatctttgtgagactgaagggacacaggcctgaacagaacctgtgcttcggggagcagtggggagaacagagcgtctcagaggcttgtttcactctctagtgtaagtcttctgtgccttttctgttctaaagaaacttttggaattgctacctgcttattgtatttttttggtctctttaaactgctctgacaagttcaatacaacatttcccacttaaaaaaaataggcagtatgaatatcacacaaagagcagtggatgagcctttaaatatcaggcaaaataaacagaccagaaaaatatggacattctagaagctgaggcattttttaaatagctgttttgtttttataattactttgtttggataaatgttaaaaaaaaataagtggacagcaaagttaacagaataaaaatagagcctgctttgaaatactcaaggtgttctagttctaattatgaaagctcttaagttattcctctacatatgattgtggttgccacatgtgctcatgaactagaacagaattccagtcccagaaatcctgttctcctacatctaaatatggttatttgaaaaaatttttaatttactttaagttctgggatacatgtgcagaatgtgcaggtttgttacacaggtatacatgtgccatggtggtttgctgcacctgtcagcctgtcatctaggtaaatattattttaaatcctagttggtcatattgtgggactgaagagggagttaagaattacttagcccttagctcacgctttctgtcatctcatttaattctctcaatagctctgtgaagtaggtatgatttttccccaacataaagatggggccattaaagctccaagaacaaagtaagctttccagaattacaaatcaggaagcagttagagctggggttcagactgatgctttcgagggtccaggccatctcaccgcttctgggaagagaacccaggcaagtgtggagaggaggagaggagaggtcccaggcaagcaggacaatgaggagccatgatgcccggcctgtgcttctcccagttctctctctgccttcctcaccctggagttaccagaggctgatacacgttgaccacaccagtgctcccttgccctccaacctccgggatctcagagcatggggggagactgaagcacggctctgcttccctgcagcctccctgccaggtcaccctgggctggtggcgttcctaccccgtgcagctaccctctccgggtgcaggaacctctctctcacttctggccactttgggccaggtgtgctcaatgtccccactgttaggagccttggggaattaaccaattcgttgttaatgtctcagcccacatctttataaaatatatcccctttattagtttttcctccagttagctggtgagtgtgccgggtgtttcctgctgatttcggacaagcatcagtcattggaacggcactgggcatttgtaattctttttttttttttttttttttttactgttctcagattcatcacttctccagcagtttttatagtgacatgaatggtgtcatgacaattcaagcaaaaccgcttcagcggagacctgcctattttgctgacagaacgcagtacgtatcagaatcagtagtagttacccagcctcttccctgtgctgcaaacactggagcactgaagactgcaggggacatgagatcacgaaggtcccatttaatcccgtgcttcagatgtgcctgagcacgtctggaagagcagaaacagaccctttagtaccaaccacaaaacagttactatcgtgtatttggtagggagagatggggaaaggggaatgtagtcctgaaattcttaatcttgtgggcttgactgtttgattactgacagggaaaaccttagccctctgcctgtggatgattcttcattgaaacagaaacagaaatgatgggtcttttcattcattcaacccgtgcttaggagtatgttctaggtgccagactgttctaggcagtgctcaactaagcacagacaggtgcgttccctgttatcacagcactcgcagctgagtagctcacaggatttccttcccaggaatgagaaggaggacaaagcatcgggtggaggggcaggtgctctctcctccgcaccgcacagactgggacgggcctcagacactcatggattatcaccttctgcaaagaaaacaccagtgccctggaggctgccttctcttgcttcagattcacagagactaaaaactcccaacatctatagtgacgaagttcttcggggaacaaaactgtgagtctcatttctttcatagtaaactaaaggccacggaggacctagatgcttctcagttagggtttatggatcatcctggacaaagcatccctacctagttttacatagatgcttttctaatgagttcattgagcatttaacattccgcttgctccagtggtctacttagctgtatcctaggacacaaggtcaggcaatgtccctgtcacacaggcggaatgagcctctgatgctgggggaccttgggtggatttcagtggcctcatctgtgaaacaaataattagctaatgcctttcaattacataattaatacttttcaaggggaggtttaaataaaataatgtatataaaatgctataaaaataaaaggactgtgtccctatcggattatctttaaggatgcatttttctctatgtgggagtttcagcaaagctgttgattgcaggattcacatcccgtcatggcctcgttagaaaggtgcctgtctcttgccctccagctaacttaccagtatcggccaatacttacattgataataatagctaatgtttattgatcactttctttgttatcagcgccaggtaaatgaattacatttatgatcttatttattccccaccacaaaactttatattgttgggactcatactatcccaaatctgagatgagggaacaggctaagcctgccggagatcatccccgccaggaagaggcccagccggacacacccacaagtgctctcaggctttagagaccacccactggacccccggcctgcaggggagctgttatcaggagccgagctcaggagcgggcggctgccaacgcttacctggcacccagactttttccagatgcagtcataacccccctttcagctttttaattggtgactgtttctttcacagtttgggactgatgtttccagctgtgttgggtctgctgtgctgattccttcgagatccctctccctcctccgcctcgcttccccccatgccagtcagcagcacacggtgccagtcagcaacacatggcaggctttctcctcctgccccagcctacctgggccccctgtcacaccttcatcaaatagaaacccatttatgtttcctactgagatacattcagatgccactaactgtacaaatccctctgtgttctgacccctccctccctgtgggctgctgatttttcagctttctttttattattgccaccctgaggagcccttttcgaccattcttcccaattgctctccctacacatggaattgtagtcccacagacagcctgtttgtctgtgtgcatagctgtgctctacacatacgagggaagctgtggcttcagaggggccagtgcccaccccctttggtgatgctacctcacctgtgtcccccggcttctcacccgcctggattctcacctgccagcctcactttccctctgacccccccacacaccagctctgcgtcttctcacctccatcctctgtctttcacttgtattgagataacattttcccatagttatcagagtgctataagttccctggggagcatccggataataccacacatagcagaaatcaaagacctcctgtgtgcccctcacgcagaaacattgaaatcacagctcttggcagatttcctgtcacttgccagttatccatgtacctgggtgctcagtgacatgatgatgtgttgcaggccgactggcgtggaccacatggcttccccactggttcaaacgtcacggagcaggttccccccgctagtcacggagaccagggggcagaatacagcagttcctggatgccgccttgtttctgtaagacagatttcattctatttcagtggaccatttaggttctgtattggaaaacaaacaaaaacaaccttggcacttccaagtgaaattagtaacatgagatctgagtagctgtattcaaatgccttcataatctgtttccagaaagtaaatgaatggcttatgagaatttacagggagtgagaggcttaattcaccgttttgtgaaataaaagcatgtcttgaactaaatcagaaattccaggtgtcaaggaaatctctgataggatagtggagcaaagaagagagcatgaaatttggtcaggagacaggcaggtccgcgtggatcctgccacagaaactctcttctatgacttggtgcaagtcactttaatctccctgagccttagtgttctctgtaaaaggggattaatgattcttacctctaaagaattgttagaaggacaaaatgaactcataggtgttaaatgattcctgacgtgaaattatgagctcagtaaattaggaccctggtcatttctatcggtcatttttacagctaacctttgctatgtctattgcagtggagggcaataccttctgcagtcagactcgcctcggccaggcagtcaggtctgcggggggtgtgctgtggccagcatgcatatccaggcagcccccaggtttacagccacccctcactccacttcacacaagtaacttgtctctattcattttatacaacacagaaggacccctgttgtaggaacataaagacatagtgagagaaaaaccctacctggggccaggttccctcctgcatgccctgtgccaccttgagcccagcactggaacccattcccagaaggcaagagttgcaaagtgttcatgtttaaccttagaataacatcattttacaaaaggcagcggagtgcagtggctcacgcctgtaatcccagcactttgggaggctgaggtgggtggatcacgagggcaagagttcgagaccagcctggccaacatagtgaaacctcatctctactaaaaatacaaaaaaattacctggatgtggtggcacgtgcctgtaatcctcactactcgggagactgaggcaggagaatcgcttgaaccctggaggccaaggttgcagtgagccgcgatcacgccattgcactccagcctgggtgacagagcgagactctgtttaaaaaaaaaaaaaaaaaaaaaaaggcaaacatcacattaaaaagtctgctacttcacaaatgcagaattacattttcttaaggttttttttatctctctttccctattatgacactataattttatcaggcttaatagtgcagttacataatcaaaatatatttcttcaggtatttatccttaggagacctgatccttagtaatgtctaactaaaagtttccaaatagatgagtgaacgattgagcatgtcgagattttcttttgtgtttttaaggattgcatttattttaaacaagaacatactatccttcatttagtacagaggaaggcatctacaaaaccgtgtgttgagtgccatgcctgacggtacagaacgatcgcgtcttcgagaaagaacagccaccctggaacggttgtcaaggcccagcacaacccacacgttccgggtgggttctctgtttcctgtaactttaattttgaaaaacatttgaaaaaaatgaaacttgtccctgattttatttttcttccagcagtcggatacgcctcgaaaaagttcattgacacaaatggaatttgctgctcacacatggacaggtcaaagtattttgacaggtcagcttttctccatatgtaaataaagtgatgtagtaagtgagatttcaagtttcagacagtgaaatggaagatgatctaccttgataagcctattttgctgtaggagggaatagcaaatgtttggggcctgtggcctgacctcagaaacctcgatcacagagcacacctgcagagacttacttacctgctgtgaggtcaagaagaggggaatgtccaaaagctctcaatgaactgggggcctcactcaaaaaaaaaaaaaaaaaaaaatgctgtcttaggagcagtgagtacctctgtctgctatagcgttttcatgctctatttctaagtgaaactctactctcagattctctttgaaaatctgatgataaaaatgcttgagaaaattaacacagatttgctaattactttataacacaaggttttacagataaataggtattctcagcctggtatgctgtttgcaggatattctagtttgaatacgggccagtgatgtttccagttccagaacagtctccaacactgttttcaaggcgttagtgtggcctctggagtctgacgttggatttccaccctcgctctgccaccggctgtgcaaccctaggaatgtcccaacctctctggccctcagcttcctcttttataacaagcagggtacataaaatcattattggaaaactgtgaaaaggatctagctagataccaggcatgtattgctcagaaatgatgaattatgaaccatttgtattataaataacctgaaatttcagggataatttattgttttacagggaattttaaacatataattctaaaaataaatttcgtaacatgtaagcattgcgtagcacagatctgtcgctgtccacatcagccctcctgtcgtcctgtagcatagtgatgtagcatagtgatgtcgagattcttcagctctgtaaagttctgctcctgcgctagtcgctctgggctgctgggcctttttgttgcttttcttgtatgttccttagcagcattagcggtcattcacatgtcaacagctcgttctctaaaaagcagccatgctacatggtcaggtgttgcttttatttatttatttatttattttgagatgaagtctcactgcgacgcccaggctggagtgcagtggtgcaatctcagctcaccgcaacctccacctcccaggttcaagcgattctgctgccacagccccccaagtagctgggattacaggcacatgccacgatgcctggctaatgtttgtatttttagtggagatgaggtttcaccatattggccaggctggtctcaagctcctgacctcaggtaatccacccatcttggcctcccaaagtgctgggattacaggcatgagccactgcgcccagcccaggtgttgcttgtaacacgattgtaggtgcttggggggaagtaggcgcccaagttagcttatcaatcatggatgggtgtatcaagtgctcactctgtgccaaggtctatgccaaaggctgggattcaaacagcaggggtgtttccgtctgtgcctcaaggagcattgagcctggcaggcaagctggaaaaggctgtgagaggggtgagcagcaccacctggatcccctgtcagatggctggagggtgccgaggcttcctagaggagatgaccatcacaagggatgtgagagagagggagtgagggctgacagatgactctctggatggccagcggcgggtggtgctgagcgagggaactggggaaattctgacgagttcacttttggggatgctgactacagcacgccgagtggaggtatctgggaagtagttggagcacacgtaagtagaggtttggagtgggaattgggttctgaatttgttctaaatctcactgttaatcattgaccaaatgccaagtcagtgtattctcttatcagtaactttttttcctttaaaatatgctagtcattgtttctacaattataaaaaataatacattatcgaaacagacaacttacaaaacacaaaaatccaccaaggacaacacagccaaggcccctgatctcacgacgtagagagaacgcggctcaaaggcgtgacctgtgatgttggtgcaatgaggcgcgtgccccatgcagacgtccccaggccccaggtgaggcacatgtggcctcacacacggatttgagcttgggagcgggaggcctaagtcttatccctcaaaagtcttgtccctcaaaaatggaaagctctttctttcctcctgagcactctgtcaacgtcagcccaccacgctgctcacacagggagtcgcctctctggccaccagctcaggcagcacaccacgatctaataggacattcaggaatgaattaaaaaccagagtggattcatggtgacaccttcggcatatcactcactgctttctggaagaggaggtgggggtagagctggtatcgggggactgcagtgacccccactgggggcgtccagaggagttacattaacacgtgcaatcacatatggccacttaactcatgtaggacccagggaacggtccatgccagtcatctgcgcctcactgcctcttaactactgacccaagacaaaagagctattagaagagagaatgcagccaaccaaatgcacagctccaagaggttttgcatctgtaacaacaagctaacatttagttctttggttcaaaatatttcccctccttaaccatttttttaatgcttcaaagttcatccccatttggggagtgggaagggtatgtccaggccccctcaggatcaggctggcttttcttcctttccaccaggtgcacaggcaaaactggccacaggggactccctggagctccatgcagctcggcagggcctgtgcagtccggaagggagggcagagatgcccagggctgtaggtgccggcctgtgcaatccggaggaggccatgcctggtggtcgtgagagacacgggccttggcacggaagtcctagctctgctgctgggtgctgtgacaccaggcattccctgtgggtctcagcttccatacctgtaaaatgggaataacacctcacttaaggactcctgaaataaaacacggagcagataacgcagtgcctggtgcataacaagcctcaacatatccaaggactcatcctgatcacccatgagcctacttaaggtcaaccctgcctcatttaaaaaacaaaacaagactgtgccttcaagttcaggtaggggtggccctgtccggggccaacccccgcctagaaccagccaggcttgtgctgctggagaggaatggccaagccaaggcactcgggaccagcactgagcagcctggtgagctctaagcccgcagagcaggcagggcccccgacaggcaggtggtgtgcaggggtccctggggcaccaagggacaggaaacctcaggagaaggaggccctttcacccgccaaagtggaaccttccccactgaacaccggatctcccagcactgtctgaccttcagtcacattttaaacactgaacagagggacagagggacctgtgttccttgatgtttcatctttgttcatccatcggtcgtcctccaaaccaaagtccagaagcttctgcactaatttcgaagtcaggctgaaccttgagtcatgaacaaaactctttcaattttcctctaagtcttcatggagctcatcataagcaggatcctcataaaggaatttctgaatcattccaatcagtgattctaagaaccacatctttctgcggtccttctgagtggcccagctgtgcaagagacatccccatgcaaaagcaaagccttgatagcacctgatctcaggccggatgttggctccgtgcaccctgcggtgctgccttccttcagtgacgcccacgctcctgccttcctcccagccttcctgatgcccttccccatgtaaccccgcatccgccttcatgatggcatccaacacggcccggctcccagggtcaggcccagacgcaccgcttcagaggatgagctcttatcaggaactctgagacagctactattgatggtcagaggtcttttctatatctgcagaagtgatcgagggtccataagagggatcttcctgtctttctgagggtttgttttctttttctctgacaagcaggcacatgacctccttgctacctttgcgtccaggtcaaaaagcactgggaactactaacttatcaacttttattatttctgtgatagaaaaaaaaaggagccaaaggggtattccaggtagtgggaaggatcccttaaagtacctggcattgcacctgcccctgggaagcaggagagctgccaggaagtagtgctccctcagcctcctgggccaggacccgcctctgcatggaagcttctcgtgaatccaccagctcgggaggacgcgtggcctgcacctccgcttgattttgggggagcacacttccttttccttaggaccctaataggcagtttttgcatatgactatttcctaatttatacaaaagtgtattaaaataaaatatatattttaaagtatttgcatggagtgtacaaaacaatcgttctgagtgggtgcctttgtaacattttaatgagaattaccttttgcttggtgtttccaggttcacaatatgtgcctaaatcttttcagaggacaactttgactttcaagaggagattccaagtgacatcttgaaaccacctcaccagaaccattggagcacctgtggcctcggcacactgcttatcacttgaaaaatggaggaacaagtgttatatttatctgtgtgtctgacagtgtgagatgttagaccgagagaaaagcaaacaaataaatcacttaatcttgaacactttgcactgtaaagagagtgaaagtcaaacccaccaagctgccttgctgaaagcatctccaaggttctgtaggctttgttcagaagcccctgatgtgtgtttgcagtccgtcattttatcaatgatacgcaaacataattagcatgtgtatgtactcacacactaattacatgtaagaatatattatctaggaatatgtcatttgtaactttgtactctgacgtattttctagtctcaccctattagtaattctgtcaaaatcctagacgctagtagatattagtatttgagacaatatgtcagagtctgaataagactcagcttgttctagtcatgctgagtttctcatatattttttaaaagtgcttccgccatgaacctctttgagaaatgtcagtggcaaaatctcccaagctaattttctttttctatgttccatcttcaaattcagacagttcacgtgaagtaccccacatttattgatcttagggttgaatataaacgcaattaaaagctatggcaggtgatgtcatctttattgtttacagtcgaagctcctccatgggaggggagcctcccaccctccacgtgccatcaggagctggcctttgcccagacgccaccactgcaatgacaccttcccagagccctcgtctcctcgcgctctgtcctgctctgcctggcttttcttcagagtgtgtttccccatctgacattactgtagaaaatggagcagagaacaggaaggggaattagcagagatgaggctccaggcatgtcttcctcttgtccctctccccactgtttctcttgattgtgattcaagtccttacactcatttttacattctcaaatctcaaatcagctaatttcctcttttctatcagataattgcatttcatcagtctaatttttactaatccaaactgtaactttataaggctatatatatgagcatatttataaacttagatttataaactatatacacacatatatgtatcatataaatgcataataaattactttcagactatttctggctgtaaggagaagggatcattgcctactagtagatgtctgaaattttaaaagatgtgttgagactaacattaatgttgtcctttatcacagggtgacaaaaatgacccagagccttgcctctgtttgaaaatttctccttgactttgctgactccatttcttttttcttttctttttttttgaaacggagtctggctctgtggccccggctggagtgcagtggcacgatctcggctcactacaacctccacctcctgggctcaagcgattctcctgcttcagcctcctgggtagctaggattacaggtgcatgccaccacacccagctaaattttttttgtatttttagtagaggcagggtttcaccatgttagccaggccggtgttgaactcctgacctcaggtgatctgcccacctcggcctcccaaagtgctgggattataggcgtgagcttccgcgcctggccagctgactccatttctatagcaatgagacacattaggcagcagcagcagcagcagcagcagcgaccaccaggtccatgcctcttttccgtggtcacagctccatgtgtccggggaagattgctaatgcttagtttcctgcacaaagcaaaccaaagcatttttgagaattttctacattattcctaaacattagcaatagaaacttttaagagcaaatgccagtcttaattcagcagctctcccacttgaggaatagttagatatgtgagtagcctggagcccatgttatagggctgctggttaggtgctctctggtgcatcattactgctcaaagcatgacccacttgctctttcagatccactcagggtattttatgtccatttccaggaaccatccaactccttccctattcagtccaaacttcctttttttttttttttacttgaagttcaggggtacatgtgcaggttgttacataggtaaacttgtgtcgtgggagtttgttgtacagattatcacccaggtattaagcctagtatccattagttatttttcctgatcctctccctccttccaccctccaccctttgataggccctagtgtgtgctgttcccctctgtgtccatgtgttctcatcatttagctcccacttagaagtgagaacggatggcatttgtttttctgtttctgcattagtttgctaaggataatgacttccagctccagccatgcctctgcaaaggacataatctcattcttttttatgagctcaagcttcgtagtagggaaaacaccggatattcagtctaaactaacattaaggtagggtatccaagataaaatgttttttctttgaaaaccactgaatatactttatggtagctttaccttgtttggctccagaggtttgcaaataagaatctattatttatatatatatattggtaaaagacaaaatattttttaaaaagtgatcttgagtcttctaaacattaaattggaagataaagtgccattttagagattacatagagacttggccctgtcattgattttaaaaatgaccttctcattgcactgatttttactccatgttaaagttagtattttatttatacattaaattagatttagagattagtaaataatgcttatatcaaggatggtgctttttaagctaattaggtaaaaattagggcagtgttttataatctactttaataaatgagtcttaccttagaattaatctattaaaaattaaaaaagaaaaattgaactacttctgagatagatttttaaattcagattagtgaattttacactaattgaattacattaattaaaatgcctgttagtttatccaaaaccaaagaaagaatgaagaaattttaaaacaatctaagaaaatgtaaaataccatagaaaactgctagattttgtgaatttaatataaaaggaagtatccatattgatattattctgaactagatggaatttctacaccaattcagaagtacgtttttatatatcatttggatattatattttttattgttttattataactacagatcattgtgtaggatttttgattccttaatttctaataaaatataaaagtgttaaaagagttttcaaaaatgtgtaacatttataaaagtatttttagattcccaatttttgtatcatttgtgcaaatatctctctattctgcagtttctaatacataggtatttattatttctaactacatagtaaactttccccagtaaattctaagtatatgtccatatatatttgcaaaggctttacataatttatgaatactccgttgtaatgtttgtttcagaagattatgctcctgtgtggtaatcatcatggatttgatttcatcaaacatttattaagcactttcttggtgtaagattttgttctaagcattatagtgaacaagacagtctttggcctaaaagaacttagattgtagtggaggcgacagactataaacaattaaataaaaacatgatacaggtcagttagcaataagtgctatgaagaaacaaagcgaggcaaggtgacggagtggaaggagctgcaactttccatcgagcggctggggaaggctgtgttgcagaggtgatatttgagcaaaccccaaagaagatgagaaaagaagcctgggagatatctggggagaaagaactgtagacagagcagaaagcatgtgcctaaacaagagtccacctggaatgtctgaagaacagcagagaggccagttcatgggatgcgcttggcaagggagtgaataatgggagctcagtgagctaacaggagctgagggactgaggtcccttttggactatgggaaatatgaaataagaagccactggagcagttgagttttggggatagaatgatataatcgacaagagatgatcctgtttcagtcagatgatagtggtaaggctgatgagaatcccaggactttgcatgtgttttgaaatttgagccaaaagatgtgctgttggatgagaggtggagtgtgtctaccaaaagaatcgagaatgcctccaggcttttggcttcacacttggaaggatggtgttgacactcactgaaattggaaagactgcaaggggaacacgtttggcagcatgaggggcaagttatgtgtgagatgccaattagatgcctaagtggagatattgagatatttggatatccacacttgggtgtggaggtgaggtatagactggatgtataaatttggggattgtcagcacgtagatggtatttaagaactgaaatggatgaggcaaccaagaaaatgagtgtagagaaatggaggaaaaagaagtactgagccttgtgccttttaacatctaaaggcctgggatgtgaaggaaaaccagcaaagcagactgagaaagaatggctggtgaagggaaataagagtcaggagaatgtggcgtcctcaaagtatgtgtgtgtttgtgcgggggaagtgtttcaaggaagtgatagggactcaagtatgttgaatgctgttgatgagtcaattacgatgaggtctgagaatcagactaaaggtctagccacatggaagttactggtggccttgacaagatctgctaggtgaatggacaaggcgaaagtaggcttgcagtgggtttgggagaaaagaagaagagagaaatccaagacagtagtcatgggcaagtcttccagggaatttttctgtacaggggagtagagtatgtgtgtgtgtgtgtgtgtgtgtgtgtgtgtgtgcatgcacgtgtgtttcctagtaaggttcatcttgatgaatgtcattattcagtataaaaatgttgatccaaaaaggaagatagctctagtgttctctggaggacatgcagagtgtattcccactggaaaattaaagaaaaagctgacagagctgagtgaatagtaagttataactcagaagcaacattcagagaaggctacaccttgtgaaggatgtcttcagagttcacaaaaagaacattgtgggggtgaaagttttagcttagaaggcaaaagatttcaaaaatatacagaatcaaaatgatgttaaaaataaacatggaggcattccactactgtttatgaaagaatagttcatgagcaaactgacctactgagaacaactataaaagctataaatggacaagaaacagctctttggaggcacgcgtggacacccacatccacacccacccagccccccaagacaaagcagcacaacttcaggaaacaaattgggagacaacaggaataatacattgagatgaaccccatatttgctactgttttctttccctgtatcaatatattttagattagtaatggggcatagaggccaagaaaaagggataccctcaaaatttgtgacaagctcactaggctgccaaaaggaatgatgttgggaaatgtctcagactttgaattgataatcttgaaggactacactctaggagtaagggcaagcttaatacagacaagtcctcaaaacactagaagcagaacctagaatcaatgaaacctctgtttagatccaggttatatgcctgtactttatatgaccaccagaaaaagtatcctctttaaagaaatatagcatcacctagaatttctattatttttatatacaatgtacagcattcaatctaaaattaagagacagcccaggatatagggccaagtgactgaaagccaagagagaaaacaaaattataatggacccacacgtgattaaaatagtagcactatcaggtacaagctaagaaacaatttgatttgcacattcaaaaatatattgaaaaacaatttcaagagagaactgtaatctgaaaaataatcaaactgatatcctagaaatgaataatacaatgactcaataattcactagctgtgttgaactgcagattacacatagcagacaagaggcttagtaaactggaaggcaggtcaatacacagtattcactttgaacaagcataaaaaatagatattccttaaaaattgtgaggccatgtgaaaaaatctcatatccgtgtaatgatagtcatagaggagaaagagaatagaacaatgcagtattgaacagataccatgaaagaatcttccaaaaatagatagaagacatcgatgcagtcatttaagaagctataagaaacacaagatagaaagcaaaacatactcaggtccatcacaaactgctagaaaccccaaatcaaaaagaaccaaacagcagtcagagggaggggggaaagactcattatcttcaaagaagcaacaataagactaatatttgacttttcaacacaagtgatggaagctgaaagacaatataaaaagcatctttaaagtgctgaaaaaaataattgccaacccagaattttatacgtagtaaacatatacctcaaaaatgagggcaaaagagcagtattttcagataaaccaaaattgggaatttatcaccggcaaatctgtactaaaggaaatacaaacgagagctcttcacagagtaggaaaattatcccagaaggaagtacaatgataaaagaagaagtaataaagatcagaatgtatacatacgtgggaaaatagaaaagaatacttactgtataaaataatgagtaatacagaattcagtatatatttgggattaaaatattatagaaatagcttaaaattgggaagggtttatttgctgttaaagtgttatagattcatcattgtccaggattactgttctaaggtagagttttataaagcagtgcgtgtgatatagcgagatgaaggcacaaaatactatcaggaatgaaaataggcataccactgctgattctatagatgtgaaaaaagataagcattatactatgaataacttgatttggtaatttagatgaaaattaaaactttgaaaaaatcacatcactcaagaagaaatagaaaatttgaaaagggttatgtctattataagacttaaatgtattattaaaagccttctcacaaagacaactccaagtcctgctgacttcattggttaatccttccaaatatttaaggaaaaactaataccactagtagcaatatcaaaaagctcttcaggcctgggcatagtggctcatgcctataatcccagcactttgggaggctgaagcaggaggattgcttgagcccagaggctcgaggttacagtgagttatgatcacgccactgcactccagcctgggtaacagagtgagactttgtctctctaaaaaactaacaaaaaagttattcaagatgattgtcattttgtaaggctaccacaaccctgatacaaaacctaacaaggacattacaaaaaaaaaaagtaaattacaataaagtaactgagaattataaaaaaaaaaaaaaaagcgaattataggccaatatcatccctgaactcccaagcaaaatcaaatcagtaatatatgaaatagataatacgtaccatccaaattaaatttatttcagaaatgcaagtttgatgtaccatgtgaaaatcattcagtgcaacaaatgatgtaaggaaacaagcatgggatcttctcgaaagatgaagaaaatgtctttataaaaattcttagtcaaccaggaagataagaatatcactgttatctcttcatgagtatctaggggaaaaaaacaactgcaaactgcatacttagtggtaattttattctgattttacttactgaagaagctatacttcctgagatcagataatacgaagtgtcagctaccgccactgttattcatgatacagaatatattttccaccccagcagggcaagattaaattattaaagggtcttaagatttaggaagaaagaaacaatttggtttttcacagaaaacatgattgtgtacatagaaaatccaaaataattacaaacacacttaaaaatgtgatttaacaacatcattgaaaacagtcaatataaaaattacgtgcatttctatataacaacagataatacaatttataaaaatacaatataatagattcaaaaatcaaatacctaggaataaatttaataaaaatgagtatattagagttcttcagagcaacaaaattattaggagatattagattatgtaatataatgtatatctggagggagagagtttttcttttttttgatttgagtgtattttattttattttattttttattatactaagttctagggtacatgtgcacaatgtgcaggtttgttacatatgtatacatgtgccatgttggtgtgctgcacccattaattcgtcatttacattaggtatatctcctaatgctatccctcccctctccccacaccctatgacaggccctggtgtgtgatgttccccatcctgtgtccaagtgttcttattgttcaattcccacctatgagtgagaacatgtggtgtttgggtttctgtccttgcgacagtttgctcagaatgatggtttccagcttcatccatgtccctacaaaggacatgacctcatccttttttatggctacatagtattccatggtgtatatgtgccacattgtcttaatccagtctatcattgatggacatttgggttggttccaagtctttgctattgtgaatagtgccgcagtaaacatacgtgtgcatgtgtctttatagcagcatgatttataatcctttgggtatatacccagtaatgggatggctgggtcaaatggtatttctagttctagatccttgaggaattgccacactgtcttccacaatggttgaactagtttacagtcccaccaacagtgtaaaagtgttcctatttctccacatcctctccagcacctgttgtttcctgactttttaatgatcgccattctaactgctgtgagatggtatctcattgtggttttgatttgcatttctctgatggccagtgatgatgagcattttttcatgtgtctgttggctgcataaatgtcttcttttgagaagtgtctgttcatatccttcgcccacttgttgatggggttgtttgatttttttcttgtaaattagtttaagttctttgtagattctggatattagccctttgtcagatgggtagattgcaaaaattttctcccattttgtaggttgtctgttcactctgatggtagtttcttttgctgtgcagaagctctttagtttaattagatcccatttgtcaattttggcttttgttgccattgcttttggtgttttagacatgaagtccttgtccatgcctatgtcctgaatggtattgccaaggttttcttctagggtttttatggttttaggtctaacatttaagtctttaatccatcttgaattaattttttataaggtgtaaggaagggatccagttccagccttctgcatatgggctagccagttttcccagcaccatttattaaatagggaatcctttccccatttcttgtttttgtcaggtttgtcaaagatcagatggttgtagatgtgtggtattatttctgagggctctgttttgttccattggtctatatctttgttttggtaccagtaccatgctgttttggttactgtaggcttgtagtataggttgaagtcaggtagcgtgatgcctccagctttgttcttttggcttaggattgacttggcaatgcgggctcttttttggttccatatgaactttaaagtagttttttccaattctgtaaagaaagtcattggtagcttgatggggatggcattgaatctataaattaccttgggcagtatggccattttcacaatattggttcttcctatccatgagcatggaatgctcttccatttgtttgtgtcctcttttatttggttcagcagtggtttgtaattctctttgaagaggttattcacatcccttgtaagttggattcctaggtattttattctgtttgtagcaattgtgaatgggagttcactaatgatttggctctctgtttgtctgttattggtgtataggaaagcttgtgatttttgcatattgattttgtatcctgagaccttgctgaagttgcttatcagcttaaggagattttgggctgagatgatgggttttctaaatatacagtcatgtcatctgcaaacagggacaatttgacttcctcttttcctaattgaataccctttatttctttctcctgcctgattgccctggccagaacttccaacactatgttgaataggagtggtgagagagggcatccctgtcttgtgccagttttcaaagggaatgcttccagtttttgcccattcagtatgatattggctgtgggcttgtcataaatagttcttattattttgagatatgtcccatcaatacctaatttattgagagtttttagcatgaagggttgttgaattttgtcaaaggccttttctgcatctattgagataatcatgtggtttttgtctttggttct

SEQ ID NO: 439 - DNA, 91761 bp, Homo sapiens
gctctgacgctgggatgatccttcagagttatcccaagtaggggcaacagagctgtgcctttacatcccagcattgaccagtgattgaatgcaggctgtcccagagagggagtgagaccttggtcaggccactctttttcagtcaaagtgcctcccaaaaaggactgacagcagagctctctctgtcaacagcacttctagcatccggtggattgtgtccctcattcctgaaggatgtctgggtggtacattacagcattaactatgtgccaccaacttgacatagttaggtccatttattcttcaatatttagggatggcttttttctcttttgattaaattttctttaaaaattttaaagatattaaaataaatgccttttagtaaaataaaaataaatattaagtaaataataaaattttatttaaataaaaatagacggccgagcatggtggctcatacctgcaatcccagcactttgggagcctaggcaggtggattgcttgagctcaggagatcgagaccagcctgggtaccacggtgaaactctgtctctatagaaaaaaaaaaaaaaaattagccaggtgtggtggcatgcgcccgtagtcccaactatttgtggggctgaggcaggagaactccttgagcccaggaggctgaggcagcagtgcgctgtgtttgcaccactgcactgtagcctgggtgataaagtgagactctgtgttaaaaaaaattaaataaataaaaatagattttgcttaagtgaattttttaattattaagaacatttaataaataaaaatataaagcctaatactttcaaaatctggctgccatccctaacctttcctaccctggtctctcctttcccctgtaggtaaccatttttattaattatccatttatctttcaatttatatatatatgtaaaattttaaactataaatacatatacacttatatacactcacactatatttctacccatttcttaatcaaagttagcatgctataaacactgttcacttggttttcattacttaacaacatgcctgaagagtatgccattaagagatcttccggctgggcgcagtggctcacgcctgtaatcccagcactttgggaggccgaggcgggtggatcacaaggtcaggagttcgagaccagcctgaccaatatggtgaaaccctatctctactaaaaatacaaaaattagctggcatggtggcgtgcgcctgtaatcccagctactcaggaggctgaggtaggagaattgcttgaacctgggtggtggaggttgcgatgagctgagattgtgctactgtactccagcctggacaacagagcaagattccgtctcaaaaaaaaaaaaaaaaaagatcctccttgttttgttttgcttttaatttttttttgagaccaagtctcactctgtcacccaggctggagagcagtggcacgatctcagctcactgcaacctccgcctcccaggttcaagcaattctcctgcctcagcctcccaagtagctgggattacaggtgcccacgaccatgcatggctaatttttgtatttttagtagagacggggtttcaccatattggccaggctggtctcgaactcctgacctcaggtgatctgcccacctcggcctcccaaagtgctgggattataggcatgagccaccccacccagccctttgtcatttctttttataactgcatagtcctcattatgtagatatcccattgtttatttaatcagccccctaataagagtcttttagattctttctaatttttgttattacaaagtatcctgcagtgaataaccttgtgcataacttattttatttttgcaagtgtttcctcaggataatggaaaaaggtcaatgcaaatgtcattttgctagatcttgccaaatccccctccatagaagttttatcattttgcacacactggtcacaaatgagtgcattcttccccacagttgtgtcagaaaaacaggttgtgccatttcagatttttgcctactttataggtggtaaatgggtctcaaaatagacacaatttgcatttatcttattatgagcaagattgctcatgatatattcataatatatttaaatgattaagggcattttctttttctgtaaactggctgttcatatattttgcccatttatgttatttgtttttttctctatttttaggagtcatttatatattacattatgaacgctttatgatatattaatatattgcaaatgtgtttttcctaattgtcatttttttttactacatttatctttgtcccatggaaattttttttatgcagtcaaattaatcaatctttttgcttctagattttgagtcatattcagggaagtgtttctccttttttttttttagacaaagccttgctctatcacccaggctgaagtgcagtggtgcgatctcagctcaccataacatccaccttccaggttcaagtgattctcctgcctcagccttccaagtagctgggattacaggtgcccgccaccatgcccagctaatttttgcatttttagtagagacagggtttcaccatgctggccagcctggtcttgaactgctgacctcaagtgatcagcccaccttggccttccaaagtgctgggattacaggcatgagccaccacgcccaggctctccactcttaataaggaaattcacccatattttcttatattatttttacgctttcattattaccttaagctttcaaatacatttgattgatgtggggtataaagaaccagccttctaactccaactcgtgacaaatataaaggaccatcccaggctcagatcttcccatagggtcttcagaggactttgttgagactgcagtgaagtctaactcattatataaggaaataaatccaatttcttacgtttccatagttgtaccagcatcatttattaaacagtgcctattgccccactgatttgagatcacatactaaatttccttatgttctaaggtctatttctggatttcttaccctgctgcatttatctgtttatatgcccaaaccacagttttaattatagaggttttagaacatgttttaataatatctcttagggttaacccttctctcagctatttctatttttagagtaagagtatttctggttattctcatttgtcttttcttccatattaactttataatcaacttatctagttctgtaaaaactctgatgttgattttatttggtgctatggtttgacttatggatggtgtactctccaaatttcatgttgaaatgtaatcctaaatgtgacattattaagacatatggcttttgggaggtgattaagccatgagggctccacactcacgaatgggattagctcccttatggctcaggtttgaaggaacattctcttgcctttctgccatgtgtggaaacagcattcatcccctccagaggaggtagcagcaggacaacatcttggaagcagacagcagcccttgtcagacattgacaatgctggtgccttgatctggggcctcccagcctccagaactatgggaaaataaattctgttctttgtaaattacccagtctaaggtattttgctacagaagcacaaacaaacaaagacactggattgcattaaatttataaattactttatggggcactgttatctttatgaaattgagtcaacttatccaataatgtggaatgactttctatctgctcaaatctacttttgcttatttcaggaatgttttatagttttccccatataggtttcacataactaataactctagactgagaaattgtaaaggatttagattccatcttatagatgagaaaactgagaacaagaatgaccaagtgatggcttcagattacaggattagcactgggaccccggtcttctagctcccatcgtagtgctctctgctgtaccaccctgtaagcaccctagaattctatagcagcatcaagaaaactaggaaaatgctttgtcattgtcttacttgtgcatattcttcctgctctgttcctgaactttccaaaatactttctaatttcaccagctttgtgtcatgccactctcccaagtgcaccctggccaacctgtccttgcctctctggctttagtgtctttccctggaacattcctccttccctttcaactcatggggttttagtcaagttgtcagcaaagtctgcagttttatctagaggttcaactgggaaaagattcacttccaagctcactcatgttgctaatggcaggattcagcttttcatgggctatcggactgagaccttcagttcctctctgatggccagaagcctctctcagttccttgccatacaaggcttctcacagggcagctcacaatatggtagcttacttccctcagaaaaagctagggagagatgacatctgagacagaagccacagtcctttaataacctaatattagaagtacaattccatgacttttgatatattccatttgttagtcactaggttcagcccacactcaaaggaggggattacatgagggcatgaacaccaagaggcatagaagacttagggccatcttaaaggctgcacaccacactttctgttaccctctagaccatatctgggcaccctactagatgttttctttttttttttcttttagacagggccttactctgttgcccaggctgaagtgtaatggcacaatcacagctcactgcagcttcaacctcctgagctcaagtgatcctcccacctcagcctccccagtagctgggactagaggcatgtgacaccatgcccagctaatttttaatttgtttgtagagacaaagtctgcctatgttgcccaagctggtttcaaacttctgggctcaagcaatacttctgcctgggtctcccaaagagctgggattataggcataagccaccctactaggtgttttcttagcacccagtagatcactttcaattaccgcaatcgtaattaaacaactaattatgtaattcatggttcaattttatactgtctgtctcctcaagaataaaaattcgctgggtgtggtggcttatgtctctaatcccagcactttgggaggccaaggtgagaggatcacttgagcccaagagttcaagaccagcctgggctacatagtgagaactcgtctctacaaaacaaacaaacaaacaaaatagctgggcattgtggaacactcctgtggtcccagctactgaagaggctgaggttgttaccggtggtgaatccatatgggtctgcagcagcctcaattcttgcctcctcagaagaaagaatttgactgaggggcatgaagcagaagagatggaggcaagttttagagcaggagtcaaaggaaggaaagtacatgtggaacaggtccaagcaggcaacttgaaaacaagtgtgaagtttgaccttctgacttagcattttatatgctggcatgcttctggggtcttgcatcccttctgccctgattcttcccttggggtgggttgtccgcatgtgcaatggcctgctagtgcctgggaggggagcatgcagagtgtgtttactggagttgtacacatgctcacttgaggcgttcttcccattctggtggaatgcccctggaaggtcatataccagctaaactctgccattttgccctttaatgcacatgctggagcccactcacccaattcctgagatcttattgagacgctgccaccagtttcaggtgtttttatctactgggaaactgcctttccctggtgctgtttgcaaccaattattatattagagaggcagcgtgacaactgcctgaccatcacccgatggtcacctgacattcctggtgaggtgcgggagaagccctctcctgccttgcacatgcctggctagccacctactgtaacaaggggagaggatcacttgagcccaggaagcagaggcaacagtgagctgtgattgcactactgcactccagcctgggtaacagattgagaccctacttaaaaagaaaaaaaaagaagaagaatgaaaattccacaaacaatgggccctgtgggtctcacctacaactaaaccttaggtccaaccactgtattttatacattggaaacaagatataatttttgattgaaaaactataaggtaagctcagcaacccctgaaaagaattatttggctgttgtcactacctcatacctgtgaaccccgaaaatctgagacaggtctcagttaatttagaaagtttattttgccaaggttgaggatgcacctgtgacacagcctcaggagatcctgatgacatgtgcccaaggtgatcagaccacagtttggttttacacattttagggagacatgaaacatcaatcaacatatgtaagatgaactttggttccgtttggaaaggtgggacaactcaaagcagggagaaggcttccaggtcataggtagataagagacaaattgttgcattcttttaagtttctgttagtctttccaaaggaggcaatcagatatgcatttatctcagtgagcagaggggtgactttgaatagaatgggaggcaagtttgccctaagcagttcccagcttgacttttccctttagcttagtgattttgggggcccaagatattttcctttcacacacccaatctaaataaaatctatttcatgtgtattttccactagaaattcaggctcccgaagggcatagtcttactcaggtggcagaaaaactgtaattactgcaaatgccaggtttaccataaacacatctctaaatggagttctctaggtcttgacataaataaaaagggttgattcacactgaacttctccacttcaaaaagaaacagagtagcagaagcacaaaccagattgcagtgggttggggagtgaatcacagatatacaaaaataggagggactgctcttatcctggacaggagttttaaaatcagtctttggttagcagcatttttagtaacatttttataccatatagtaacattttcatacctatactatgaattataaaaatagtttaattcatattacggaaaaaataggagtcactttgaaggtatcttttacaataagcaattcacagaagggaaatctgaatgccactttcacatatgaaaaatgtttgaacagtaatgagagaaataaacatttaaaccacagtgaattaccattttatacccaaccaattggcaaaaacaaatttaaagttggaaaacaccaactgtgatgataatatagaccaacaaaaaccctcaaacacttgtaatggagagacaacacagcactgtagctgaaagcacagactctagagccattgtgtatggtttcaagttattgctctacttcataactagctgtgtgactttgggcaacttacataacatcttggtgccatctgtgaaactggaatgatgataatagatcctacctcgagaggactagtgtgagtattgatgagttactataacatgctacataagtatttgctagtattattattactgaaatagaataatgactttagagagcaatttgactagtgctaatacagttgaagctgtgcatagcatacaacccagcaattttgcttctgcgtgcacaccccaaagaaacacctacaggtgtacacaaggaggtatatgcaagaatttacattgtagcactgtttgtaatggagaaaactggaaatagtcaaaatatccatctgcagaaaaaaatgttttaaaaaatctatggtatattcatataatagaatactataaagcagtgaaaataaataaattagtgcagtagttctcaaattttaccatgcactataatcacctggagaacttgttagaacacagattactggggcccaccttcagtttttgattcaataggtctgtaatggggctcaagggttagcattttccaagtgatgttgatgctgctggtccaggacaacactttgagaatcactgaattggaccttcattgatcaacatggacaaatcttacaaacagaatgttgagtggaaaatggaagttgcaaaagaatacatatgctttgataccatttatgaaaagttttaaaatatggaaaagaaatcattttactgcatatgtatatatatcacatatacacatgcagtaaaaattttcaataagatcacaaagctagtcagttacaggtctaggatttgtacctatgtgtatccgtgaaatcgcctttgcaaactgaaaccccctttgcaaaaattctatcagtgagaaaattatagcagtggaggagatctgatctagccaaaccccatcttgcctttagctttcagtctgtccttaattattcctgggcttaagccaagataactttgggagacatttagtttaatagtttaaataattacagtccttccccaaaactcaattgcctttgtaaagctaatgagagaccaccagacaacggggatagatgagcctgaattctgttaagtgtagacataagtgattgccagccattattccagaggtcacaagatatgcaacttccccaattactcctacagataacatcactattgtagaatctaggattggcctttttgggtatatttttaagttttttgcatgtttgactactgatggctccacctggacccaccaactgttcctgtggctccacccagaaacaactcagtaggcaggaggaccatctcccatacccctatgactgcaccagtcagcagcaagcacccattgcctagccacccctacccctttccccagactacctttgaaaagaaacctagcccccaaatgctccaggaggccgatttgagtaataatataactgatttgagtaataataaaacttcttccatttttccactcgatgttgtgtaaaactctttctccattgcaatccctataccttgataaatcatctgtatctgggcagcaggcaagaagaatccactgggccactatatctggatctaaaggccatgtattttccactacaagctaattaacaagaggtatcctttcccctcagaaacaactggacacacctgtgtagattctacataaagaacagctaaagaaaatctggttaatacttagcctagtatacttaccaggaaatcagcaacagtctttctctgatattcctgaaattgtaatccccaccttacacttgtatcacttgttttctaaatattaatatacggtaaaaatcaggtggctgtgtgctatgggaaaatctggaggaaaagataattttaaaaatatacttttttggctctgcttgctactgaaaaaaaatttttttaagaaaatatactcttccctccttaacattaaagtgaatccacagaagatgtgtttggtgaagtgtctggtggtgaatactaagtagaaagggcagactaacacagccttagagcctggataaaatcctggtgtcctgaaagtttgaccgtgggaaatctggaggataaggtctatctctggtctgtctatctaacttctgcaccttgcacatagtagaggcctgacagatacatgccaacccatgtgtgcatgcaataattcaatccacaattaggaacattgtgccaaaaggagacccaccaactaaaaagaaatacaaattcttagctttctgtgactaccctttactgcctttgctggcgaaaacaaagaagaaaagaggaggcttcagtattcaaatactgccagttccgcagtgaattctaaaaatggttactcttgggatacaaggaacccccacgaggataaacaacctctgaggttacctgaatgccccagcaaagggcacgactacttccggagccgcaccggaaccccttggcggattatgtgggttcctgcgggaacgatttaagaataggactacttcctgcttctggatatgggccggtgaagggaaaggaaatagctctacgagcggcatcctgcctgcgttagcggcggtggaggaggaggcagagaggagtggagggcggagtagacggaggaggctgctgcagagaagaaagtgtcagagccggtaagtgagccagtcaccttagagcaggggacagcggacagcgccccagggctcgcttcgcagatatgtggtcccaagttgctgagctgccccatggggtcaggtcggtcgcctgtcagtcggcgccgagaagagactgttggggcgctggggccgggcctcgcggagcgccagagtgcgctctcgctggctgacagcctatctcgggagccagaggaggccccgggctttgtcctgcctggtggtgctggggtttcgcatcctggacagcttccccagacagtgtttggaattcagggaaggaagaaagtacgtgcgcccccatttaaccctcgggacctggcgaaatcctgctacgtgggtagtgaacattgtatcggggactgaaggaaatgcttgtaaagagtgttagtctggagccatactttccctgccctgttcaagctccctggactgtcggaagcggagttgtttgtaaaggcaaatgcagacgcctcctcctcctgtcacttcgggacaagttaacaatcttcagattcgttattaaagcctcgtgtaccctatgtgatctatcaggttagtactgctgtgggtatctggtgcttgttctgtaaatatacttgatgtcgagatcacagttaaatatctccaagcactttttgaagagaaacaagactgacctaacagtcgggactatttagcatactttccctcacctttactttaatcgttttagcatgcagagtaaggatggtaatcttaaatgtactagattaagttattgtgcatctgcagaaggcctgtggtataataggatatgaaactcttgataactgacgaaatgagtgaaatgattatataaagattgttactgtaaagatcagaaatagcttttattaagttcctgcttttctgttgtcttaggttcggctttagagtgtggtgaagggtacttttcatggtgcatggaaggaaagccaatgcgcaggtaggcatttaggaagaaaacctttggtttcactgattaaaattcagcatgtaataatttaaatttttaaaaaagagtttcaatcttactaaattctgcttggaactaatgagtcttgttctacaataaatcaaaagtaatattaagaattaatagctttttaatagaataaaatacagaagttgtttctgaaaagtgctgtggattgtatgtagtgctaaacacttaaattttccttttttcatgttttttacagtaaataatcattaagttcattatgatactatatggatttattataatcttcagttccctataaaatgtagaggattctgttcccatgtaagaatcataattatttataatatactgtactgcatgcctaattatggttttggttatttccttgatgttcaatcatacatttgttctgttaattaaaatagctgcattgtagggaagattgtataaggactaaaataggtattagacataataacttagtccatagaaaaatagaacaatgtctgggaaaatatagacaataaataggccctcccaaccctagaatttaataatgttttttctcattttgttctaacaaatgagactagaatctttatgatacaaaatcatcccagttctatttctttggtttttacatttgttttctatttattgaactctatttaatcatttgttatttaacatcaaagataaacaacttctgcagttcttttaagagaagaaacattttataatgggaatatgacttataactcagaacttggagcaagaaccagaatgtatatctttatccaaatctgttattggtttatcaattgaccttgagctgttcaccttctctgtaccccagtttacttctttagtgtatctgatcaggatattggggattaatgaacatttgcaaatgctttaagatctccagatgaaaagatgttatcaagatgaaaaataccattatcttatttatattttactctgtagtaggaataatattttaccacaatgtacatgaaaaaattaacaacataatattaaatacttcatccctttacttctaacattattgcaaaacccactgattgtgtctcatctccagctaccataaaatgtcatatcttatataattgctaaaataagagcttattattttttaaaagaatagcagagtgtgggaatgtttttggtttatcagtagtctatataaaatatttgcttaatcactcatacctgctccttttttcttgctttattacataatactgtcagctattcagaatcatgctggataattctagtgctgttaatcgttaagctacggctctttcttcatcactgtcacttggccagagcctagcctactcacattggtctctggtcttactttcacctgcttcctacattcaatcatggtcacacttccctatccttttcttattgggctgtcatttttgctgatttaacccagaaggcagtctctgtaatgctgggtttatactcagttgctattaaagaagctttgagaagtaactttttatattgagactatttgaatacatgttcattctgtctactagattgtgagctcttttagtctcatgtcttcctatatttgcatcactagcacctaacgattactgaataattgtttgaataggactgaacagtttctgcagactttccccctccaaaaaacaaaaaaaatctatgaacaagactgaaaattattgttaaaggtattctaatttttgattataaagttttatgaaatcaattggcattttattagtaaagtttcattacctcatttatttatgtactatcatttgcatagcacaatgcaaaatttaaaagatacaataggatattcagtgaaaagttaactctcccattgctgaccccagttcccaaaggcaaccactgtaagcagtttcttatgcattcttttagaggcattgtagttcatacacaaatgtatataagatgtcttctcttttcacttttttaatttctattttgtagatacagggttttgccatgttgcccaggttggtctcaaactcctgggctcaagcagtccccctgcctaggcctcccaaagtgttgggattacaggcgtgagccaccacacctggctaacattagtagcttttaaaaagaaaagatggctaggcacagtggctcacacctgtaatcccagcactttgggaggctgaggtgggctgatcccttgagcccaagagttcaagaccagcctgggcaacatgacaaaaccccatctctacaaaaaggaaacaagaaaaatttagccaagtgttgtggcagatgcctgaagttctagctactcaggaggctgaggtgagaggatcacttgagtctgggaggcagagattgcagttaagccgtgatcataccattgaaccccaacctgggcaacagagcaagacagtgtctcaaaaaaaaaaaaaaaagacacaaatgttgtagggcatagtggttcacacttgtattcccagctacccagctacttaggaggctgaagcaggaggattgcttgagcccaggagttcgaggctgtggtgatcatgccactgcactcctgcccgtgtaacagagagagaccccatctctttaaataaataaataaaaataagaaaatgcatttgaaaggacactgtcagtatatcatgcacattcttctgtatctttattcacttgaaaaattattttgtggctgggtgcggtggctcacgcctgtaatcccagcactttgggaggccgaggcaggcggatcacaaggtcaggagatcgagaccatcttggctaacacggtgaaaccccgtctctactaaaaaatacaaaaaattagccgggtgcggtggcgggcacctgtagtcccagctactcgggaggctgaggcaggagaatggcgtgaacctgggaggcggagcttgcagtgagccgagattgcgccactgcaatccggcctgggctaaacagcgggactccgtctcaaaaaaaaaaagaaaaattattttgtaaattgtaacaaatgcatatagacttaccttattccttttaatagttatgtagtattccattgtctatatgcaccttagttaaccagtcccatttgagagagatttatttcaactgttttgctgttacaaccagttctgtctgcaatgaatatccttgtaggtggtttttgcccagatgtgtaagtatagaataagttctggctgggcgcagtggctcacacctgtaatcccagcactttgggaggctgaggcgggcagatcacaaggtcaagagatcgagaccatcctggccaagatggtgaaaccccttctctactaaaaatacaaaaattagctgggcatggtggtgcgtgcctgtagtcccagctacagtgccagtcaggaggctgaggcaggagaatcacttgaacccagcaggtggaggttgcagtgagccaaaatcgtgccactgcactccagcctgatgaaagcataagaatccgtctcaaaaaaaaaaaagaataaattcttagatttagaattgcctaaagattatgtacatttttttaattttggtggacattgacaaatttttgcccttagagttacacaaatgcatagtctttaccaacaatatgtttgtttcccaagatattaattttcaatcattcattttattaagagataccaaatattttgtaattaattcttccaactttccttaaatatataaatagaaaactgagcttgattgtagaaattggtttattcatatatcaaacctttatatagtaccactctattcctgtatattgtgtgatacagatcaagtgatgagaacagatataatgatacagtattggcgtggtacagtgactcatacctgtaatcccagcactttgggagatggaggaggaaggaagatcacttgagcctaggtgttcaaggctgcagtgagctgtgactgtgccactgcactccagcccggatgacagggcgagacttcatctctaaaatataattaattaattaattaacaaacaatgttaacagaattttaatagagatgtaaacttaagaggagggaactgctctgtggagatgaggaagcatcacagagatggtaacatttgagctagatcttctaggaagaataagaatttacttctaaagaagggagttaattaaggacaccataaaaggaaggaacagcttgtgcaaaaaaaaaaaagataagagagagtaccaagacccagaattgtctgacatgcatggaacagtgagtatatgtggagtatagggtattttgaggaagaaggggaagtagaaaacatggaaattgaggctacaacagtgggaaagaattcaaactttatcctttaggtatttaagagccaatggacattattatatacatcgtttgttctttgaactgatttctaggcacataggggatggattggaaagagggaagaaattatggcaaggaaatgaatttaaagtagttgtggtagtttagatgaaagatgatgagaacctgaagtatatctatggcagtgagggttgagagaagtagatggaattgagagcttgtataatagtaaaatcaaaaggatttggtgaacatggagtgaggaagagatagtgttataaatgactccaaacttaggaaaccagatgccgccatgataagattaaaaagaaaaatacaggaagaggaacaggtttcagtaagccaagaatagattctgtttcatatactttaagattattgtgtttaggaaacagccaggtggagatatccagcatgtgattggaatatgactctggggcagaagagagatttgggctagaaatttaaaaaaaaaaatgtgagtcatcaatactaagaaggttcttcaagctgtaggcataagtgatggtagaacagaaaaggagaatgctgaggacagaactgtagtgagtaccaggggtgtttacgatggggcctagcaggaaggccccataaagtctctaaaatgagtaagaagctttacatgctttgggtcttattttatttaacagtatctagagtttttattgatagttttttactcacattgaaggatagctgagctactccttcagttcaatttcagaagacaaaatttccaatctcgtatctttgaaattttcaatttgttctactcagtctaaagtgtatgcttaaaaatagtgtaaaacatacttgcttgatttgactattccctagtgtggcatgcactgtaggttagcttgcacatctcttcttttcttccgtctactatagacactagaaaattaaatactctgagttcttagttgtctctgcatatgggaagggctgtgtgacacagtgctaccaatgagatgtcagcagtagttgttgaggggtattctaggaaggcttttgctatcctgatataaagggaaactagcatgcttgcatgaggatttacccttcctgctccatcttggtctcgatcactggaccaaggcacccaaggcttatgctcattttatccaataagccgtgatgagatgtcttgggactaaaacattcacaaccaagtttcaaataaagaggttaatagcttggccttctggtgtggaatcaggtgtggaatatagtgcctattgggaccccttctactaagtagaagtgacactttgagatgttatttctgttttgagggtttatacactcaaatctccagctgtctctattcaagtatatttaggactataaatgagggtcagtgcaactgaatcttttttaaggtcaagttgttaattttcaaagtaaaacaaaatttttgaagtaggaaaggtgaaatgttcatttagatagcgtattagtccattttgcattgcaataaagaagtacctgagacttggtaatttataaagaaaagaagtttatcttggcttgtggttctgcaagcttttcaagaagcacttgtcacacatgtcaccacacctggataatttttaaattttttcgtagagatggaatctcattttgttgcccaagctggtctcaaactcctgagctcaaacgatcctcctgcctcaacctgccaaagtgctgggattacagctgtgagccaccatgcccagctagcttttacattcttaaatggttgaggaaaaaaggcaaaagatgaatgatatttcctgaagtgaaaattatatggatggacaccaatggctgggggcacagtggcctacacttgtgatcccagcactttgggaggctgaggcaggaggatcacttgaggccaggagttctagaccagcctgggaaacagagagagtctttgtctctaccaaaaaattaaaattaagccaggcgtggtagcatgcacctgagagcctcctcaggaggctgaggtgagaggatcgcttcaaccaggagtttgaggctgcagtgagctgtgatcataccactgcacttcatcctcagtgacagagcaataccttatttctaaaaaaaagaaaaaaagattctactatactgatgcagtaataagagcattatttttttttgctatggtaattttttttttttttttgacatagagtttcgcttttgtttcccaggctggagtagtgcagtggcacaatcttggttcaccgcaacctctgcctcccaggttcaagcaattctcctgcctcagcctcccaagtagctgggattacaggcatgcgccaccacatccagctaatttttgtatttttagtagagatggagcctcaccatgttggccaggctggtctcaaacttctgacctcaggtgatccagccacctctgcctcccaaagtgctgggattacaggtgtgagccaccgcgcctggcactatggtatgtttaaaagaaaaacggagacattagcttagtttacccacattgtacttaggtgaaataaaaaattgtttatatctcagttcaacagtagcatctttatgtatgtaactaaggttgtgacaataacactttactttcagcatgcagtgtcagtattccaggaatttttggtcttctgtctttaattgttacttttttaaaaaagaagcttgattgtaccactgttaatcatgtgatttattctttcagcatctactgtgtacaaggcaccattttagctctgtggttaaaagcattcttgattgtttatatggatggtaaaaattattctttaactgctcagctttatgttttagtctttaaaattgccaagcgtaaacagtgatgtttttaccagatgtataagtgttttggaaaaattggttgttgttggagaaaagaagaaccatgttttttatttttgtgctatatctttgcaatgcacatgcaatttcttctccctagaatgtccttatagatttttctgtccttctcaggagactccttttacactttagtgttttattatactgtagttcccgtcagtgctacagctttggaagtagcagactgatagggatgctgtcctttgcaggctagatattagactctctcagtagttgtagataattagcatctgagagagactcacatgaggctgacctaaaactcagtgatcagaatgcttgagtcatcccccttttaagtagcatggtacttttggaagaattttccatcagaggactgcttaatgagtttagaatcagaaacagaaatataacgatctggagcatggatgtgagatatttcacttaagctctgggaaaacccagtgtaatattcctactttacaacaacaacctttgtagtaacctgataggctatacctgtgagatccagaatctttctgaatgatgttaaacatatacttcatagattttgcctttctgaatgacttttaagctttattgaggtataattgaggtacatattttatgtatacattttgatgagtttgggcatatgtatatacccatgatatcaccgcaatcaaggttctaaacatatgtatcacctccaaaaattcttttatatatatatacacatacacatacatgatatatatgttttggggatttttttttttttttttagagatggggcctcactatgttgcctaggcatggcaaactcctgggcttaagggatccccccgcctcaacctcccaaagtactgggattacaggcatgagccactaggctcagcctcctccgaaaattcttatgtttgaaccacatcttttgtcctggttgccctcttactagttattcatgtatctcctcctctagagattgcttctttatattacttagaattttccacagtctatagcaaaatgctttgtgtacattaaaagcaattagtaaatatttgttaaaagaataattattttaattaagaggcatagattgtcttttctctgcatgtttatataatgtgatcatacaaaaatccaaatatcttatttctaattatttgtcagtaatttgtgacttttacctagtaatttagcacctgaatttctacatatgaaatatgaatataagatacaaattttcaagccaggcatggtgactcacacctgtagtcccagctacttagggggctgaggtgggaggatcagttgagcctaggaggtcgaggctgtagtaagccgtgatcaaaccgctgtattccagcctgggtgacagagcaagaccctgtcgcaaagaaaagatacaaatttgtatcttatatattatctggaatgactttttaaacataataaaagtattttaggtattttataagtacttaaaggtaattctgaaaatttcttagaccatccccgttaatttcagctagaaaagtgatgatataagttcactttgttatgctcattcccttaaatatgaaatgcattttataggcttcttttaccaagttatttgactcttcttcttgatatttcactggtgaagtttttcatgatgactgaatctaaaaaaaaaaaaatctgtatttggtgagtttcttgggcttttaaaaatagttgtacagaaatttggataatacataagaaaaaacaaaacaaaacctcattttgaattgctaaatcatcctagaaactcttccctctccttgcctcccagcattcacatgaattacagttattaaatattcacagtacctcaggagatgcgtggtttaccctaaagcatccagaggcctgctctgctactgaaagcttcttgattttgagtaagtcacgtaaccaaactagtttcttcatctgtaaaaggagggcattatgctagatgatccagtgatccattctattccatatctagatctccacacaagcaagaatgggctgttttcatatttaaggacttgtgaagaacaccaacttgtaaaacttatagacacatacatatatactgtgatcctgtaaggcagtgttcatcaaatttgagcaatttacagataccccaccacctttttgtccagaacccattttagaggaaaataattattgcagcttctaaagaatatgtcctttaacacaagtttagacaacacctacttaaatgtacaggaaatgcccaacttacagacttctacagtttatgtatactagctccagccatcatgcttctctaaagcctctgtttaaaaaccaaaaacgaggagccaagatggccgaataggaacagctccagtctacagcttccagcatgagcgatgcagaagacgaatgatttctgcatttccaactgaggtactgggttcatctcactggggattgtcagacagtaggtgcaggacagtgggtgcagcacaccgagcgtgagccaaagcagggcgaggcatcacctcacccaggaagtgcaaggggtcagggaattccctttcctagccaaggaaagaggtgacagatggcacctggaaaatcgggtcactcctaccttaatactgcgcttttccaacagtcttagcaaacggcacgccaggagattatatcccgcgcctggctcagagggtcctacgcccacagagcctcactcattgctagcacagcagtctgagatcacactgtaaagcagcagcgaggctgggggaggggcacccaccattgtccaggcttgagtaggtaaataaagcggctgggaagctcgaacgtggtggagcccactgcagttcaaggaggcctgcctgcctcagtagactccacctctgggggcagggcatagccaaaaaaaaaaaggcagcagaaacctctgcacacttaaatgtccctgtctgacagctttgaagagagtagtggttctcccagcacgcagcttgagatctgaaaacggacagactgcctcctcaagtgggtccctgacccccaagtagcttaactgggaggcaccccccagtaggggcagactgacacctccaacggacgggtactcctctgaggcaaaacttccagaggaacgatcaggcagcaacatttgttgttcaccaatatccgctgttctgcagcctccgcagctgataccctggcaaacagcctctggagtggacctccagcaaactccaacagacctgcagctgagggtcctgagtgttagaaggaaaactaacaaacagaaaatacatccacaccaaaaccccatctgtacgtcaccatcatcaaagaccaaaggtagataaaaccacaaagatggggaaaaaacagagcagaaaactgaaaattctaaaaatcagagcacctctcctcctccaaaggaacacagctcctcaccagcaacggaacaaagctggacggagaatgactttgacgagttgagagaagaaggcttcagactatcaaacttctctgagctaaaggaggaagttcgaacccatggcaaagaagttaaaaaccttgaaaaaagattagacggatggctaactacaataaccacgcagagaagtccttaaaggacctgatggagctgaaaaccaccgcacgagaactacgtgacaaatgcagaagcctcagtagctgattcaatcaactagaagaaagggtatcagtgatggaagatcaaatgaatgaaatgaagcaagaagagaagtttagagaaaaaagaatgaaaaaaaaaaacgagcaaagcctccaagaaatatcggagtatgtgaaaagaccaaatctacgtctgattggtgtacctgaaagtgacggggagaatggaaccaagttggaaaacactctgcaggatattatccacgagaacttccccaatcgagcaaggcagaccaacattcaaattcaggaaatacagagaacgccacaaagatactccttgagaagagcaactccaagacacataattgtcagattcaccaaggttgaaatgaaggaaaaaatgttaagggcagccagagagaaaggtcaggtaacccacaaagggaagcccatcagactaacagctgatctctcggcagaaactctacaagccagaagacagtgggggccaatattcaacattcttaaagaaaagaattttcaacccagaatttcatatccagccaaactaagcttcataagtgaaggagaaataagatcctttacagacaagcaaatgctgagagattttgtcaccaccagacctgcccgaaaagagctcctgaaggaggcactaaacagggaaaggaacaaccggtaccagccactgcaaaaacatgccaaattgtaaataccatcaaggctaggaagaaactgcatcaactaacgagcaaaataaccagctaacatcataatgacaggatcaaatccacacataacaatattaaccttaaatataaatggactacatgcttcaattaaaagacacagactggcaaattggataaagagtcaagacctatcagtgtgctgtattcaggaaacccatctcacgtgcagagacacacataggttcaaaataaagggatggaggaagatctaccaagcaaatggaaaacaaaggcaggggttgcaatcctagtctctgataaaacagactttaaaccaacaaagatcaaaagagacaaggccattgcataatggtaaagggatcaattcaacaagaagagctaactatcctaaatatatatgcacccaatacaggagcatccagattcataaagcaagtccttagagacctagaaagagacttagactcccacacaataataatgggagactttaacaccccactgtcaacattagacagatcaacgagacagaaagttaacaaggatatccaggatttgaactcagctctgcaccaagtggacctaatagacatctacataactctccaccccaaatcaacagaatgtacattcttttcagcaccacaccacacccattccaaaactgaccacatagttggaagtaaagctctcctcagcaaatgtaaaagaacagaaattataacaaactgtctctcagaccacagtgcaatcaaactagaactcaggattaagaaactcaactcaaaactgctcaactacatggaaactgaataacctgctcctgaatgactactgagcataacgaaatgtaggcagaaataaagatgttctttgaaaccaacgagaacaaagacacaacataccagaatctctgggacacattcaaagcagtgtgtagagggaaatttatagcactaaatgcccagaagagaaagcaggaaagactaacatcacaattaaaagaactagagaagcaagagcaaacacattcaaaagctagcagaaggcaagaaataactaagatcagagcagaactgaaggaaatagagatgcaaaaaccccttcaaaaaatcaatgaatccaggagctggttttttgaaaagatcaacaaaattgatagaccgctagcaagactaataaagaagaaaagagaagaatcaaatagacgcaataaaaaatgataaaggggatatcaccaccgatcccacagaaatacaaactaccatcagagaatactataaacacctctgtgcaaataaactagaaaatctagaaatggataaattcctggacacatacaccctccctagactaaaccaggaagaagttgaatctctgaatagaccaataacaggctctgaaattgaggcaataattaatagcttaccaaccaaaaaaagtccaggaccagatggattcacagccgaattctaccagaggtacaaggaggagctggttccgttccttctgaaactattccaatcaatagaaaaagaaggaatcctccctaactcatttcacgaggccagcatcatcctgataccaaagcttggcagagacacaaccaaaaaagagaattttagaccaatatccctgatgaacatcaaagcaaaacttctcaataaaatactggcaaaccgaatccagcagcacatcaagaagcttatccaccatgatcaagtgggcttcatgcctgggatgcaaggctggttcaacatacacaaatcaataaacataatcagttacataaacagaaccaacgacaaaaaccacatgattatctcaatagatgcagaaaaggcctgtgacaaaattcaacaaccttcatgctaaaaactctcaataaattaggtattgatgggacgtatctcaaaataataagatctatgacaaacccacagccaatatcatactgaatgggcaaaaactggaagcactccctttgaaaactggcacaagacagggatgccctctctcaccactcctattcaacatagtgttggaagttctggccaagacaatcaggcaggagaaggaaataaagaatattcagttaggaaaagaggaagtcaaattgtccctgtttgcacatgacatgattgtatgtctagaaaaccccatcatctcagccccaaatctccttaagctgataagcaacttcagcaaagtctcaggatacaaaatcagtgtgcaaaaatcacaaggattcttatacaccaataacagacaaacagagagccaaatcatgagtgaactcccattcacaattgctacaaagagaataaaatacctaggaatccaacttacaagggatgtgaaggatctcttcaaggagaactacaaaccactgctcaatgaaataaaagaggacacaaacaaatggaagaacattccatgctcatgggtaggaagaatcaatatcatgaaaatggccatactgcccaaggtaatttatagattcagtgccatccccatcaagctaccaatgactttcttcacagaattggaaaaaactactttaaagttcatatggaaccaaaaaagagcccgcattgccaagtcaatcctaagccaaaagaacaaagctggaggcatcatgctacctgacttcaaactatactacaaggctacagtaaccaaaacagcatggtactggtaccaaaacagagatgtagaccaatggaacagaacagagccctcagaaataatgccacatatctacaactatctgatctttgacaaacctgagaaaaacaagcaatggggaaaggattccctatttaataaatggtgctgggaaaactggctagctgtatgtagaaacctgaaactggatcccttcattacaccttatacaaaaattaattcaagatggattaaagacttaaatatttgacctaaaaccataaaaaccctagaagaaaacctaggcaataccattcaggacataggcatgggcaaggacttcatgtctaaaacaccaacagcaatggcagcaaaagccaaaattgacaaatgggatctaattaaactaaagagcttctgcacagcaaaagaaactaccatcagagtaaacaggcaacctacagaatgggagaaaatttttgcaatctactcatctgacaaagggctaatatccagaatctacaatgaactcgaacaaatttacaagaaaaaaacaaccccatcaaaaagtgggcagaggatatgaacagacacttctcaaaagaagacatttatgcagccaaaagacacatgaaaaaatgctcatcatcactggccatcagagaaatgcaaatcaaaaccacagtgagatatcatctcacaccagttagaatggcaatcattaaaaagtcaggaaacaacaggtgctggagaggatgtggagaaatagaaacacttttacactgttggtaggactgtaaactagttcaaccattgtggaagtcagtgtggcaattcctcagggatctagaactagaaataccatttgacccagccatcccaatactgggtatatacccaaaggattataaatcatgctgctataaagacacatgcacacgtatgttcattgtggcactattcacaatagcaaagacttggaaccaacccaaatgtccaacagtgatagcctgaattaaggaaatgtggcacatatacaccatggaatactatgcagccataaaaaatgatgatttcatgtcctttgtatggacatggatgaagctggaaaccatcattctcagtaaactatcacaaggacaaaaaaccaaacaccacatgttctcacttataggtgggaattgaacaatgagaatacatgaatacaggaaggggaacatcacacaccagggcctgttgtgttgggggaggggggagggatagcattaggagatatacctaatgttaaatgatgagttaatgggtgcagcacaccaacatggcacatgtatacatatgtaacaaacctgcacgttgtgcacatgtaccctaaaacttaaagtataattaaaaaaacatttaaaaaattaaaaatataataaaaataaaaaccaataacggctgggcacagtggctcatacctgtaatcccagcactttgggaggctgaggcaggcggatcacgaggtcaggagatcaagaccatcctggctaactcggtgaaaccccgtctctactaaaaatacgaaaaattagccagacatggtggcacatgcctgtagtcccagctacttgggaggctgaggcaggagaatcacttgaacccaggaggcggaagttgcagtgagccgagattgcgccactgcagcccagcctccgtgacagagccagactctgtctcaaaaaaaaaaaaaaccagtgtgatggcatgtgcctttaatcccagctactcaggaggactgcttgagcctaggagttcaagaccagcgtgggcaacttagtgagaccctcatctcaaaaattaaaaaaaatcaataagtaaaaaaacccagcaacaacaaatggtagaataatctgaaaaagagagagattcttttccttctcccttcttgtacctattgttccttttgtcttgggatttcaaaactcaggccagtggcatttaagcttttttgatataacctgcagtttacgaggggaagcagtgatgcgtatctatacaaatttgtgtgtgtacatacacacaattgaacatgcttaactaaatgaaatgtatgctgttactttctatttcattttttaatgcttcttatgaggcactgaattttacaactaaacctagtccccatttacagcactcttaccatagaaaaatgcaaacctccaaataaacttttagattcaacttttaaatactacttatttataaattgaagaatgtctgtttatgaacttattcacttattttataatcataccgaaacctcagtgattcagaccaatttgacaggagcaattcaacatatgtagtacttttaaatgaagcttatcatatttaatatctctagatatgaaattagacccaaattaatctaacaaaatcttgacctggaggctctttggagtcctgctaaatcatcatttagcttgccattttctttactattttaattttaataaactttgaagaaaagatttctatataaagataaacttcaatccagacttttttttttttttttttttgagacagagtctctgtcacccagactggagtgcagtgatgcaatctcggcttactgcagcctctgcctccagggttcaagtgattctcatgcttcagccacccaagcagctgggattacaggcatgtgccaccacacacggctaatttttctgtaattttagtagagacagggttttgccacattcaccaggctggtttcgaactcctggcctcaagtgataagcttacctcagtctcccagggattacagacatgagccaccacaccaggccgtcagtccaaactttttatattgtctttaatttgaaatttaactattaattgaagcgtgttaacttgggcttaatttttaaaatggataagcataaccacctgatctaaaagttttattgctatagtagctcaatttaaatggtttatgtagaccaggcatgttggcttatgcctacaatcccagcactttgggaggtggaggcaacaggatcacttgagcccaagagtttgagaccaatctgggcaacacagtgagacatcatctctacaaaaaatttaaaaaaaaaatcaccaagctaattacatttccttatcgcttgaattacaaacatttaaggggagaaaagagcttataataatactgccatcttctctctctcccccatcattcctataggtgtaccaacattcgaccaggagagactggaatggatgtaacaagccgctgcacccttggagaccccaacaaactgccagaaggggttccccaacctgcccgcatgccctatatctcagacaagcaccctcgacaaaccttggaagtgattaaccttctgagaaagcaccgggagctatgtgatgtggtgctagttgtgggcgccaagaagatatatgcccatcgagtcattttgtcagcctgtagtccctacttccgagctatgtttacaggagaattggcagagagccgtcagacagaagtagtgatccgagacattgacgagagggctatggaattactgattgactttgcgtatacctcccagataacagtagaagagggcaatgttcagactcttctgccagctgcttgcctcctccagctggcagaaatacaggaagcctgctgtgaattcttaaagagacaattagatccttctaactgcctgggcattcgggcttttgctgacacacattcatgtcgtgagttgctaaggatagcagacaagttcacccaacataactttcaagaggtgagttgcacttggtgttccaatgcacccatttgttggagagcaatatgggttcacattctgctaaataacacttgcctgggtatttcctgctgattctaactcataatagcaaataaataagttattataaatcctaaacctggcttttattttagagggcaattttgtgttctaccagcaagttaagatttagggatttattctccctaactgtattcataaaagtatttaaaaaaaaatttttaaaaaggtttatttataagccaaaatagagtaattcacaagaggatctatgcctgataggatacctggtatcatgatttatataagatatttccttcctgattatgtggattattcagaataaattatagattataggttgtttggtaaactaataatctgaaaagatgagtttagatgttatcaaaataattttcattaaacctatctttcccttatttatttaacaaatatttgtaaagctactatgtttcagccactgtgcttgggagcatagggtacaatagtgaacaagaaatctagagtctctgtattcatggagtttataatctagcagggaagataatcattaaatgcttaattatacaaataattaactacagttaatgggtgttacaaagaagcagtcctggatgatttaagagtgtattacagagaaatttaactttggtgctggaacaacttgtgcaaaatcccaagacattaaaaagcatcactagtttgaagacctgaaaaaaacccagtgagacccagagaccaaggggggtagaggatgttacatagtgattacacagaaagaagagggctaaatcacactgaggttgatagactatgttaagaatttgagattggcctggtgcagtggcacatgcctgtgatcccagcactttgggaggctgaggcgggcagattgcatgagctcaggagttcaacactagcctgggcaacatggcgaaaccctgtctctacaaaaaatacaaaaattagtcgggcatggtggcgtgcacccttagtcccagctacttaggaggctgaggtgggaggatggcttgagcccaggaggtagaggttgcagtgagccaagatcgtgccactgcactccagcctgggtgagagagccagaccagaccctatctcaaaaaaaaaaaaaaagaatttgagattgatcctaagagtgctagaaaaccattaaagggttttaagcaaagacaaaacatggtctgttttacaactttttaaaaaatcatatttttatttattttgcagtaaagtggtcagctcaggaccatagtttttttccccctaatagtttttggagaacaggtggtgtttgattatatgaataagttcttcattgatgatttctgagattttggtgcatccaccacccgagcagtgtacaccgtacccaatgtgtagtcttttatctctcacccacctcccacacttccccctgaatccccaaagtccattgtgtcattcttacgactttgcatcctcatagcttagctcccacttataagtgagaacatatcatttttggttttccattcctgagttacatcacttagaataatggtctccaaccaactccatccagattgctgcaaatgccattctatcttttttttttttttttttttttgagatggagtctcacttgctctgttgcccacgctggagtgcaacggggctcaatctcagctcactgcaacttctgcctcctgggttcaagtgattctcctgcctcagcctcccaagtagctgggactataggtacatgccaccatgtccagctaatttttgtatttttattagagatggggtttcaccatgttggccaggctggtctcaaattcctgacctcaagtgatctgtgatctgcttgcctcagcctaccaaagtgctgggattacaggcgtgagtcactgttcctggccaatatattgttcctttttatggctgagtagtattctgtggtatatatacataccacattttctttatccacttgttgattgatgggcatttgggctggttccgtatttttgcagttgtgaattgtgctgctataaacatgcacatgcaagtgtctttttcatataatgacttcttttcctctgggcagtaaccagtagtgggattgctggaacaaatggtagatatacttttggttctttaagaaatctccatatactgttttccatagtggttgcactagtccacattcccaccagcaatgtaaaagtgttcccttttcaccacatccatgccaacatcttttttttttttttaattttgaaacagagtctcactgtgttgcccaggctggagtgcagtggcatgatctcggctcactgcaacctccgcctcccgggttcaagcgattctcccacctcagcctcccgagtagctgggattacagggatttgccaccacaccaagctaatttttgtatttttagtagagatggggtttcaccatgttggccaggctggtctcaaactcctgacctcaggtgatctgcccgccttggcctcccaaagtgctgggattacaggcatgagccaccgcacccggcctatgtttttattttttaaattatggccattcttgcaggagtaaagtggtatcacattgtggttttgatttgctgatcattagtgatgttgagcattttttcatatgtttgttggccatttgtatatcttcttttgagaattgtctattggtctttagcccactttttgatggaattatttgtttttttccttggtgatttgtttgaattccttgtagattctggatattagtctgtggttggatctgtagtttgcaaacattctctcccactccgtgggttgtctatttactctgctgattatttcttttgctgtgcagaagctttttagtttaagttccatctatttatctttgtttttgttgcatttgcttttggttcttgatcatgaactctttgcctgagccaatgtctagaagggtttctccaatgttatcttctagaatttttatggtttcatgtcttagatttaagtctttgatccatcttgagttggtttttgtataaggtgagagatgaagattcagtttcattcttctacatgtggcttgccaattatcccagcactgtttgctgaatagggtgtcctttccccacattatgtttttgtttgctttgtcaaagatcagttggctttaactatttggctttatttctgggttctctattctttccattggtctatgtacctatttttatgccagtatcatgctgttttggtgactatagccttgtaaaatagtttgaaattaggtaatgtgatgcctccagatttgcttagccttcctttgggtatgtgggctcatttttggttccatatgaattttaggattgttttttctagttctgtgaagaatgatggtggtatttttatgggaattgcattgaatttatagattctcttggctgtatagacattttcacaatattgattctacccattcatgagcatgagatgtgtttccatttgtttgtgtcatctatgatttctttcagcagtgttttggtagagacctttcacttctgtagtgagatatattcctaagtattttatctttttttttttttttgcagctattataaaaggggttgggttcttgatttgattctcagcttggttgctcttcgtgtatagcagtactactggtttgtgtacattaattttgtaccctgaaactttactgaattcatttaccagttcttggagctttttggatgagtctttagggttttctaggtatacaatcatattgtcggcaaacagcgacagtttgactttctctttaacaatttggatgctctttatttcatttgtttgtttgttataagagatgaggtcttgctttgtcccccagctttgacctccagggcacaagcgatcctcccgcctcagccccccacgtagctgggactacagatgcgcaccatcatgcccggctaatttttgtatttttctgtagagacacggttttgccatgttgcccaggctggtctcaaactcctgagctcaggcaatccacctgcctcggtgtcccaaagtgttgggagtacaggcatgagccactgcacctggtcctggatgccctttatttctttctcttgtgtgattgctttgcctaggacttaaagtactatgttgaatagaagtggtgaaagtgggcatctttgtcttgttccagttctcagggggaatgctttcaacttttcctgttcagtataatattggctgcaggtttgtcatagatggtttttattaccttaaggtatgtcccttctatgccgattttcctgagcatttcaatcataaattgatgctagattttgtcaaatgctttttatgtatctaatgaaatgatcatatgatttttatttttaattctgtttatgtggtatatcacaattattgacttgcatatgttaaactatcccttcatccctggtatgaaacccacttgatcatggtggattatctttttgatatgctgttggattcagttagctattattttgtggaggatttttgcatctatgttcatcagggatactggtctgtagttttgtttctttgttatgttctttcctggttttggtattagggtgatactggcttcatagaatgatttagggaggattccctctttctctgtcttttggaatagtgtccataggattggtaccaagtcttgtttttttttggagatggagtcttgctctgtcgaccaggctggagtacagtggcacgatctcagctcactgcaacctccacctcccacattcaagcgattctcctgccttagcctcccgagtatctggaactacaggcacccaccaccacgcccagctaattttttgtatgttagtggagatggggcttcaccgttttgcccagactggtcttgaactcctgagctcaggcaatctgccacctcagcctcccaaagtgctgggattacaggcacgagccatcacgcctggcccaattcttctttaaatgtctgatagacttcagctgtgaatccatctggtcctggactttttttttgttagcaattttttttattgtcatttcaatctcactgttgttattggtctgttcagagtttctgtttcttcctggtttaatttaggagggttgtatattttcaggaacttatccatctcctccaggttttctagtttgtgcacataaggatgttcatagtagccttgagttatcttttgtatttctgtggtatcggttgtaatatctcccttttttttttttttttttttttgagatggagtttcacacttgtcgcccaggctggagtgcagtggtgcaatctcagctcactgcaacctctgcctcccgggttcaagcaattgttctgcctcagctgggattacaggcacctgccaccacgcccagctaattttttgtatttttagtagagacagggtttcaccatgttgggcaggctagtctcgaactcctgacctcaggtgatctgcccaccttggcgtcccaaagtgttgggattacaggcgtgagccaccacgcccagccccattttgtttctaattgagcttatttggatcttctctcttcttttcttggttaatcttgataatggtctatccattttgtatatcttttcaaagaaccagcttttctttcatttctcttttgtactattttttctgttttatttcatttagttctgctctgatctttatcatttcttttttctttttttttttttttaatgatggagtctcgctctgttgcccaggctggagtgcagtggcgcgatttcggctcactgcaagctccgccttctgggttcacgccattctcctgcctcagcctctccaagtagctgggactacaggcacctgccaccacgcccggccaattttttgtatttttagtaaagatggggtttcaccgtggtcttgatctcctgacctcgtgatccacccgcctcggcctcccaaagtgctgggattacaagtgtgagccaccatgcccggcctatcatttcttttcttctgctgggtttgggtttggtttgttcttgtttatctagttccttgaggttttaccttagattgtctatttgtactctttcagaattttgatgtaggcatttaatgctatgaactttcctcttagcaccgcttttgctgtatcccacaggttttgataggttgtatcactattattgtcagtttaaagaattttttaattttcatcttgatttcattgttgacccaaagatcatttcaggagcaggttatttaatttccatgtatttgcgtggttttgagattccttctggagttgatttctccccgccgagaaagcaggcaggactttcaggccttgcccctccctgtctgccgtggctttggcttccgtgtcgtatctgcacttctcatttgcccccccggattctgcccaggaaaatttgcactcagtcaaattattacacagtttacctggaaatctccttctttctatggcccttccccagttccactggctgttctccccaaggacccctgtgagataaagtcagaaatggcttccctagggaccaggactgcctacagggcttttcctactgttgcttctacttttatatgtcagtaaattcacttcagctgtaggtaagattatatccttctcccataatctggattttcaggttcaccagtgaggatgtgtgttcagaggtgggctttgcccttctcatacttttgggcactcacagttttttggctttcagattttgcagctgcaagccacttctatcaaaggatctgtgaattattttcagttttcctggtatgttcctgtggtggttcttggagtaaaagttcacagtgtgaatctccacacactgttctgtctgtccaattgggggctgcaagttagtcctgcctcctatctgccattttttacatattttctattttatactttaataccacccttctgtccaccaggatgacctccaatggatcaaacgtttaaacatacaaaataaaaccatgaaaatattacacaatgatatggagcaatttctttataatcttgaagtgaaaaaggtctttctaattgactaacccagaaaagacagaagataaaattgatagatttgactacatacaattcaaaattttctgcatggtaaaacaaagcaaaataaaaattacaagacaaaagtcaaagccaagctggggaaaaatatctgtaaatcgtcctttctggtggtgatgaccttcccacaagaacatgcctcttgcaaaggatctccttcatccctctccagaagaggagaagaggaaacacaagaagaaatgcctggttcagagccccaattcctacttcatggatgtggaatgcccaggatgctataaaatcaccatggtctttagccatgcacaaactgtagttttgtgtgttggctgctccactgtcctctgccagcctacaggaggaaaagcaaggcttacaagaaggatgttccttcagatgaaagcagcactaaaagcactctgaatcaagataagtgggaaaccatctcgataaacacattttggataaaaaaaattgtaacttgtatcatagacgacattaatctccttatgtcaagagcttctgttggtcaataacacaaaccgatgacctaacagaaaaatgggccataaacagaaaagaaattcagattccccttaaacatatgaaatatgcttgtttaaaataactaaaacacaaaactacatcaaagtaacattttttatctatcagattacaaatatccagaagttttgtacaccctgttggcaaggctgtgggaaataagatcattgctagtgtgagtataaattagtacaacccttttgaaaggaactacggcggtatctatcaaagttacatactttttacacacactattttgactcagcttcctacttctggaaatttgtactacaggtgtactggagaatggaacagtttggcaccataaacaaggtcaacaaatcaataccaatgagatcatctgagaaagggagagagaagaaaaaagccctaaaatttttccaatattgagggataagtgactggcaatggtaacagggaatatttagagaggatagaagaaaagagcaagcatgggttgtgagatgcaaaggaagagattattttaagaaggatatatacgtatatatacgtgcagatatatacacatacgtgtatatacgtgtatgtatatacacgtatgtgtatatatatgcatatatcgtatgtatatgtgtacatatacatatgtacacatgtatgtatatacatgtgtgtatatatgtaaatatgtatatatacacgtatatttcagcatatatatatgctgaagtaaaagttattaatagtattaggcccattggccttaagaaacattaaaacattataaacattttggtactacagaagaatctacgcaggatgcaatccagacaccataaaaagattggtttgattgcataaaagttaaaattttttgttctttccaacataaaaagcatcatgaactaaaaaatcaatgtcaaactcagaaaatctatttggaacatacatgacagaaaaatggtaattcccatgagctcatccaaatttaatcagaaaaaaaaacatgaaaaatacaatggaaaaataagcatagggtataataaggaatgtgtaaaaaaaaaaaaaaaggtggtcaaatggaaaataaacatgaaaggatgctcaacctcacctataattaaagaaacatatttcaaaacaaaataccacttttttagccttatattggaaaaatactatttaaactttatttgaaaaatattcaaatttataggaaatcacaggaataagacaaaacttttatgtacgctttgtccagattcaccagttgttaacattttgcctcatttaccttgtcattctttccttgctctatgaatatttttatctgggtaattggagagtatattgccaatatcatattcctttactcctgaattctcctatactccttttatattcctttactcctttactttcatattcctttattcctgaacacttactatgatggttgcaaagtggtgattttaaaaaaaaaaaaactccattttctgtctacattctgctataagaaagaatttttcttaacccgtattcattgattagcactgtggactcatggcttattctattcagtagattagtgtcctttgttgctatttattattttgatgcatggtaggttctggtttatccgtcttgtgtttccttttggaaaattaaatacatgtatgttttcctatttctatgtctttcttgcatgctatatattttgttgcaccttgccttttaatattttctggaattcattccatattagttgttttagatggtccttgtttttcatagctgcattgtactccttgtgtggatgtaccactgttggttcaatcagtctccaatgtttgagcatttaggtagctttaaatattttgccatcacaaataatgctgcaatgaataacatcttatatgaacatgtcaatattgttggaagtttatctttagaataaattcctagaaataggattgcaaggcctaagtttaacttcatttaagtatcaccaatttctcttccatggggattgaatcattctaaccagtaatatatgaggataaatgtttgtccacagcctcaccaacagattgtattgccagcctttggaatttttgctaatttaacagataagaagggaatttcagtatcattttaatgtatacttctctgaaaataactaaagttgaacatctttactatttttaagggccatatgtataatttttgtgaattgtgttttaatgtattttgcccattttgctattaagatttttggttttttcttcaattttttaaagttctctatatattaacagtgttagccttttatccatgatacatgtcacaaatatttttttccagtttgcatttgtctttcaagtttgcttattgtatttttgataatacaaaagtttttggtttttttaaagtcaaatgtatcagtcttttcttttatggtatctggattttgaggcagagtttgaaaggtgtccccaaacccaggttacagagaaatttacacatattttttctagcatgtaaatggtcttagtttatctttgtgtatggtgtgaaatatggacctaattttatctttttccaaatggccatctagtctaaataccgtttatttaaaagcctttctttgccccactgatttcagatagcatctttattatacactaaatttctgtatgtacttggttttggaccttctgttctaggccatataccagtatgatactgttttctatttattatggcttaattactaaagttttataatgaattttagtatgtatgcggtaggactagtaaacccctccccatcatgtaactcttttgtttttcattgttttccaagctttcttgctatttatttttccagatgaactttaatgtcaccttatctagttccaataaaataacttgttggcatatttattgggatcatattaatttataagtaaacttaagaacagtcattttatgatgttgagttgtcctatccaataacaagattttatttcttcaattgtatttttgtatctcttgggaacgttttatggttttattcatctaacttttatacatttcttttttctttttttttttttttttttgagacggagtctggctgtgtcacccagggtggagtgcaatgacgtgacctccactcactgcaacctccgttcaagcaattctcctgcctcagcttcccgggaagctgagattacaggcgtgcaccaccaggcctggctaatttttgtatttttagtagagacaaggtttcaccatgttggccaggctggtctcgaatgcctgacctcaaatgatccgccctccttggcctcccaaagtgctaagattacaggtgtgagccaccccacccagcctacatttccttttaaattcacttcttagtattttttgttgctatcaaaaataggtttttctcctccattatatcttctaactggtaatcattaatgtatatgaaagctgcctcactgaattttttaattatttgtgttacatttaccattgattctttagagtttttttggaatcctattatatcacctgcatatcagtagttttatttcttcctttccaattgttcatgcttctaattgttttcttttgtctagttgcttgataactctagtaaaatgttaaatggtaatggaaatattgtacatacttatttgtttctgacattagtaggaatgcctctggtgttttcccattaagtaatatactggctttaggattgaggtatagatattttatcatgtttagaaagtatttgcttgaacccaggaggcggaggttgcagtgagctgagactgcgccactgcactccagcctgggcaacagagtgagactttgtctccaaaaaaaaaaagtattcatgtccaacaattcctattctcttgaatactttttattaggagcagtgttgaattttgtcaaagactttttcagtttttatggagataatcatatgaactttctccttaaacccattaatgtaacttacattaatggaatcctacaagtgaaaacatctttgaattattggcatacaccttttgattatggtggtgttagaatctattcgctaatattcagtatttttacatcaatattcataaatgatattagtctttaatttccttgtactgtctttgtcaagttaagtatgaatattatacttcatgaaaatgagttggaagttttcttcatgttctgtgctctgaaacaaatgtactatgcagactatggtctgtaaaagtttgatagaatttccctctgaaatcatctaggcttcgtgcttttttgtaaagtaatttattgttaagtttttctgtttcttctatgaaattttctttcttttcaggcatcaatttgggtaaactgtatttccctagaaaattaccaatttcatctaggttttcaaatttatctgtatagaggtatacaaagtaatctctttaatttttaaatttctgtagcagtggttatttacccttaatactttgattttgtatgtgtgtttttaatgtttctttcctgaataagttaactaataatccattttaacttttttcaaacaaagaggattttttacttattaattagatctacctttttgcttgattgtatttcattctggttttacctttattatcttcttgcttgtactttcttttggcttattctttttctagctgtttgagttgagacttaatttattttcattcttttgtattaactactataagtatttaaagctattcttctcggatcactagttttaatatatttaattgattctagtctttagtgcttcattatcattgttttatagaaattctgtttatatttctgtaactcaaaagctattaatagttttttttaatttctagatggaagggttttttgtgttttttaatttcatttttaattgctagttttagtgcactttgatcagtgtttgcagtaattctactctatgaaatttgctttcttggtaacctaatatatgatcaatttttctattttatgtgtgcttgagaaaaatgtgtattttctagtttctgttctcataatatagtatttgatatgtatgcataagatataccttattgattatgtcgcttggctcttctatattccttttttgtccttggacctgtgtgttaaagtctcttattatcagtgtgtctatttctctttatatcatctataggtagttactgtgttgccttatgcataatcataactttatgtcttgatgataaattgtgactttgagctttgtaaagtgttctcccttgtcagatttaattcatttgttgtctaagttctagtttgtctgatatctggatttcaactcgttttcttattgtttccatttgactgtatatatttgttcttcccattacttttagcctgttcaaaatatgatgttttaagtaattttcttgaattagtgtggaactgagttttgctttatgagcagatttgaaatcctttcctttaaataggcaatttaagcccatttgcatttattgctctgactgatatgtttgttttcaactctatcatatttttataaatagtacctgattcagttatatttactgtatttctttttctatgtggaatcttctttgctttttattttaatttcttttggtatataggaaagtttatatttttgttccactggttacttttacaaactagaaaagagcaaattaaacccacagtagaaggaagaaaataataaagattagaataaaaaccaagagctctttaaaaaaaaaaaaatgatgaaactccatctccatactgatcaagaaaaaaaaggaaagaagacacaagttaccagtaacagaaatgaaagagaagatatcactacaaattctttatacataagaaggatgatgaggaaatattatgaacaacattttacctataaattcagagatgaaataggcaaattctctgaagaaaacacaaattacaaaaactaagaagaaacagaaaaacagaataaccctatatctatgaaataaattgaattaataatttaaaaaccttctcacaaagaaaatgccagtcccagatggtgaatttatcaaaaatgtaaagaagaaataacactaatcctatgcaaagtctttcagaaaaggagaatgaagttaccaactcattttataaggccagaattgccctgattgaaaccacagacactaaaagaaaactacagatcagtatctctcatgatcttagatacaaaaattcttaactattagtaaattaattccaacaaagtataaaaggggaaatactatgacttaagtgtggtttatattattaattaatgttgatagaatcattatcttatactcacatttaatttctcattgaaaataatctaacttctttagatgccttgataacagacttgtctcttcatttcttcccactgttttcaaataccaaatccactttccaaaaataaagatttgccatcactgaggagctccaaaacaatatgctaaattaggctttggaccccactgggtgcagcacaccaacatggcatgtgtatacatatgtaactaacctgcacattgtgcacatgtaccctaaaacttaaagtataatttaaaaaatcagaaaaaaaaaagaattctctgcttcagaacgttcttggattatggtaatattctgtatcttgattgtggtcatgtttacatgagtatataatttatcagaactcattgagctatacacttaaaattttttttaatgtcttgctctaactataagttgcgtttcagatctaagatattcacaaatatctgaagaatattcttgatagtagagaaagttctgaaatcccttctagttctaatccttcctccaaagtgaacctgatacataccatattgaaatcccagtaaggaaatcttacccttgtttatcggactagcatggctccatgtaggtgcaaaaaaagtcatttggagcttaacatttgtgactcatttaaattatttttgaacttaatcaaatctgtatttaattttctcctacttcattagacctagcttaattcatacagtgttgctctgctcataaacatacatttttaaattgtctaaactcaacaattaagttcaccatatacttgttagaacaattccagatgactttgcttagtcattcgtgtttgttttcagctttattcattcttcaaatagcatctacattcatctgaagaaactaaaagtaaactgattaccataatcgtgtggggcttagagttcagatcgcctctaaactcttatttaagagtagatattgtgaagcattattttcttaacttggttatttgattcaaggatagactttagtgctagatctgcccaaatggcatatcattaatatcgttttactggtgggggaaaaggagaggtagcattttagccaggcatgtctatcaaaagtattatttttactctctgctcttagtgccaaatattttctcacccaaattttcatatcttcatgtcatcttgcgtttccattaaatgagttaacaccttagtagattattcataaacttcaaacttggtgatcattgatatttatataacatttggtttatactctgatgaaatttaaaaaaatgtttaggcacttcacaaagatacacaataccatacttaagtgaagaaatcacagagaaaaataagaggaaagcaagatgcagtcatgactaaacttttgcatgctgtgaagaccaatgcacttactagagctaagccccaaatttagcgctggactttatagtccctcaacacaaggttaacagataaaatacagggcacccaattaaatttaaattccagataaacaagtaatttatagtataagtatgtcttgtatttttgcttgccaaactaagccgccctaccacagagaaaaaaatgcaaccattctaattactaaattacctaagcaacctcagctaaaatttaaagggtaactatttaatttcctgaacctcagaaagtctctcactcagatggtttgcagatttatgccataaaaattgaagcattcattattatttctgctataaatataactggccttatggccctttactgttttgagatttgtattttttcctaatgcactcgagaatatttatttatttatttattttcttggtgatatggcctcacctgtctctcaggccagagtgctgtgatggtggtacacctacggcgtactgcagccttgacctcctgggctcaagtgatccattcacctcagccactggagtagaagggactacaggcacgcaccaccatgtccggctaatttttctttttctttttttttttttttgagatggagcctcactctgttgcccaggctgaagtgaaatggcgcaatcttggcttactgcaacctctgtctcccgcgttcaagtgattctcctgcctcagggtttcaccatgttggccaggctagtctcaaactcctgacctcaagtgatctgcctgcctcagcctcctaaagtgctggggttacaggcatgagccaccacaccaagccttagctaatttttttattttttatttttgtagaaataagttctcactatgttgcccaggctggtctcgaattcctgagctcaaatagttctcctgcctcagcctcccaaattgctaggattacaggcatgagccaccacacttggctaaggaaaacattcttaataaaatatttaaattatttttatgacctattgcatattctgctaaatattctgactttttgatgagcatgattataaccctgtcccaagagaatccatcaacttcattagaggtactgcctgcactaatagacatcacatgtagtacagtctcgtgagtaataatataacaaaccacgtgaagggtaggagtgactgtttctttcctctgcgttgcaccctgtcccttttactctacattctgatgaatggaattacaaggccttggaataggtggctggcctgtacaacaaggtaatatccttgttgccgtttcatctccattctgacagttgcctagccttgggtaaagataaattattggtgtttgtagattctcactagcatatatattagagagtttgatcgtcagagttttttcactggtctaatactctcctcattatattcattcttgtttacagaattgctgacactcttattcttttttgaaactgaccccttggtttttctgccctagacactgcctattcagcaactaatcttctgcaagctttttctgactttttatatgccttatatatctggagttatagtttgatatagttaatttgtcttattttgaatataaatttttattttgatcttttattttttaagtcatttttcttaaattgcttgactcacaaatgattatttttactaaattttaatggtgtcttctgtaccttcctttgttctcttttcaaatttttcctttcctctggtatcgtttgaaacttcagcgcattgtagaatacagctttgtcccataaccctgaagaaaaacactgagacaataaatgtgatcacaggatttttttttcttcttacctaactttgaacaggtaatggagagtgaagagttcatgttgcttccagccaatcaactcattgatataatatccagtgatgagctaaacgttcgcagtgaagaacaagtgttcaatgcagtgatggcctgggtcaaatacagtattcaggaaagacgtcctcaattaccccaggtaatgatagaaattcttctctaagaaactgctgaccgggcatggtggctcatgactgtaatcccagcactttgggaggccaaggcaggtggatcacaaggtcaagagatcgagaccatcctggccaacatggtgaaaccctgtctctactaaaaatacaaaaattagctaggcattgtggcgggcgcctgtagtcccagctacttgggagcgtgaggcaggagaatcacttgaaaccaggaggcgaagattgcagtgagccgagatcgtgccactgtattccagcctggcgacagagcgagactccatctcaaaaaaaaaaaaaactgcttagtactagatgagataatacgtatttgtcttgcaaacataaaacagttatcactccacattcgtctgtaagaaagtccatctgtttccaaataatcaaggaaataagtatttagaagcattttggttgcttattaatgtgggctttttgctcctttgctttccccgtattttggatcaattctacttttgaatgatagcacaattcaaaacttaaattgtataaaatgaacaaaagaaagcaaggatgcttcttttcctatagcttggaaatcctaccagttttccttcaatatgacttggaaatactaccacactttcaagagtaaagacatgatgcatcagtcatcactgagtgatcagtagttcacttaagacccattcttgttattgtgattatagtctttagcaattcaacaagatattcttctggattgtgaattaatttgagtccagctatagaagagcttataatgtcttgctgaacgtttttagtagttatgccttccttccttccttatttatggtattcggtgagatcccaaaacaattggaagcacagtagggtaccatgggtcatgtattctcttaaatagcttatagatgagagctcatgcctttaatagtgtttattggctgggtgcagtggtacaagcccataatcccagcacttgggaggataaggcaggcagatcacttgagctcaggtgtttgagaccagcctgggcagcgtggtgattccccgtttctacaaaaaaaaaaatacaaaaatttgttgggcatggtggcatgcacttgtagttgcagctactctggaggctgaggtaggcacatcacttgagcccaggagattgaggctgcagtgacctacgatcatgccactgtactccagcctaggcaacagagtaagacctatctcaaaattaattaattaaaataatggtgtttattttctcataggtgctgcagcatgttcgtttgcctttgcttagtcccaagttcctggtcggcacagtaggctctgatcccctcatcaaaagtgatgaagaatgcaggtatgagtgaccctggatgggaaaaatcaacaactaagcattcctattttttcctaatttccttatttgtattgcttcctaaatattgtattttgcagagctgaaaccagggctttaatttaacaaggttttcttctgggctagagtcaagaggaggaaaagaagaagagagaactgaacttccagtgtttcattccattaggtttttatgtgtggtgcttactggtgtagaagtggcaataaaaaggtagatttccaagattttaatgcaggcttgaatttaaagagtcaattctctgctaatattttttttttccttgagataattaaataatgctgttgactctgtcaatgaacattttttccttccatcacatatgtctggttggggaatagaatcagccttgctttctaaattgtggacagagttgaagatctgccactttctaaaacagctgtagaaagattttcactaaaactaggtgaagcagtttccagaggttttttgacgaaagaaactcttaactactttttcaaagggggggaaaaaagcaacctattttactaggctgtctttaaagtatatacaaaatgtaataaattacattcccaatttgacagattgtaagatttaggttcaaatctgaaatcatctgggattgttaaccatttttccccagcatgtcccaaatataaaagtgaaagagaaaatccatactcagaactttgtaaactacactgacctttgaacctcccttggtgattaaagacatttagaatgatccctgattctagaatggtggtaggacatgtagattcacttgcatttcttctataaactaaagcctgttcttttaacaggagaggctggaggggattttagatgtttctattttattttattgtatcttttttatattaatcattcttcatttttcagtttaccatagactagagttaaactagatttttgtattctatatttaaaacacagacaggccgggcgcagtggctcacgcctgtaatcccagcactttgggaggccgaggtgggtgtatcacctgaggtcaggagttcgagaccagcctcaacatggagaaactgcatctgtactaaaaatacaaaaattagctggacatggtggtgcatgcctgtaatcccagctattcaggaggctgaggcaggagaattgcttgaacctgggaggtggaggttgcggtgagccaagatcacaccattgctctccagcctgggcaacaaaagtgaaactcagtctcaaaaaaaaaaaaaaaaaacacacagacaaatggcaattaattctcctaaatatttgcagtagcaaaaaggaaaaccatgtacattatacatgctgaaatctgaagaaataatacatagatgccctcctccattaaaagtaaatcagattgtattgtactgattctgatgcagaaagtaaaagtacttatgaagtcatatttaaaagaagacccttcctgatatcctaacttctttttgctgcagtttcttcctctataaagtgaggatgataatagtgcctattccataaggctgttgtgaagattaaatgagtttatatctattaagcacttaaaaccaggactagcacatagctgtaagtgttgttactaccattaattttgtgttggtttgctcaatattatagctctatagtattatttgtaggaaccctcaaatgacctaacaagctattaggagatcaaagtctttgtcttttttttttttttttttgagacggagtctcgctctgttgccaggctggagtgcagtggtgcaatctcgactcactgcaacctctgcctcccaagttcaaccgattctcctgcttcagcctcctgagtagctgggactacaggcgcgtaccaccacacccagctactttttgtatttttagtagagacggggtttcaccatattggccaggatggtctcaatctcttgacctcatgatccaccgcccctcagcctcccaaagtgctgggattacaggcgtgagccactgcaaagtcattacatgtgtaattactagactcttctcttaaagtgtcttaacaagacaggaaatatgtctcggtagacttgttgagagtaaaccattcatatgttaccagatagcaaatttgtggcagtacagtgtttcttttcagcaatccgatttttgacccagttttattactttaatctagcaaataactattgccctggctgatgtgctaccttgctaatatcttgcagaatctaataaaatttattaaaaagtagtaactctgcagtgtggtaatcaaattgtaatttttacttttctataagttattgttggctgtaagcatgttgagctttaggctaaatttgcagtgagacatgagtcatgatggaaataccaatcaattcacaactcagtttgactggcattattggtttcatgtttgtgccaattttaatattggctggcattcatgatttggtttgatttatgcttgcttccctttgccaacctatatattcctaaactacattgggacttaactaacaatgtaatttagatatttggaataaaggcagaattttttctacagagacttggtagatgaggctaaaaactacctcctattgccgcaagaacgaccactaatgcaaggaccaaggacgagaccacggaaacctatccgatgtggggaagtactctttgcaggtttggatcttaatatactgttagtaaattgagtattttcccaggtgagaaactgtcatttgaaaaatcctttggacaattatgatatttactgtcataagacacaaataataagtcagcatatagcttgactcataacccatgattccacactgatatactccaaaagagtgctctattcttttttctcattcaacacctttaatatctatttttatataaatccaaaaatgttggctggtcacagtggctcatgcctatacagctttctggaggccaggcgtttgagaccagcctgggcaatatagggaggccccatctttacaaaaaataagaaaaacaattggctgagtgtggtagtgcatgtctgtagtcccagctacttgggaggctgagacaggaggatggcttgagcctaggaggtcaaggctgcagtgagctgtgattgcaccactgtactccagcctggggaacagaacaagatcctgtctcaaaaaataaaaaataaaaatgtcgtgcagtagatgttttgttgaaatgagtcacatgcattaatttatatatcaatgtgcagctcatcccataatcacatggaattgtgaaaaaacattaaacaattataatttatttctccattctatgcatatccatctataatttctccattctatccatatatacatattatctcataatcctatgtgaattggtatcattgccttcctttgtaaaatagacgtaatactaacttatttacagaattgattaaagattatagcaatcccagtggaatgagttgaagtcataacttgcattttgacctactactagagacatttggtgagtctaagcattaggtcacagtgaagttagtagtgagtgttacattttatgcttcaggataggattctcttgaccatttctgttacttccccagttggtggttggtgcagtggagatgccatttccagtgttgaacgatatgatccacagaccaatgaatggagaatggtggcttcaatgagcaaaaggagatgcggagttggggtcagtgttcttgatgatctgttatatgcagtaggaggccatgatggatcctcttatctcaatagtgttgaaaggtgagtaaggtcaatctgtaattttctctctactattcatatagttttatttgagatgttaattaggaaacaaattgatttaatgctttagtattgcatctgtggcactagttggcaacctaaacaagttagtatgatacacaaattctttatgatctggtctccgcctatttttctagtctgtctcccatgacacactaccactccctaagcatgctactacagacacatcaaattgcctgcagttccttggacatgctgcatgtccattccaagtcatacctctctccttacatatatgcatgctgttcttttttccctgggatacttctgccactttaagacttacatttcctttggccaggtgcagtggctcatgcctgtaatcccagctactcgggaggctgaggcaggagaatggccagaacctgggaggcagagcttgcagtgagccgagatcacgccactgcactccagcctaggcaaaagagcgagactccttctcaaaaaaaaaaaaaaaagaaaaaaaagacttacattttcttcaagacacaaatgttacttaatacatacaactttctatgataccatacagatgagttagttactagttacttgttcctttgcccttccataagtattttgaacatgtttgtacatatccatcacattgtactatacgtgttgaaatgtgtttcaccataatatctatcgcagtgactgggcacattgggaatctctagtaactgatgtttcaatagcttcttgctctcaagaagctgtgttgattaacagtgactctttgtttccataacacatctatgaaacgctgccgcatatcaagttctaaagatatagattgtgcagctggggaaaaatcttaaaaagcagagggatcagtcccatagaagtaaaacaactgcaacatggagaaacctcatctctacaaaaaatacaaaaatttactagttgtagtggtgcacgcctgtgagtcccagctactcaggagactgaggcaggaggcccgcttgagcctgggaggtaaaggttgccatgagatgagattgcgccattgcactctagtctgggtgacagagcaagactctctcaaaaaaaaaaagaaaaagaaaacaacacacacacttaaaaataaattgatgacatcacagaagggaaaaaataaattgatggcatcacagaagggatcatggcagacgggaggcaggactagactgaagctccagaccgggcaacatgcggaggcttgattgcaaatgttagctccagactgactgcaagaaaaaatcagcaatctcaagaggacccacagaccctctgaagaaagcggactgctcctgcagcacccgggagaaaccccaaatattgggagtgccccaactgcagaaatgggaaagggagaccctcctctcccaaacacacacccccactggagaagctgaaggtctgtttgcaggagaagtttccaactttacctggagctgagtcaagttagagaggcaagcgaaataacaggggtagaggaagcagcagaaaggccctgggagtttgctgggtccccaagcaggccattcctgcctggcaccacagggatccattgggagggtggccagaggagcaggggataaaactccccagggagaaggaattctctagctgaactttgtaacaatttgaacagggtgagaagcctcctgaccagaactcaaggtagggtgcaaatcctgcatgcagacttcaccggcagggggaaaactaaagcccttttctcttgcagctgggaggcggatagcctggggcaagcctgctgcccgcctgtggcctggaaacagactcagagttgtgagaggggcacggtgggagtgagaccatgggagtgagaccagcccttcagtttgtgtgggagctgagtgaggcctgtgactgccggctttcccccactttactgacaacctgcatgactcagcagaggcagtcataatcttcctaggtacacaactcaagtgacctaggaatctcttcccccatccccaacagcagtcgcaacaagacccgcccaaggagagtctgagctcagacatgcctaatcctgcccccacctgatggtccttccctgtccaccctggtagtggaagacaaagggcatataatcttgggagttctaggaccccacctaccaccagtctctctccacactactacagctgatgttttctggaaagcaccacctcctggcaggaggccaaccaacacaaaaatagggtattaaaccaccaaaactaaggatcctcacggagtccattgcaccctccaccagaacaggtgctggtatccacagctgagagacccatagatggttcacatcacaggactctgtgcagacatcccctactaccagcccagagctgagtagacttgctgggtggctagacccagaagagagacagcaatcactgcaatttggttcacaggaagccacatccataggaaaagagagagaatactacatcaagggaacacttcgtggaacaaaagaatctgaacgatagccttcatccctagaccttccctctgacagagcctaccccaatgagaaggaaccagaaaaccaaccctggtaacatgataaaacaaggctcttcaacacccccaaaaaatcatactaattcaccagcaatggatccaaaccaagaagattccctgatttacctgaaaaagaattcaggaggttagttattaagctaatcagggagggaccagagaaaggcaaagcccaaggcaaggaaatccaaaaatgatacaagaagtgaagggagaaacactcaagaaaatagatagcttaatgaaaaaacaaaaattcaggaaactttggacacacttttagaaatgcaaaatgctctagaaagtctcagtaatagatatgaacaagtagaagaaagaaattcagagctcaaagacaaggtctttgaattaacccaatccaacaaagacaaagaaaaaagaataagaaaatatgaacaagcctccaaaaagtctgggattatgttaaacaaccaaacctgagaataatcggtatatccgaggaagaagagaattctaaaagcctggaaaacatactcgggagagtaatcaaggaaaatatccccagccttgtgagagacctaaacatccaaatacaggaagcacaaagaacacctgtgaaattcatcacaaaaagatctttccctaggcacgttgtcatcaggttatccaaactcaagatgaaggaaagaatcaagagccatgagacagaagcacagggtaacttataaaggaaaacctaccatattaacagcagacttctcagcagaaaccctataagctagaaggaattggggacctatcttcagcctcctcaaacaaaacaattatcagccaagaatttcgtatccagtgaaactaagcatcgtatgtgaacgaaagataagccgttttcagacaaagaaatgctgagataattcgccattaccaaatcaccactacaagaacttctaaaaggagctgtaaatcttgaaagaaatcctggaaacacatcaaaacagaacctctttaaagcataaatcacacagtacccataatgcaaaaatacaagttaaaaagcaaaaacacaaaacaaaaccaaagtacataggcaagaaagagcactacgaaagtaaagtaacggtacctcacatttcaatactaacattgaatgtaaatgacctaaatgctccacttaaaaggtacagaaccgcagaatggataagaactcaccaaccatctgctgcctttgggagactcacctaacacataaggactcacataaacttaaagcagtggaaaaaggcatttaatgcaaatggacaccaaaagcgagcaggggtagctcttcttatatcagacaaaacaaactttaaagcaacagtggttaaaagagacaaagagggacagtatataatggtaaaaggctttgtccgacagaaaaatatcatagtcttaaacatacatgcacctaacactggagctcccaaacttataaaacaattactaatagacccaagaaatgagatagacagcaacacaataatagtgggagacttcaatattccactgacagcactagacaggtcatcaagagggaaattcaacaaagaaacaatggatttaaactataccttggaaaaaatggacttaacagatatatacagaacatttcatccaaaacccacaggatacacattctattcaacagctcatggaactttctccaagatagaccataagataggtcataaaatgagccccaataaacttaagaaaattgaaattatatcaagcactcactcagaccactgtggaataaaactggaaatcaactccaaaaggaaccttcaaaaccatgcaaatacatggaaattaaataacctgctcctgcatgagcattgggtcaaaaacgaaatcaagatggaaatttaaaaattcttcaaacttaatgacagtaatgacacaacctatcaaaacctctgggatacacagcaaaggcggtgctaagaggaaagttcatagccctaaatgcctacatcaaaaagtctgaaagagcacaaacaggtcacacctcaaggaactagggaaacaagaaccaatcaaacccaaacccaaaggaaataaccaagatcagagcagagcaaaatgaaattgaaacaaacaaacaaaagaccaaaagataaatgaaacaaaaagctggttctttgaaaagataaataaaattgatagaccattaccaagattaaccaagaaaaggagagaaaatccaaataacctcactagaaaatgaaacaggagctattacaactgacaccactgaaatacaaaagatcattcaaggctactatgaacacctttacacatataaactagaaaacctagaagagatgaataaattactggaaaaatgcaaccctcctatcttaaatcaggaagaattagataccctgaacagaccaataacaagcagcaagattgaagtggtaatttaaaaattacaacaaaaaaaaagtccaggaccagacggattcacagcagaattctaccagacattcaaagaaaaattggtaccaatccttttgacactattccacaagatagggaaagaaggaaccctccctaataattcataattcattctgtgaagccagcatcaccctaataccaaaaccaggaaaggacataactaaaaaagaaaactacagaccaatatccttgatgaatgtagatgctaaaatcctcaacaaaatactagctaaccaaatccaacatcatatcaaaaagataatccaccatgatcaagtgtgtttcacaccagggatgcagggatggtttaacatatagaagtcaataaatgtgatacaccacataaacagaattaaaaacaaaaatcacatggtcatgtcaatagatgcagaaaaagcattcgacaaaacccagcatcactttatgattaaaactctcagcaaaattggcatacaagggacatactttaataaaagccatctataacaaacccacagccaacatactgaatggggaaaagttgaaagcattccctgtgagcatggggtaaaagacaaggatgcccactctcaccactcctcttcaacatagtactggaagtcctagccagagcaatcagacaagagaaagaaataaagggcatccaaatcagtaaagaggaagtcatactgtcactgtttgctgatgatatgattgtttaccttgaaaatcctaaggactcctctagaaagctcctagaactgataaaagaattcagcatagtttccggatacaagattaatgtacacaaatcagtagctcttctatacaccaacagcaaccaagcggagaatcaaatcaagaactcaacttttttttacaatagctgcaaaaaaaaataaaatacttaggaatatacctaacaaaggagtcaaaagacctcaagacctctacaaggagaactacaaaatagtgcagaaagaaatcatagacaccacaaacaaatggaaacacttcccatgctcatggatgggtagaatcaatattgtgaaaatgaccatattgccaaagcaatctacaaattcaatgcaatcaccatcagaataccaccatcattcttcacagaattagaaaaaaacaattataaagttcatatggaaccaaaaaagagcccacatagccaaagcaatactaagcaaaaagaacaaatctggaggcatcacactacctgatttcagactatattatagagccatagtcaccaaaacagtgtggtactggtataaaaacaggcacatagaccaatggaacagaatagagaacccagaaataaacccaaacacttacagccaactgatcttcaacaaagcaaacaaaaacataaaggggggcaagaacactcttttcaacaaatgttgctgggataattagctagccacatgtaagaaaacgaaactggatcctcagctctcaccttatacaaaaatcaactcaagatgtattaaggacttaaacctaagacctgaaactgtaaaaattctagaagataacattggaaaaacccctcttgacattggcttaggcaaggatttcatgaccaagaacccaaaagcaaatgcaataaaaaaaaaaaaaaaacagctgggacctaattaaactaaagagctgttgcatggcaaaagtaacagtcagcaaagtaaacagacaatccacagagtgtgagaaaatcttcacaatctacatctgacaactaatatccagaatctacagtgaattcaagtcagtgagaaaaaaacaatcctatcaaaaagtgggctaaggacgtgaataaacaattctcaaaagaagatgtacaaattgccaacaaacatatgaaaaaatgctcaacatcacaatgatcagggaaatgcaaatgaaaaccacaatgcgataccaccttactcctgcaaggatggccataataaaaaaatcaaaaaccagtagatgttggtgtggatgctgtgaacagggaacacttctacaccactggtggcaatgtaaactagtacagccactatggaaaacagtgcagagattccttaaagaactaaaagtagaactaccatttgatccagtaatcccactactgggtatctactcagaggaaaagaagtcattaatcgaaaaagatacttgtacacacatgtttctagcagcacaattcacaattgcaaaatcgtggaagcaaaccaaatgtccgtcaatcaatgagtggataaagaaactgtggtgtatatagacgatggaatactatgcagccataaaaaaggaatgaattaacagcatttgcagtgacctggatgagattagagactattattctaagcgatgtaactcaggaatggaaaaccaaacatcgtatgttctcactgataatgtgggagctaagctatgaggactcaaaggcataagaatgatacagtggactttggggacttggggggaagagtggaagggggtcaagggataaaagactacaaatatggtgccatgtatactgatgcatgcaccaaagtctcataaataaccactaaagaacttactcatgtaaccaaataccacctgtaccccaataccccaataacttatggaaaaataaagaacacatcccagtttaaaaaaaattgatgggttaaagaagtgtagaaatagctaaatatttatgccttaacaatttagcctatatatgtcaaaatggatagaatgcaactaaggtggtacccaggggcaaatttacatgaattttagcttagatacattaatataacttatatgcatttggaaataaggaagatgcaaaataaatgaatcatgcttttaagtcatcactgaaaaggcaataaaacccaacaaacaaacaaaaatcaacgaaatttaaaaaaaagatatgtctacaaaaagagcaatttgataggatttttaaaaattaagcatactcggccggacatggtggctcatgcctgtaatcccagctctttgggaggccgaggcgggtggatcacgaggtcaggagattgagacaatcctggctcacacggtgaaaccccgtctctactaaaaatacaaaaaaagagacgggtgtggtggcgggcgcctgtagtcccagctacttgggaggctgacgcaggagaatggcgtgaacccgggaggcggagcttgcagtgagccaagatcgtgccactgtactccagcctgcgcaacagagcgagactccgtctcaaaaaaaaaaaaaattaagcatactgtttgctacagtaattctacctatcacccatttgcacaaagagaaatatataaggatgaacattgtttttaataggaaaatatcagaaacagcctaaggggtatatcagtaggaatataattaaataatgtataacacatataatagtaaaataattcaaaagaaaaatctagagctatattagcataaatagatctcaaaaaacgttgagggaaaaagcagtgcctactgtggtattatttatgcaaagaaaacatgcttgcatataaagaaatatatatatgtggatacatatatacctatatgaaagcattttactgaaaagtcttgaaggatatatgccaaatcaaaatgggaagagacaagaattcaggtggaactcaaggagggctttaactttatcaataatattctgatttttttaaagaaaatatattcatacataaatttcaaaaaataaaaacacaaaccagattttcaaatgttttggttattattaatcagcccatacttaggggaaataatatatatcatataaatccatggatttagaatatgtaaacatagccaagcttcctttgtgtaatacaaactctcctcttggtatgttcttttcaggtatgaccccaaaacaaaccagtggagcagtgatgtggcccctacaagcacctgcaggacaagtgttggtgtagcagtacttggaggctttctttatgctgtgggtggccaggatggtgtgtcttgcctcaacattgttgagaggtgatcttttttttaagtcattttccgtatttttattttaaagaacatagagctctttaaaagaaaaactacaggttgggcgtggtggctcacacctgtaatcctagcactttggaaggccaaggcaggtggattgcttgaactcaggagttcgagaccagcctgggcaacatggtgagataaaaaatacaaaaaaaaaaaaaaaaattagccgggcgtggtggtgcatgtagttccagctacttgtggggctgaggtgggaggatcacttgagcccaggaggttgaggctgcagtgagctgagatcacgccactgtactccagcctgggtgcaaagtgagaccctgtatcaagggggaaaaaaaaaaaaaaaagaaacaagtagagctgaatttaggacattggaggatccactattcagtggatttcccataggctttcagcaaaaagtcttcagttgatcttaaagtctaggaaaatgaaagatctaaaaaaagttttttttaattaacaaaaattatatatattcacagtgtacagcatgatgttttgaaatatgtataggttgcggaatggctaaatcaagctaactaacatattatctcacatacttatgatttatttgtggtgagaacacttaaaatctactctcaagtgtataatacgttgttattaactatagttactatgttgtacattagagctcttgaatttattcctcctctctaactgaaattttgtactcatttaccaagatttcctcactgcccctcaccttgccagcccctggtaaccaccattctactctctacttctgagttcaacttttttagattcctcatataagtgagatcatgcaatatttgtctttctgtgtttagcttgtttcacttaatgtcctccaggtttatccatgccgtcgaaaatgtcaggatttccttcttttttaagactgaatagtattctattcatatatgccacattttctgtatccattcatctgttgaggtacatttagcttaacttcatatctggtctattataaataatgctgcaatgaatatgagagtacaggtatctcttcaacatacttatttccattgaatatatacttagtagtgggattactggatcatatgatagttctatttttaatttttcgaggaacctccatactgttttccgtaatggctatactagtttacattctcatcaatggtatgcaggggtttccttttctccatattcttgccaacatttgttatctatcttttttaatatagtagccattctaacaggtgtgacatggtatttcattgtgattttaatttgcatttccctgatgataagtgatattgagcattttctcatatactgagccatttttatgtgttcttttgagaaatatctattcaggtcctttgcccatttttaaatcagattatttgttttcttgctgttgaattgtttaagttccttatatattttcagtattaaccttttatgagatgtatggcttgcagatatgttctcccactctgtagattgtctcttcactctgttgattgtttcctttgccatgcagaagcctttttgtttgatgtaatcttactttttttgcttttgttgcctatgctttggggcacataacctgattttttcaactgtcacactgattgtacctaacattgaaatgttagaaatgtatttcagattatattctatatatatcaagcataccacttgtgaaatctgttctgatttttttcctgaatctacctggagtgtacttaatgaatgactctacttagacttcccccagagaaatgattacataataatactttgtataggacatcttataaaaagcttaaagtattttgtatatagactcattaatcattgaagtatacttagggaaatctaggtgggctgccatagtcactttatactggtgtacaaatagttaattttggtagaacagattttgttcttaatttcttctgtcagcttttcgtcattagattttagagtctcatgtgctatgattactgataagaacatatatttcatcctcacatcttaaaaagaaatgagtcatgactctaaaatttttgaggtagcatttactagtttaccatgtatatgttgaaacgtttaactgttgtaagtagagataaaatagaaggtaactcttgaaagctatgccagttcccttttatctctctgtcaagaaatctattttttcactttcaaaactcagtacaggaggttagcagcagtgatggcatagttttttaatatctccaaatgcccacataaaaacagatagagtaatagatagcaaagctaaaaacctatgtactagttctggagattggagttacacaacaatgtgaatatacttaacactactaaacagttaaaacatggttaagatggtaaattttatgttatgtgtgttttaccacaatttaaaaatcagaacctgtgaacaaaatttaacacaaaactaagggaaagaatatcctcacaaactccaaaacacaaacgggcaaagacaaactaccattagccacaagacctgcatgatattagtatcttcaggagaaatcagaaagaagcaattggatgtctgacagatctaagaacaaaagaacctcaaactagctaacacgtagtaaatagaaagcacaaggggaaaatttatcagcaactgaaactagaaacagttttgtccactgccatagagtgtaagtgcaagaccctcaataagatctaaagggcttagaagagggtttctcaacctcaacactactggcgttttgggtcagacaattctttgttgtgggggactgtcctgtgcattgtaggatgtttaacagcatccatagcctctaccaactaagtgccagaagcatgtgcctggttgtgacaaccaaaaacagtctctaaacattgccagatgttacttaggggatgagaaaggggggatgaaggggaataaaataacacctggttgggaaccagctgagttagagccatctagtccctgggaactctcaaaactgaccagccaggataatcttccaggtcaggaccctacactgaggagaatcaaaattaagcaggacgagggcaacagatgcccttgttttccttgaaaagagaaagccaagacaaaagtaaggcagtgaataaagtcaataaatctctggactaggcgctgtggctcacacccataatcccaacactttgggaggcctaggtgggaggattgcttgagtccaggatttcaaaccagcctgggcaacatagcgagacgttgtctctccaaaaaataaaaaaattagccaggcttggtggcatacacctgtggtcccagttactcaggaggctgaggtgagaggattgctgggaggtcaaggctgcagtgagccatgattgctccactgcactctagccagggtaatagagtgagaccctgtctcaaaaaaaaaaaaaaaaaaaaatttaaggataccccattctttatgatgtgattatttcacattgcatgcctatatcaaaacatctcacataccccataaatatatgcccaaaagttaaaaatacaaaaaaatttaagtaataatctctgaaggcaaggcactatgttttttaatactacataaaaaaaagaaggagctccacaaagttagaaaaactgtcacaaaccactcactcctatttctaaaagttcaggaaaactcatttcatgtaaaaatgaaatagcaaagtattgagattagattccatacaaagttaatataagaagagagaataagcagcagaataacatctctacagacaataaaagcacactagaaagacacacctacagatcaaaaccttaactgtttcaaaatgtgataaaagacattaagaaaatgataacagatatgaaactacataaatcagaagtagaaaaattcagaaatgaagtgacagaactcagaaatgtattagaaatgaaaggaaaaatcatttcagaatgaagattaaaggataataagcaaaacagataatgccataagacaaatagaaggcgaaaagaggaaatattttaaggtcaaaaagaaatgaaggccgggcacagtggctcacgcctgtaatcccagcacttctggaggccgaggcgggtggagcatctgaggtcaggagttcaagaccagcctgactaacatggtgaaaccccatctctactaaaaatacaaaattagccggatgtggtggcaggcacctgtaatcccagctacttgggagacttgaacccgagaggtgaaggttgcagtgagccgaggtcgcaccattgagctccaccctgggcatcaagagcaaaactctctctcaaaaaaaaaaaagagagaggaaaaaaaaaaacaagagataccatttgagagatagtaacaaatattgaaaataggtaaaaatctattatacaggtgatagcagtccttaaagaagaaaaccaaagggaggaaacagaatgaatactaagaactataatccaaagttactttcctataattaaaaaaagaaacttttttgaaagaatacgctatatccttcgaatattgacccagaacaccaagacatatgctaataacatgactgtaccttgaagaaaaagaaaaaattccttagacatctacaaaaaagtacatgttacttgtaaggaaaagaaacttagattatcatctggctttttaaaagtagtagttcatgccagaagaaaatagaattgcatgttttagatattcaagaaaaacgtgagccaaggattttataccttgagaaactgactttgaagtacaaagggcacagacaactattaacaacatgtaagaaattagggaatcttgttcccttgagccctctaggagaacaaacttcagacaaaattactagaaagacattgacagaagggctagaccatgtggttcacacctgtaatcccagcactttggtaagccaaggtgggaggatcgcttgagactaggagttcaaggctgcagtgagctatgatcataccactgcactttagcctgagtgacagagcaagaccgtgtctcttaaaaataaatacatagatacatacagttaactgtagaactatgactaaatgaagattaaaagggggagggctgggtgtggtagctctgacctataatcccagcactttgggaacccaaggtagaagtacgacttgaggccaggagtttgagaccagcctaggcaacatagtaagaccctatatgttaaaaatgtatatatgtatattttttaattagccaggcatggtggtgcacacctgtattctcagcgactcagaaggctaagacaggagattgccctgagcccaggagttcaagattataatgagctatgattgcaccactctaccccaccctgggtgacagactgaccctgtctctaaaaataaaaataaaagggagagagtgtagcatgctctagctatgtactcaatccatgtaaatgtagtacaaagaagaggtatgcaaaaatgaattttaattgttctcagggatattggagtgataatattgctattctgttatgtgtataaatgtagaataaaggaaatgagtatgcattattctaattctgctctctcctttgtccttgaaaaccagagtgtggaggtagaagaagaaaaggttgcaaaatagaagttaaataaagtatcttgtagtcctgagtatgaatttgaactaaattcctcttttgaaaaaatttctatatattctagcttgtcaactgagaaagcctcgaaataaagtgtcagtgaacatctctactcccagattgtatcttgaaattttatttcccacttaaagaaaccagagcttattggaaaatgtctgattccaggtttagaacaggaaatgtgcagatgagtctgtacccttttgtcataccaaatagcaagcaagctgtcaaagaccgctaagagtcaaaaagactcaggagccaacttgaagatgttcccactgaccaaagataacataatttcagctttaaaagggataattgcaatagattgaaatccaataaatacacttaaatatatgagttcttaatgataaactttttaagactaattggttgcctttggaagatcatatggaacaaatttattatctcaaaacataaaatgaagtgaacatatatcctgcttttcttataagaactgtattattatattgattaaccaaatagttaatattattatattgattaaccaaaccatattattatattgattaaccaaataaaaggattgtttctttataaaattatcccaataaaagaaaataagtgattatcattttgcaacactcagtaaattagtgtatctagacattgataaacagctgctaacataccaccttctttagtcttgttaaaggaaccaaacatggtctgatcaaatttctggatccaactaccaatttgcccaacataaaaaggacagagcaacagattggactgcactatgaacgtacagtcaaccaaatccatattatggggaaaattgtcatacactctgggttctaaaacagatgaattgcagggaagaaaaggaatggagagaaaacctgtagacaataagagactttttaatttaatctgatttttttagagacagggtctcactctgtcacccaggctggagtgcagtggtgcaataatagctcacaactgtctcaagcaatccctgcctcatcctcccaagtagctgggactgcagatgaatgccgctatgcctggctaattttttttccaatttttttatagagataaggtctctctgtgttgacgaggctggtcttgaactcgaacttgtggcctcaagcagtcctccagcctcagccttccagagtgctgggattacaggcatgagccaccacacacagccttttttttttttatcttttttttaagtctcagccagacacagtggctcacctgtaatcccagcactttggggggccaaggtgagaggattgcttgaggccaggagtttgagactagcctggttaacacagcaagacccctatttttaaataaataaatattaattaaataaataaatattaattaaaatttttttaaatgtaatgttaagtaagattgaagtgtctagggatggcactttctgtatttgagttttataataaaaaggttgtctcaaagaactatgcaaaagacttctactttctaataggatgtagtagagagtaacagccatcacccccactacaacgactaggaaaaaaagacaaattacaaaaatcatattttaaaatacatcagaggcatttcaaagtaatgaccaaatgaactaaaattccattgaagaaagagcctgtgttgccagccgggcacggtcactcacgcctgtaatcccagcactttgggaggccaaggctggcagatcacgaggtcaggagatcgagaccctcctggctaacatggcgaaaccccatctctactaaaaatacaaaaaattagccaggcgtggtggcaggcacctgtagtcccagctgctcaggaggctgaggcaggagaatggcgtgaacccaggaggcggagcttgcagtgagctgagatcacgccacttgcactccagcctgggcgacagaccaagactccatctcaaaaaaaaaaaaaaaaaagagaaagagcctgtgttatgtgagctgaagtcataggttgttttctttccttgggacattttccaagtatgagtgtagaaaatagcttaatagctggcacagatataaattctaagacgtttttctaatgactaagtaaaatgttagattttcattgcacatttgactatagcaagtccgtgtactcagtatatcgttagtgtgatttcagatcttatgaaaaaggcttcacttaataagaacaagcatacagtctggtttccctcactgcaggtatgatccgaaggagaacaagtggactcgggtagcttctatgagtaccagaagactaggtgtggctgtggctgtgttaggagggttcttatatgctgtaggtggctctgacgggacatctcctctcaacacaggttagtccctcccaaaggcaatcaggttccccaaaagcagaacattttcctggagagtcctcctacaaaacgtgtagaaactccaggttatcctataatttactaggaaaatgcctgatttttccctccagcagagtgcagctctcagctcttcctcagctcccactgtagtcatattctaagtacgttccccaaatatttatttcttcccctgctttccaagctgctggaaatttataatgaattttaaaaactactttcttatataattagttccttttcctccatcacaacttctcctcaaaaccacaacgtactctaatccaagaataaataaaaacttagaactacaaattcgtttatttgggttttgtttttgtttgtgtttttatgacagggtctcgctctgtcacccaggctggagtccagtgccacaatcttggctcactgcaacctctacctcccggactcaagcaatcctcccacctcagcctcccgagtagctgggattatacgtgtatgccaccacacttggctgatttttgtatttttagtagagatggggtttcgctgtgttgcccaggttggtctcaaactcctgagctccagtgatctgcccacctcagcctcctaaagtgctggaattataagtgtgagccactgcacctggcctggtttgttattcctttctatttagatagtatgggtatttttgcctaaggatattgtcaatgtgacagtcacaccagattcgtcacgtcttgtcttctcttcagaagcttaaaatgcactgtgctataggggagggaatacaggagtacagaagttgtctgattatgatgataaattgttagtactgaatggtgcttattgatcatgtagtcaggctccccatttaacgataaggagagtgaggctgagagtcatgtagctaattagtcatttagataaaactagaaccagagtatctggatcccaacacgtgccctttccactgtaccatacctagaagaaaccagtccctgatgagagtatatgtagtattgtccagaggtatacaaatccttctcagaagcaaaaatcagatcatgtgttgaaaatatgtgttatcacaaagtatcagtggctataaagaaaactggaggtgagaggaaatggttgaatgctcacttactggtttttcttttccctacagtggaacgttacaatcctcaggaaaacagatggcacactatagcccctatggggacccggaggaaacacctaggctgtgcagtatatcaggacatgatctatgctgtaggaggtagagatgacactacagagctgagcagtgctgagagatacaaccccagaaccaaccagtggtctccagtggtggccatgacatcacgccgtagtggagtaagtggttatggacacttaggttgcttccaaatcttggctattaatagtgctgcaataaacatgggagtgcagatatctcttcattatactggtttcctttctttggggtatatacctagcagtaagattgctggatcatatgatatttctatttttagttttttgaggaacctccaaactgttgtactaatttatattcccaccagcagtgtaggagggttcccttttctctgcatccttatcagcaatcgttatggcctgacttttggataaaagccattttaactggggtgagatgacatctcattgtaattttcatttccatttctctaatgatcagatgttgagcaccttttcatatacctgtttgctatttttatgtcttctttggagaaaggtctattcagatcttttgcccactttttaattggattattagtttttttctattgagttgtttgagcccttatatattctagttattaatcccttgtcagaagagtagttttctcccattctgtgggttgtctcttcactttgttggttgtttcctttgctgtgcagaagctttttgacttaatgtgatcccatttgtctattttttctttggttgcctgtgcttgtggagtattactgaaaaaaatctttgcccagaccaatgtcctggagagtttccccagtgttttcttttagcagtttcattgtttgaggccttagatttaagtctttaattcattttaatttgatttttgtatatggcaaaaaatggggtctagtttcattctgcatatagttacctggttttcccagcactgttaattgaagagattgtcctttccccaatatacgttcctagcacctttgtcaaaaaaacagttcgctgtagatgtataggtttatttctgggttctccattctgttccattggtctatgtgtctgtttttattctagtctcataccgttttagttactgtagctctttagtataatttgaagtcagataatgtgattcctccagttttggtcttgttgctcaagatagctttggctattctgggtctttgtggttgcatatcaattttaggattattttttctatttctgtgaagactgtcattggtattttggtagggattgcattgaatctgtagattgttttggatagcatggacattttaacaatattgattcttccaatccatgaacatggaatgtcttttcatttttgtgtgtcctcttcaatttcttgcatcaatgttttctagttttcattgtatttttcacttctttggttcagtttattcgtaggtattttatttatagctgttgtaaataggattactttcttgatttctttttcagattgtttgctgttggcatatagaaatgctactgatttttatatcttgattgtgtatcctgcagctctgctgaatttgtttatctgttctaatagctttttggtggagtctttaggtttttccaaatacaaaatcatactgtaggcaaagaaggataatttgacttcttcctttccaatttggatgccctttctttctttcttttgtcccattgctctacctaggacttccagtactatactgaataacagtggtgaaagtgcgcatccctgtcttgttctagatcttagaggaaaggctttcagtttttccccattctaaatgatgctatctgtgggtctgtcatatatggcttttattgtgttgaggtatgttccctctgtacccagttttttaagggtttttatcatgaagggatgcttacttttatcaaatgctttttcagcatcaattgaaatgattatttggtttttgtccttcattctgttgatatgatgtaccacactgattgatttgcatatgttgaaccattcttgcatccctgggataatttctacctggtcatgatgaattatctttctaatgtgtcattgaattcagtttgctgggattttgttgaagatttttgcatcattgttcattgaggatattggactgtagctttctttttttgatgtgtctttgtctggttttggtatcagggtaatactagcctcctaaagtgagtttggaagtgttacctcttcctctatgtttggagtagtttgataggattagtattaattcttctttaaatatttgataagattcagcagtgaggccattgggtcctgggcttttctttgccggaagatttttttttcttttttttattatactttaagttctagggtacatgtgcacaaagtgcaggtttgatacataggtctacatgtgcctacatgtgccatgtttgctgcacccatcaactcgtcatttacattaggtatttctcctaacgctatcactccctcagccccccaccccccgacaggccctggtgtgtgttccccgccctgtgtctaagtgatgtcattgttcaattccgctgggagattttttattacagctttgatctcattacttttttgttttgttttgagacagggtctggctctgtcaccaaggttggagtgcaatgatacaatgtcggctcattgcatcctccacctcccaggctcaagccttccttccacctcagtctccccattagctgggactacatgtgcacaccatcatgcccagctaatttttgttttttgttttttttttggtagagttggggttttgccatgttgcccagcctggtctcaaactcctgagctcaagtgatctattcgcctcagcctcccaaagtgctgagattacaggcatgagccaccacacttagccttattacttgctattggtccgttcaagttttagatttcttcatggttcaatcttggtaggttgtatgtgtctaggaatttatctgtttcttctagattttctaatgtattggcatatatttgttcataatagcctctaattatcctttgaatgtctacggtatcagttgtaatgtctcctttttcatctctgattttatttatttgggccttcttttttcttaatctgcctaaaggtttgttgattttgtttatctttcaaaagtcaacttttcatttaattgatcttttgtgtttttttcacttaaatttcattaatttctgctctgatctttattgtttcttctcattttggatttggtttgttcttttctagttctttaagatgcattgttatgttatttgaagtttttgtacttttttgatgtaggctcttattgctataaactttcctcttactttcactttatgtccaaaaccgctttataggttttggtatgttgtttttccattttcatttgtttcaagaaacttttaatttcttcatttcttcattgacccactggtcattcaggatgcttttaggtaaatcaagccctgctaatttgacactagaaaataatgaatttcttttgattatttttatctcatgtagttgaaaaattttatgtcgtcatatctttaattagagaataattttttaggatttctccttttttttttttttttttgagaaggagtctcactctgtcacccaaactggagtgcagtggtgcaatctcagctcactgcaactttcacctcccaggttcaagcaattctcctgcttcagcctcccgagtagctgggagtacaggcgcgtgccaccatgtccagctaacttttgtatttttagtagagatggggttttgccatgttggccaggctggtctcaaactcctgacctcaggtgatccacccccctcagcctcccaaagtgctgggattatagacataagccactgcacctggcttttaggatttatcctgtatccattgcttttctgaaacaatctccccaaattatctactaccttatctaaattaatattagatctatatattgcaacttaatgtttctagctaatagtcttaagtagttggcatactaatacaaatgtttaggcaaaaatacatctggctccacccctagtccccacaaactagtttgagtctatcctatctatagtatagaccagatcagactgccctgggacatgttctagaccatggatggcctgtaactcaagagacttctgggcgaagtatagaatttatcatcttgggatgtttgctgagagcaaaatataacccattaaccactgatcatgtcaggagttcatcgagacatccacaacaggaaggagaagcaagcagtagctaagcactccacaatctgaggataaaagagagtgaattctggtttgcgtaaatcaaggaacaccactggaaggtgtcagcaagtcaaagccttcacatatctgtggctttttattactgacaactaacaacatcttagtcacattcctgttaagtgttcgctgtgtgttgggaaagcaaaaatgagtatggcatgattcctctccttaagtagctcccaatttagtgaaggaaattgaaatgtttacagctaactataataaataaaccctacagtagtgttatatattttatagaagaacataggagaatgcgcttactgctttggggaagtaagaatgagttggggcagtgaagagactaccaaagacagtcacatgtaagctagctcatgaaggaagaataagcttttctaaaagacagacagaaaacagtagccagggccaggtgcggtggctcatgcctgtaatcccagcactttgaaaggcagagacaggattacttgagcccaggaatttgagacccgcgtgggcaacatgtgggaccccatctatacaaaaaatttaaaaattatccagatgtagtggtgcatccctgtagtcccagcaacttaagaagctgaggtgggaggatcacttgaacctaagaggtggaagctacggtgaactgtttttttgttttattttgttttgagatggagtcttgctctgtcatctaggctggagtgcagtgtgcgatcttggctcactgcaacctccacctcccgggctcaagtgattctcctgcctcagcctcccgagtagctaggactacaggtgcgtgccaccatgcccagctgtttttttgtatttttaatagagatggggtttcactatggtgatctgtgatcctgccactgcactgcagcctgagtgacagagcgagaccctgtgagtgagagagagagagggaaagagggagagggagagagagagaggagggaggagggagggaggtgggggaggggaggggagaagaaaacaccagccagggaacatgtgcaaaagtgtggaggtgtgaaaaatgtatgttatcttcagggactagcagttaatccagttttactgcagcaataggattcattagttaggagtaaagggaaactataagaggtgaggcttaaatagtgggctaagatagatttctggagggcctgagtaacataataaggactttaaaacttacccttaaatagtagggaggcttagaaagttgttttggttttaggagatttttttgagagggtcccactctgctgcccaggctggagtgcagtgtacacaatctcagctcactgcaacctcgacctttcaggctcaagcagtcctcctgcctcagccttccaagtagccgggactacaggtatgccccaccacacccagctaatttttgtattttttgtaaagacagggtctcactgtgttgcccaggcctgtctcgaactcctgggctcaagcgatccaccgacctcagcctcccaaagtgagaaagtttttagaggaaagtgacaatatgattagatttatatttttctgttttactttatttttgtagagataggggtctcactgtgttgcccaagctggtcttgaactccaggcttcaagtgatgctcccacctgggccttcccaaagtgctgggattacaggcatgaggtaccatgcctggcctagatttgtatttttaaaagagaattttactagcaattagaaagattagagcaggcaaataccagaggaagtgagagcagtttggaggttgtttgctcacttctagtgaacagtttttctaaaatttaagaaatacatgttttggattctgtgtgaatattctaattgaatatataattttatagttcccataatttgatagacttttgttgttacattttccctgtgtttcagtaaaccagaatgtaaggccataaagaattatcttttgtaaatagatttatctagaaaccagtctataatttccttacgattgtctagtttcttcagcagcttactgtattttggttttgtaggttggcctggcagtggtcaatggacagctcatggcagtaggaggttttgatggcacaacatacttgaagaccatagaagtttttgatcctgatgccaatacatggaggtaacttttaagctgtgtagcaaatcacctcactactgatttggaaatcatgggcttgaaatagcctatgaccatcagaactgggatggtcagtacattggagtactttgaagagggctgaagttacacatatttatggctcattttgacttgattgctctaaagtggctgatatattacaaaattctccttttcagtaactgtccagttttataattagagatgggtaaaatagggaaaaaaaatcttcctagtcccatcatgttcagctgaggaaacaaaagcaccgagaaataaaatgacctgcctaagtgagttagtgacagagttagaattagaacctaggtctttggctccaaatctgtccatgccattttttggtgttcttgtgggaaacctatgcctaggagaaacaaattgcaattacttttgaaaaattaatatttgaaaaataatatttcatttttaaagccattttaacttttagggaggaggctacatcttatttaagagagcttaacttaaacttcatttctaggtttaattttactttgcttttaaatcctcaattgtctaataaagctttcttaagtagttaagtagtttttataatttcacataaattaggtgacttttgcatttattttaaatattcaagaacctttacaaacttagcaaaattctcttaaacctttaaacttaaaataattaagtctaaatctttactcaatcatattttatacttgaatcacaagagtaatcttatagatgccctaaaaagccaaattctcttaaacactacaggaacttaaaatgcaaaacacatagtttattctcaaactttaaaaataacaatactatgggtttgatgtatggcatatctgtacttaattctaaatactagtcttctaagaaaacagttttgccttccaagcaatttggggtttccttctcaataaaatgggcttacttgcctaagcaagtttagggttaccatctcagtggttaaggttgcacatcaaccagaaatatcaggctggacatgtgagctgaggcagcagacattctgggaaatttttcttatgaccatgaaggataagctgagctctgttttattgttactattctaaaagaggcagtcttgtagtcctttcttactgtattctaatagtctatctctaggaaagccacaactctcacagagatttaagtgacatgctttggatcctacatatgtctcacagctccatatgactcagtggtcacaaaactaaagtcaggctaataacagcgtgtacgttttgctcctacatcacatttttacagtcctgttcattaagtaaagatttattgatggccaggcacggtggctcatgcctgtaatctcagcactttgggagaccaaggtgggcggatcacctgaggtcaggagttcgagaccagcctggccaacatgatgaaacctcgtctctactaaaaatacaaaaactagccaggcattggggtgggcacctgtaatcccagctacttgggaggctgaggcaggagaatcacttgaacctggggtcagaggttgcagtgagcagagattgggccattgcactgcagcctgggtgacagagcaagactccgtctcaaaaaaaaaaaaagatttactaagtgctccgagccctggggatacaaaactgaacaacaacaacaaaaattcctgccaagcgcacgcctgtaatcccagctactagggaggctgaggcatgagaatctcttgaacccagaaggtggaggttgcagtgagccgagatcacaccactgcactctagcctgagtggaagagcaagactccgtctcaaaacaaaacaaaacaacaaaaaagttccttgccctgctggagctaaccaattgtattgagggagacaaacagtaccataccagtagatggaagtgctgtggcaaatatcaaagcaggggagggggctagggagtacagggaggggaatctgtttttaaaggtgttcagggaaggcctcattggaaaggtagcattttagcaaaacctaaatacggtaaaggataggtaatggcagctttgggcctctcactggcaggatattttcttccatatacagctttctatttttactaggaattttgattaagcataatttctgaagacagccaaatttactgtcacttaatcactataatcttatctgaggacttgtttcttagtaactgtcactaaatagaattagtaatagatgacaaagtaatagtcatgaaattattgaggatcatctgttgaaagattaataactaaatatttgcagttacatatccaagacttaaaaaccaactctacctcatagctgataagggtctagtattcttctccatggaaagtccttaattttgaagatgatcttgtcacaaactagatgctgactttactcaaatctggttttgttctataaaggacttgaagaggcttacagagtacatataagacaaagggataaaaataaataattgaagaattttaggcaaagggaaaacataggtgggacaataatatagccaggggcaaaattttgaaaatgtagaatatataattctgtgtaaccgttagaagtcagtgaggtatacagttgtaaagttctgatgccaaacgtgaatatgatgctctcttattcttcacacagcctcctatgagtgagagcatgtcagtcaatctctgaaacagtcctgctactcaacagtgctcaattgcagcttctaatctttagaatgaagacaatattagtgtgaagctgaaaatattagttgtaatataaaacatagaaacgtgttaataacatcttagtcgtagttaataacatcttagttgtaacatattttccagttagaaaatatgattatgtttctttctttgcaggttatatggcgggatgaattaccgtcggctagggggtggcgtaggagttattaaaatgacacattgtgaatcccatatttggtgaacacagagaagacagtcttgtatatattcctctgtattctggggagctttgaccttggagctttgtacagcttgagaaaacattagaacaaattttattatttgccggtgcctcaacaaatggaaatacaatccaatgaaagtacttcacctgcaagatgcacaataattttcaactctgtgcagaagaatatttatttttggttttaatttatcatggttttttgttgttttcgttttgaacttatccttcctcccacaaaaaaagaaaagaagaaaaaattccaagcagcaaaacttactttgtttgtaaggtattcatttaggtttgaaaatactatttaataagggcagaagggctatatatgatttggctattatttctagacactccatccacatgattccactaacaaggattaccaggaataaaggtaggtatgcaaaatgtattagctacccattattctcgcactaaccaccagaagacttgaaaatcttaaaaaaaaaaaacaaaaaaacaagaaaaggcaacatctcattttaaatagtacaattcagaagggatactaaatcaataaaaaccaggactcagacactacagttttcatcagtgtaattttatgtcttgtttctttctatatgaacttgtttatttagtctttttttcataatattctcatagagtttctgctagatctagagctctgctcagtgcctcttataaaaacaatatataagtctcatatgctgtcttgagaatccaagagaatcacatgcagctctgcaacagtttttgctcaaaaatgttactgactaaagcaactgtccttcctgtttccttattgctaccaaggaccagcagggagaaatgtcttctcccagcagtgaattctgttatgcaatttattcttgatgctcaggcctggttaagctgaggcttacctttaataacagcctccaagggaatgaattattcagttaatgtaatagcacacattaaagagtgtaaaatcaattgaggcattttattaatatcttggttcttttatacaaacaatgtatcattatcttcattctataaggtcattgttactacttctctcaaattgcactttctggtaaaaagttaaaaatttttaaggaaaaaataatttcaatggttaaagttttttttcctcattgtattcatagacaaatttttttcaatatattttgcaagaaaaatctttgaataagactaactgcatttaaaaggaataacctccttctccctttccccaactacaaaaatgtttggcaactttgtgtttacatttaaagatcatttgcacctttttcaaggaaaaaaagtattgagtaaacaattgtttacatatatcatttatgcttttttctagcatgtataacttttttaaataaaggtagtatttaccattaaaaaaattttagctaatgctttttatccttgtacttttgttatttaatttggaatttctgtttctatataatttattttatctgtatgtaaagttacaagtgctttcaacttgaataaaaggattgccagctagaattaataggaattttcattatatatttttatatgttatattacctaacctataaacttattttctaggtaggacttagactcatacaattttgagctggaaggactctttaacaatcatctagtccaaacccacttattacactgatccaagtctgaaaaccacaaagtctgcctaagaataaatagtcaattaatgatagaaccaacattagaaatcagcttcctcaattcccagtccattcctctttctatgccacactgccactataggtttacctgaaactaaatataataaaagaccttaagtattttaattaagtctggtattaacatgtaaaaagtataaaaacttttatgagatcctcactgtagtacatcattaacaatcagtcttcaagacaaaatcatgtatttcccaagactctactacttcatacatctgaggcaaaagagagtgatgatagcattatcactgatagcaagaacaaaactagggattagactctccattagtcaggaagtccccagtgggagcaattcacagggcattgattcaagagtagagacccaggaattaacagcactggccagtcttcattggagcctgttaggggtttgtttttccccctccactgaaggcactccagttttattattgattgaaatgtattgtattaaaggtgttgctgtaaaatagaatgtttattaatttgtgtgcatagttttttccacaactcaagtttggaatgggggttggattggcagtcattttcatttcataaataagtccactgaagcttagaaaagttaaaatgacatggtaggagctgaaccttaaatctatagcccctgattgtaaatcctttgtgctctatacacattcccccattcctgtttttgattgcttcccagctttgttccatgttttacctccagatattcacactgcagataatacttcttgaccactgtgtaaaaggggtctttcctgaacaagatgtgacggagtaggggacgaacctttcaaactttatgttaactgaggaaacagatgggcaaagaaaaaaatgcaagaaggaaagaaatacagaagaggagagaaagaagcagcaggaggcaaaaatgacccactaaacctgagtatgtctgcccaattgtgagaaatggctctgtaaattgctttgagggccctgctggaaatgactgaaaagaatggtcccaagaaatgacaaaactcttcaactaagttgtcttacatgtccttaatattgatctttcaattatttagctgtgtaaggttaggaacttagattattttaaatgtaaaaaagaaaggatggttattcactgaactatcataaaatatttgggattattccaataacagtaacctactaatacccctatcctagaaagactgtttaagcctgaattcctaggaaaaaaggacacatatcttcagggtgaatttagatcagtgaacccttggacttctaaacaggaacagcccctgctttcaaaaagcttagttttaagcctttttcatcaagcctctgtatgagtggttctcaaagtatggtctgtggacccctgaggtctccagtatctttctttctttcttttttctttttttttttttttttgagacggagtttcgctcttgttgcccaggcttgcgtgcaatggtgcgatctcggctcaccgcaacctccgcctcccagattcaagcgattctcctgcctcagcctcccgagtagctgggattacaggcatgtgccaccaggcccagctaatttttttgtatttttagtagagacggggtttcgccatgttggtcaggctggtctcaaactccagacctcaggtgatccgcccgccttggcctcccaagtgctgggattacaggcgtgagccactgcaccgcacccagccaagtccccaatatctttctaagtatccatgagtcgaaactattttttttttttctttgagacattgtctccctctgtcgcctaggctggagcgcagtggcgcgatctcggctcactgcaagctccgcctcctgggttcaggccattctcctgcctcagcctccccagtagctgggactactagcgcctgccaccacgcccggctaatttttttttttttatttttagtagagacggggtttcaccgtgttagccaggatggtctcgatctcctgacctcgtgatctgcccgccttggcctcccaaagtgctgggattacaggcgtgagccaccgcgcccggctgaaactattttcttagtaaaactaagttttctgccttttatactgtagtagcatttgtgctaatggtgcaaaagctatggtgggtaatactgccggtgtcttagcataaatcaaggcataaatcaaagcataaatcaaattgtacaactagacatagtattcaccaccatagacttgcaggactttttgttgttgttgttgtttttacatgtttttgtttttgagacagagtctcgctctgtcacccaggctggagtgcagtggtgagatctctgctcactgcagcctccacctcctgggttcaggcgattctccaacctcagcctcccaagtagctgggaatacaggcgcccactagcacccccggctaatttttttatttttcatagagacgaggttttgccatgctggccaggcttgtctggaactcctaacctcaagtgatacgcccaccttggcctcccaaagtgctgggattacaggcatgagccaccgtgcctggcctggagttttgtaaatttgcttaagcatgcccttgatgaagcaacaaaaattattagtttactaaatctcaacctgtggacatatgtctttttcaatattttatgacaaaatgggaagtatacataaaacactgctgcaaaccaaaatacagtggtcatcccaagaaaatcttctgagattgttttaagatgcaagctgaactacctactttttgaaagaatgatggacacagaaattaaggtcattcagactggggtgttgagcagacattttctctcaaatgaacaaaatgaggctaccatttcaaggaacacaaccgacagtacttattgtcaaccatattcaagagaaaaattacaattttgagaaagctgtgtcgactatgaacttgacagctacttaaaaacttttatgatgaaattgctgatgacattgatgaatgcctttttaattgtatagtgaagtgtgtcaacatgtggaagatctgcataattcatggaatcagtttttctaaatgattaatgcacaggttaagatgtatccaaagcagaagatagaccaacagatctaatgggaacaatatgaaaggtctattgatatggttttagatttcagcagtcacttgtcaagttttgatgtaatatcaagaagaatatccataattatcagaaaagctattaaaatcctcctcccccttccaatttcatatttgtgtaagccatattttcttgacatacttcaaccaaaataacattgcaaaagattgaatgcagaagcaggtaagaactcaattgccttctaatatagccagatattgaagaatcatacaaaaatgtaatttttttgcttttgaaataaaaaaatttgttttaaaaatgatagtctgggccaggcacggtggctgatgtctgtaatcccagcaccttgggaggccaaggtgggcagatgtacttgaggtcaggagtttgagaccagcctggccaaaatggcaaaaccctgtctctactaaatatacaaaaattagctgggcgtggtggtgcacgcctgttagctccttgggaagctgaggcagaagaatcccttgaacctgggacacggaggctgcagtgagacgaaatcatgccactgcactccaacctgggtgacagagtgagactcagtctcaaaaaaaaaaaaaaagcacataaataggtttatttttgatgcactaatttttttaaatttctcaattttaatttctaatatggtaaatcactagatgtaatgcatgtaaacagaagctctttgtgtcctcaagtttttgagactttaaagggatctcaaggcaaaaatgtttgagaactgctgctctaaatcttccagtttacaggaaatacaaaggaacagaggaatgtgttaacttcatagcaattcaatgagcagagttcaaaagtgcgaaactttacaagacaaataactttgcttctccaaaaattgaattgcaaggaaagaaagtggagagggagaaactgacagagtaaaaggaatttaagactcatatcatcagcctagagcggtggctcatacctattaataaaatcccccagcactttgagagggcaaggcgggagaatcgctttaacccaggaattcaagaccaatttaggcaaataagagagaccgtctttacaaaaaactacatatatatataaaatttatatatataaaatataaaatgtatatactatataattatatattaaaattatatattatatataaattatgttatatataaattttaattatatatatatatatataaaagctgggtgtgttggcacatgcctctggtcccagatacttgggagattgaggtgggaggattacttgggccagtgcatgatcacaccactgcactacagcctcattgacagagcaagaccctgtctcgaaaaaagccagccagatatgagggcgatctgactgtgacatctgtcactctattgatcgccagggttgattcggctgatctggctagctaggcaggagtccccttcctccctcaccactccatgtgcttccctcttgaagctgtgcacactcagtggaagaggacagccatccccaatagaggaaggccagtctgcagtcaagggtatacaagtagctgcattcccctactagaacctccaaacaagctctcaaggttcatttgtaagagaacgtagggttctttgaagtcaagcttccaagactccagacacatccaagtgagttgctgcatgtggcagtctgcctttctttaaaacaaacaaacaaaaccaccaaacttcaggtaataaggcaggtaatgttttacataatgcatctcagtataaaacatgcaacaattgaattatttacatagcccagcagaagcgattcaatagtctgccctgatgtggactgtaagaatgattagaaaagaagttaagcctgagaaaggtttgaaagagagtaatagttttgctaagtggacaagagtggaaaggacattccaggcagagcagcatgtgtaagatatacagaaggaaggcagtgagacagcatgggctgttcagggaaatcaaagcagtctgctttcaggagaataaagtaaaaaaagcctgtgtccagaaataagacaggagaaccaggtatcatcataagggcctcatatcccagtacttttctctcagctttcttttctgatgttaattctagtaagttctgtgagggtgtacacggtcaggctctaagaggcccccagtgatccctgcattctggtattcacacccttgtgtaatcctctcccaaaatgcaccagggttggtctggtctgtgtgcctaatagcgatgctaggaactctggtggggaatgttgataatgggtgaggctatgcatttgtagagaaaaagggtatatgggaaatctctgtaaacatccactgaattttgttgtgaacctaaaactgctctaaaaaataaactctattaaaaagtataggggggtggtatgtcacttccaaaattaggcttaaaaagaatctagcttttgtcttgagtgtttttctctcatctttcacactctgggaaatgcaaatacataaaagaatataagaaacccatgaacctccatataccaaccatccagcttcaaaaattaacagattttgtaaattttgttttatctgtctcctcccactcttacttctcctctccatcaccactgaagtattttaaagcagatcccagccatcaccttaaagtcatgcacttcattcataacaacgttttggtcattgacagaccacatatatgacagtggtctcataagattataatactgtgtttttacagtgccttttctatgtttagatatgtttagatacacaaatccttaccattgtgttgcctacagtattcagtacagtaagtaatacattgtacaagtttgtagcctaggagcaacaggctatcccatatagcctaggtatatggtaggctataccatctagatttatgtaagtacactccgtgatgtttatacaaagatgaaatcacctaaagacatatttctcagaacatacccctgtcgttaagtgatgcatgactgtatttcacccacatttgagtatttaacagataaggtctaactataacaacattatcacacttgataaaataaacattccttaatatcatctaatacccaatcaatgttaaaattcccctagttaccacttaatttgtttactattatactttgaagttttctttttttcctgtcccttcttttgctcacttggtcaaatttctatttcgttcctttgccctttaattttagaaattcttctatagtttctattctatttggtgtgtgtatctgcactgcaacagatatagttaaacgtatttctctacgaagatactcacattaagaggctgttatccatcctggctaccacggtgaaaccccgtctctactaaaaatacaaaaaaaaaaaattagccggacatagtggcgggcgcctgtagtcccagctactcaggaggctgaggcaggagaatggcgtgaatccaggaggtagagctcgcagtgagccaagatcacgccactgcactccagcctgggcgacagaggaagactccgtctcaaaaaaaaaaaaaaaaaaaaagaggctgttagaaatacttcataggtgctctatagcacccagtcataacatacgtgatacctagacagcccgtgtttagagatactaacagtgggtagtggcctcgggtgttatcagctagctccattataaaatactccatcaatctttcacctaagggtttaagcagatactaatgattgatgcttacatctattatttcactgagagttataaatgatgccttctcattcctttgcatttatcagctgaaatatatctaaaaaacttaccttgatcagctatttgattatcttgaaatataatttatactagaaagtagaaaatgtttgcttctcccctttaccaattttcagaacttgattctgcagcaacctccaaaagtaacaccaatttctaaaattttgtttagtattagtatgagctcataaattatttttactttaatattgatataaataaatttttatatattcaatcaattacactttttccttttgatatgtgaattgtctcacctttggcaagtagggtcccccttcattttggctcctagccttttgacacaactgttgatagctatcttgcttttctgatatatgaaaggttatttttatacatttcttgtcccaaacctgaaatcagcccttcctcaagaagttttagctccttttagtgggaaatacttatagaacataatctgtgtgttagtaatgttcattgttaatggctttttactgcttccgggcctctccagtaaacaaagctatgtgttttttagcaaatcatgaataacctcagtagatgccgaaaaaaaattttgacaaagtgcaacacctattcataataaaacccctcaacaaactaggaatagaaaggatcattcttaacttgataaatgacatctatgaaaaaacctacagccaacatcatatttaattgtaaaagacatgatgctttcctactaaaaacaagacgaaaatgtatattcttaccagttctattcaccattgtactggagattctagccaaggcaattcagcaagaaaaagaaacaaaagattaaaaattaagaaataaaactgtctttattcacagatgatatgaattttttatgtagaaaatcctaaagaattcagtgaaaaaaaactactaaaataagctcagcaaagtcacaggatacaagagcaatatacaaaatcacttgtatttctatatgctagcaacaaacaatttgaaaatgaaattaagaaaacaattccattctcaatagatctaaaataataaaatatttaaagattaaataaatggaaaaacatcctgctcatagattagaagatttactatcattatggcaacactccccaaactgccctatgaattcaacacaatcattatcaaaatcccaggaagttttttttttttttggcaacaattgacaagctgatcctaaaattcttatggaaatacaaaagacgcagccaaataaccttgggaaaaaaacaaagttgaaggtctcacacttcctgatttcaaaactcactacaaagctatagtaattgagacagtgtcgtactggcataagaagtgacaagtagatcaatgaaatagaaagtccagaaataaacccaaacatccatgaaatactgatttttgaaaaaaagtgacaagacacttcaataggaaaaaaagtctgttcaacaagtggtgctgaagcaaatgaatatccatgtgcaaaaggatgaatttggacccctacctcacaccatacacaaaatttaactcaaaatgacagacctaattttctaattagaaaatcctgagaagaaaacaaaagtaaacctttaggacctgaggttaatcaatgatttattagattcaacaccaaaagtacaagcaataaaagaacaaaaattggtcagacttaatgaaaatttaaaacttttgcactttaaaaataagagttaattctgatattcccaattaaatgtaatattagagtttttacttacttgattttataattgtgtatcttttacactgatgatctctctttttttttttaatgtcacccaggctggaatgcagtggcacaatcttggttcactgcaatctccacctcccaggctcaagtgatcctcccaccccagcctcctgagtagatggcactacaggcatgtgccaccatgcctggctaattttttgtatttttatagagacagggtttcaccatgttgcccaggctggtctcgaacttccaacctcagatgatccacccacctcggcctcccaaagtgctggaattacaggcatgagccaccatgcccagcctacactgaaaatctgaattcttacacacgttaccatattataaataggccgaaataataatagctacattattaagacaactgaatgtgatttaaaatttatttgctgctcttctttttctaggatggagcctgctagaatatacaaccaaaataccacaaatttaaagatactaaaaatttaaagatacacaaatttaatgatactccaggctgggtgcagtggctcctgcctgcaatcccagcactttgggaggccaagaggggaggatcacttgagcccaggagttcaagactagcctgggcaacacagcaagaccccaactctaaaaaaaaaaaaattatcaaaaaaaagaaaaaaggccagacatggtgttacacacctgtagtccagctactcaggaagctggggcaagaagaccactttagcccaagagtttgagcccagcctaagcaacacagcaagatcccatctctaaaataaaaatataaaggccaagtgtggtggctcacgtccataatcctagcatttggggaggccaaggcaggaggattgtttgagcctcggctcaggtgggaagggttaaagacca

SEQ ID NO: 440 - DNA, 255418 bp, Homo sapiens
aagattgttcagggtatatttaaattgctttagaaatactaaaaaattatggcttgtaggcatttttacaaaattttaaactgtaatctgtgtttattttaaactgaagatttttatgagcaaattctgctacttcccctttgattcatttctatcactgttgaaatttttgtcccccataattcttcaggttctacatcatccttttcaggatgattttttttttttttttttttttttaattgcgatagagtcttgctaggttgcctgggctggtcttgaactcctgggctcaagcgatccttccatcttggcctcccaaagtgctgtgattacaggcatgagccactgcacctggcctgaagatgattgttaatgtccttaagtcctttgccctgggcacccctgtgccttgctccagtgattacttgtcttcctctctatcccttccattcctctagggaactacatgtgtgaaaaagcatatctatacaaccccctgagcccacctcattatgtaaccacttttaaagcatcctcaatcactagaaagaatagcatttagtcgagccttactgatgcctgcttctcaagccctacaaatggtgctgcactctagttatcacttccacattcgttaacgtcgttgtcttcatatctgagtcactgttgccactctcagattataattccctagagaagcagttgtaagccaagggtgtttaaagatcttttcgtacttattaaacagattctcaaatctctttcttagagattacgattttgcaggtctggaggggagtctctgagactgcatgtttgacaagcccctaaatgatagtgacataggtgctttcctgacctgctgggaggtgggggtgggaagccagggtagagtcacttatcaaggatagtgatgatgtgcctccttatgggccccacacagagaggggagatctgggagtgaggagtagaatcaagttgccagatttaataaataaaaatacagggtgcccacttaagtttgaatttcagttaaactatatctctctctctatatatatatatatttatatatatctctatctatctatctatatatataggtttttttttttgagatagagtctctgtcacccagactggagtgcagtggcacgatcttggctcactgcaacctccgcctcccgggttcaagtgattctcctgcctcagcctcctgagtagctggaattacaggtgtgtgtcaccatgcctggctaatttttgtatttttagtagagacggagtttcaccatgttggccaggctggtctcaaactctggatctcaggtgatccacccatcttggcctcccaaagtgttgggattataggcgtgagccaccatgcccggcctcagataaacaataatttttaaatgtaagtgtgtcccacatagcatttgggacatacttatatttttttaaaaaaatgttctttgcttatctaaaattcaaatgtaaccaggcatcttttatttggcagtcctacaataaaatgcagttgtgatggacttttccaaccattgctcctgagtagtgctgtgtagtgtggttcacatacccatctaggaagtctcatgaaggcagcggcttttggatattaaagaatgtaacagagttttagagagtgcaaacccaaggcatacggactttgaattttatctgaccggcactgacatgctgagactttcagattggaaagcatttgtggttactgcatgtatgtcccaaattcttcccgtttagtttaaaagatccaaagaaatatcttggttaggtaggcttgagtctagagaatttggaatggttatacatttactgacaataaggattataaaagaagacctctgtgtccaaggcttacacgtaattagggagggtaaagccacctgcacacaatgctagctagcagggtattttaaaaaactgtgcacgttggggtactagaaacataatgggctttggagtacagcacacctgggttggaattctggttctaccactttctgtgcagccttggcccaggtagttaatctttcagtgcaagcagtgttgtcattcataaaatggaggtgatgcctaccatgaagtgttgctatggaaattaactgatctgtgatattaaagcatagtcactggtacttggggttacctaatctaaatgccagaggagtgatttaacaagggaggcaagaccctttctttttagccaagtggagttagcaaagtatgttttgtatgtggaaagtctacttttgaattgtcttcgtttctgccttcctactaatgtttttctctctgcctggtctaggattaacacagattcctcagatccagaagactgaaatttcctttcgtcctaatgatcccaagagctatgaggcatatgtactgaacatagttaggttcctggaaaagtacaaagattcagcccagagggatgacatgatttttgaagattgtggcggtaagtagactcattgtagatgtctgtggctagttttctttctctttaactcttatttcccacttctattttttgtttaatgatcgagagataatcctgaaataatgaaagattgaactctggccatatttagacactttttttaaaaaaagcaggaagacacaatgaaaaacagtacagcctcaagtatgactgttttctgcattggaaaggtgtcttactttaaaacactcctaggtactattttttactattcagagccaagacagcaattccggttttctttctcttacatccgttgaaaagtacagctacttatttccttatcttcccccaaaaagttctccctatagaagagtgcacagggccttctctcatcagaaagaccttttggtgtgattagctatcactgcactggcattcatgaaggaggatgtatggtcagggtatacttttattgatcctggttgggatagataatgaaatatgtgttaggcagctgatcgttttggataaggaaatgacttatgaagggtaaagagaggctcttagtttcattaagtcattgacatgaatacatgtcctcactcttactacctggactgtgaattttccagtccatgttctcattctttccacaaaaaaatactctcgctgggtgcagtggctcatgcctgtaatccttgcactttgggaggctgaggagggaggattgcttgagcctaggagttcgagaccaacctgggcaacacagtgagaccccatctctacaaaaaataagacaagttagctgggtgtggtgttgtgtgcccgtggtcccagctacttgggaggctgaagtgggaggatcacttgagcctgggaggtcgaggctgcaataagccatgatcacgccacagcactccagcctgggcaccagtgtgagaccctgtctcaaaaacgttaaaacaaacaaacaaacataaaacatctctctgagttttactaggtaatatcatcccttctgattcaattcaagcatttaccaactccagttctttataaggcaggctgtggcttggtcagagtatggggcgaattgccattttaagttattttggaaatatttagtaacttaaaagaacattttcagtgtgaatttttctcattagaatttaaatgaggttttcatcttactttgcagtaattaaaaggcctgagggataatcagggtgaatcacttcaaggagatagtctaaattcagactcttcgctatttgaagggaaaatagttcatttgtgaatttaaaaactatacataaattatggtttgcattattttcctccagcatgctatacattaactttgaattctatattcacttggtctttttctggcttttatatgaggattgaattaaaaatgccagaataaaatttctcagtccagcaaatgcttaatgcatagctttaaaaggcagaaactcaaatcaaaaaagcctgggcaacacagcaagaccccagtctctgcaaaattaaaaaaaactagccacagggtggcacacgcctgtagtcccagctactcaggatgctgaggtgggaggatctttagagcccaggaggttgaggctgcagtgggccatgatcatgctgccgcactccaacctaggccacggagtgagaccctgtctcaaaaaaacccttaagtggtggttgaaaaggaaaataccagttcctttttaaaaattctgaccaaaaaaaaaacctagttctgaaaattattgacagtccttttgtattctgattataatatccctgttactgagctaagccagtgttgacagtgtgaatgatgctactcacgcagtgtgatccgtctcctttcagtcttctaaatagctgagtaatccattatttaaaagaagggaaatattgccagagactaaatattacgtgctgatcaagtactatgaagctttggtgtggggccatataccagctattccttttggtaaaatatcttttaatatgagtgaagaggtgagagatggttttcctggagatcttgcttaattcagatcatgcattaaatgcagaatagcgtactctcagaataggtaactatgacaaggaagacagtttctttttcttagaactgctaagggaattgctggtacaatataaaagttgtgtttttatttttagatgtgcccagtgaaccgaaagaacgaggagactttaatcatgaacgaggagagcgaaaggtctgcagattcaagcttgaatggctgggaaattgctctggattaaatgatgaaacttatggctacaaagagggcaaaccgtgcattattataaagctcaaccgagttctaggcttcaaacctaaggcaagtaatattttaaatgatagaatttagatgagtcatttacactaagtacttaattgatctgagaagacaatgtaagatagttttaaagtatactcagtgctgactttgaaacgtagccagtagagtaacaccaaaaacttctgtatccaccctgcaattcttgtagttaggacattaatctcattttctaaagttaaaggaattctgagaggcaaagctgcattctgaagtgagtctgtggcccttttcttaatactcctgctcagtatccagataacagtttctataacataaactctttaaaaaagtaaaaatggaaaaatatattttttccctggtggtctagtggttagagaaaaaaaaaagttttttattttttacttcataaagaatggattaaaaaaaaaattttaacccacttgcatgtatagtccagttttggtcctctggaagccacaggaacatttcaaaaaaattgataatctgaaaaaatattttttctgaattttattgcggaagtagaagtttaacatcatctaggctgaattttgctagccatgctgttggctttttgtattactgcaacttataatggataaacattactctggatcactgaaaaatgagcaaattgccattgctcaccatttggtgagattatattctccataagaatggaaaatttatcgttgttgtctgcttttgtaaagctggtcatttcatcctctcctccagatcatgaattaatgctgtcctttccccttaagcctggcttcttctggcaggtttccccctaatcacccgtatatgagcgttggcattatgagtgttgtttctaattttgatagaaattgactgcagtatattgagttatgtgaacaaactcatttcatttctgaaatctggcacttttgttcattaattttctattgaatgctattaatttatttctacaatgcttgttacccatgaataatattttcaaaagaaaatcaacacagagataaaaagttttgttaactgaaggatgcatcaaagttcctttattgccatcagaggcaaaaatgagtaggtggggatggatggttgcctggctggctagtttgatggactgctggcagaaattaatgtacctctcaaaaggattttaagcttctttccacatagacaggatataatggaagaaaaacggtgagaaccattatgccaaaatgtatttgatattcatattgctggggaatacttcactgagatcaatcagctatttagcagcaaaagaaattgttgtggcatggccaagagaagactcatcccatactttctgagtaccttgcttttgacattactcatcgtagacactgaatgacatttggaccccacagaggcagtctagtctattgtgattgatttcttcccacatctttagagttacttggttcagtgataaattcagctactctttcttttcagtcctttttttcttttttctttggtctctacttggttatccattgccactgcctaattcatcacctccacccaaatctccaactattttggagttatttttgtcagagatcagagtatcccagcatctcactatcctcaccattggaggatagattctggcaacttcttagtgagcattttctctacatatttttaaagacaaatacattgctggcagaaacgtcccaaagagtcaaatctagacgatcattttcttgcatccaaaacagagtagtagcaaaatagtagttccttcctgatgtggaactaatattttatctgactttgattagactatgtatgtgttacatctcacatcaagactcacttgctgtgctgatctgagtaagcaagtgactgtcttccagcgaagtatgttcatcacacttctgagatagatttgagccatgggtgtagaagaggaggctctggatatttcatgacagcagtaattttcagactgtcctctgggtcccttcagtggattcaccccttcaagaccacccttcctcttagggcagtgacacctctgccttttttacatattggactttcctaagaaaattgcaaagaaacgctccttaaatggcagtctccccgactggagattaaaacaacaaaaaaggaaagcctacttgaagtcatgcttgagggaaaaggatgacattatttattcatgactcaggaggaaagcccacgctttataaaaacagaaatgtcaatcatctttctcatgtaatctaatcttagcaaataacgagcattatattttgggttgacttagttttcagtgtctttaagcaaagcttataatgggctactattaaaagttccatttagtactggtttgcatcacagcttaattgtagtcgttataaacttgggcacttattttcatttcagcaaaatcacaaacatgaccttaaattggttaggggagtcattcattctgctgtcctgatgtcttttgttattttggttgacttactgtgaccagtgtgtacttgtttggactacggagtagttttatttttcagaaacttaagaaatcatttacaatctactgatcataatgggttttatttttagcctcccaagaatgagtccttggagacttacccagtgatgaagtataacccaaatgtccttcccgttcagtgcactggcaaggtaaagacaaatttagggttactggggtggtggaagggtaggcagaggaagaggggagaatgaagaagactgtttaagtgacaggtagaattttaatagaagaaataagaaacattgctttcaagtataagtctcagtgagatgaattgtagctatactaggtaaaactttttaaaagaacagaaagatgtaatcagaataagactgatgtcagtttctccactggcataagaaactcaaatatctgaatttaatacattgggatatttgcttatcagaactgagaggtgaattagcccacagaagtactttctggcccacagcatgtattaaaaatttggggccaacattaaaaaaaaattaatgtcacataaaaattagtggtttgggcttctcttttaaaaatattgaaatatcgcctggtgcagtggctcacgcctgtaatcctagcactttgggaggccgagatgggcagataatgaggtcaagagtttgagaccagcctggccaacatggtgaaaccctgtctctactacacatacaaaaattagctgggcgtggcggcgcgtgcctgtaatcccagctgaggacctgaggcaggagaatcgcttggacctgggaggcggaggttgcagtgagctgagatcacgccattgcactccagcctggggacagagcaagactatctcaaaaaaaaaaaaaaaaaaaaaaaaaaaattgaaagactaaggtaacaattagtgcatgtttcctttggatccaaaaactaatggaccgtttagagagaaaggcagaacaaagaaagggagttcccagacagtgctagcaccaagcaaggaagtggagattgatttctcaacaagaaaatgagaggcaagtagtaaactttggagataatatcactagacagattatttactgggccaacagcaaggtgtttctgcctttcaatgttggccttgtttctaggaggcttgaagaatgcttatttggcatttgactcagcttccccatccatttgcacattgagaatagtctcttcttatgaccatttctcaaggctgcaatggaatagactgagtagatgttctttcctctctcagtagtttgcaaactactgtgtagattgagtcttgtttttgagtacacatagtgatgcatgatgtgagccattaaaatttcatttcattctggatttcagcgagatgaagataaggataaagttggaaatgtggagtattttggactgggcaactcccctggttttcctctgcagtattatccgtactatggcaaactcctgcagcccaaatacctgcagcccctgctggccgtacagttcaccaatcttaccatggacactgaaattcgcatagagtgtaaggcgtacggtgagaacattgggtacagtgagaaagaccgttttcagggacgttttgatgtaaaaattgaagttaagagctgatcacaagcacaaatctttcccactagccatttaataagttaaaaaaagatacaaaaacaaaaacctactagtcttgaacaaactgtcatacgtatgggacctacacttaatctatatgctttacactagctttctgcatttaataggttagaatgtaaattaaagtgtagcaatagcaacaaaatatttattctactgtaaatgacaaaagaaaaagaaaaattgagccttgggacgtgcccatttttactgtaaattatgattccgtaactgacttgtagtaagcagtgtttctggcccctaagtattgctgccttgtgtattttatttagtgtacagtactacaggtgcatactctggtcatttttcaagccatgttttattgtatctgttttctactttatgtgagcaaggtttgctgtccaaggtgtaaatattcaacgggaataaaactggcatggtaattttttttttttttttttttttgttttttggctctttcaaaggtaatggcccatcgatgagcatttttaacatactccatagtcttttcctgtggtgttaggtctttatttttatttttttcctgggggctggggtgggggtttgtcatgggggaactgccctttaaattttaagtgacactacagaaaaacacaaaaaggtgatgggttgtgttatgcttgtattgaatgctgtcttgacatctcttgccttgtcctccggtatgttctaaagctgtgtctgagatctggatctgcccatcactttggctagtgacagggctaattaatttgctttatacattttcttttactttccttttttcctttctggaggcatcacatgctggtgctgtgtctttatgaatgttttaaccattttcatggtggaagaattttatatttatgcagttgtacaattttatttttttctgcaagaaaaagtgtaatgtatgaaataaaccaaagtcacttgtttgaaaataaatctttattttgaactttataaaaagcaatgcagtaccccatagactggtgttaaatgttgtctacagtgcaaaatccatgttctaacatatgtaataattgccaggagtacagtgctcttgttgatcttgtattcagtcaggttaaaacaacggacaataaaagaatgaacacattcctcgtgtgtgattcactcttgtctaaatgtcccaacctgtgacttctttactttccacaccactaattatccaagatcttgaagaagtattgaacctgaaacggagaaacacataatttcttagttcagacaaattttggtcttttccacttaacagagtccaagaggttggtcaggacttcagacactggcataccccttcccaaagacactaaaagttaatcaatcaatcagaggcagagaatcgatgaagctccagtttgaagttccatttaaaaaaatcatcttgcagtgctactgctacttcactcagtttagaaaacatgaagtgttggttcctgctattgcttcactagacatatgtgttaaaaaaaaaagttgttagcacttcagtttttaaaaaatgaggttaggtttgtggttcagtaaattaaggttcataccttgctttttggttcagggattggcctaagtccttatttagctgtatttaaaaattagccttagtgtgaaagaagataaaaaagctttccaaaaaacattttccagctataattattaaagatttagtatcacttaactaacatgggaaatgcccacactaaaatcagggcattgtatttctgaaacggaaacctttcgcaaagcctgtgcaggcagaggagctcacacacatccttgacgtggcactgtgtcttcaggggtgctgccctcttacagagagacagatctggaggccatggccgttttggtgagaaatgccagaaacagcttcagtttccacctactgcttcatatttataatcacagtaatctatttctcgttttgctatttctagagcaacaaattgtgtgatgcgaaattagtaccagaggaacaatgactccacttaacaaaaaaatagcaagggaactatgaaaaatggcacaactgcttaactttaatagttgaagtctttaggagacttcagtagttgaaatgacacagaaaaatcctcaaactaacatacctacatgaaactgagtttctcaaagtaacccacatttatggaaatagaagtttgtcttgcagaaacatcagctcattttgtaaggtgtatgtgatatttaaatttgtgatgcttgtgaataagggaatggggctttaggtctgaggaaaggggagcattcattcaaactggagggtattttgcatttttaaggctgctataaggtcacgaccttggtgagacttaacctgttttcgtatgtattgtgtactttctgttctaagccattgtgtgtgtctgtaactttctccaagattctctccaaatcttgcttctcttaatttctccagattgtgccaacctatttcccactcctgatctttagtgttatatcaccactaggagactggggaatgtggtttgtgttcttagactcaacagatacctaccatatgccaagcattcttctaacagctagtgagagatctatcagtgaacaaaacagacaaaactccatcttttttcctctgctgctcatattctagtgttaaccatttgcatatttctcagactcttcaatacatttattatttctttttaatcagtttattctgaccctcagtagatgacatatttcatgggtgtagggacagtgccatctatctcccttggggtgttcttacattcaagaaatgggttttcacacaagtcctgtcaaatacttaattccttacacaatataaagggattgagtttttcaaagataggctgactacttggaatgaaaagcatttaaatactgaagagagaaaaaggattctcttttcaacccttcatattctcggaaggaaaactgaaataccgagttagtatgtcctcaaccctggttaatttcccttgcaaacaaagagggacaggccttggtgtcagaagctttgccataagatgttacctagctaggatttttaaactggttttcattgtattttattaccttcaattaagaatagtttaaaacaagtagttttccatttatagcagtaaaataaatttgttcaagtatagcactgaatggatttaaagaaaaatagtaaaatttcaggtggtaaatatgataaaaagcatggaagtgataaatggttggctaaaatttaggactctgcttgacagtatagcattttaggccaggcacagtggctcatgcctgtatcctaacactttaagagtctgaggttggaggatcacttgagcccaggagttcaagatcagcctagacaacataaggagatccccccgtctctacaaaaaaaaaaaaaaaaaaaaaaaaaaatagccgagcatggtggtacacgcctgtgatctcagctacttggacgtctggggtggtaggacagcttgagtccaggaggttcaagtcttcaaggcttcggtaagcctgggcaacagagtgagaccctgtcttgaaaaacaaaaacaaaaaaaacaaccaaaaacggcattacccagaacctatctactttagaacaatagcatgccctgtctgctccagctgcacctaataccagagggaactgctccaactccaaattaaaaacattatcagtgatcagaaacaaaagttccgttatgagaacctttcaaagctcagtaatagcttaaactcctggcttcttaaaggattagtaacactttgatatctgtgtatatttggctcacagaggagaaccaaataacattaccttgaaaatctaggactaagggaccttatgaatacagagggaaactatccaaggaacagacaatagcagttttaattgagtgaataaagtgatcttggtttcaaattcaactgagaaaacatgactttctccttttttctttaagagggggctactgttaaccagacatgttatctgtagtcccctgggctctacactgagaaagatgatcaagaaatagataagcctgttattcttccaaccgatggttccaatgagcacccatatcctagtcatgtgaaacaaaggggtgaaacaaggcgggtatcttggttcatgctttaattctctatttttctctgagggactttcagcatcagtcctttctgagggattaagtatcttactaaggtgttgactcttattgactacagaattcagctctttcatttagtcacaaaggcatcctagaccctaagagaatgcccatattgtagtaaagcatactatctgtagctagctttatcacaaagcctttacaaaacttggatttcataaaatcataggcggcctctagggctatcttttccaaggagacacatacattcccccttagtgttgaccctatacagaccaggcaggaggtgacacgggttaatttaaaacagccagccacatatatcgggcacagccagtgcccgatatagtcattacttggtctgtcttttggagtgcttcaaggagtatggaacaatcctgcaggaataggacataggatcctttccttttgataaggagcaggggttctgaaataaccagcaggtaaagattaggccttggggaggttctgatgagtctgctttggagcctctagacagcaagagaatagtataatagtataatacaactcaggttatactgcagaaaatgaaacataatagatggagaagtccatgcctaccataaacgtttgaaacctttgcctagagcaggcctttcttttctttcatttgcaaatttctcctgagccacctgctatgtacccagcactgacaatgaaatgttggggtggggtagaggtagggggtcacaggggagtgtccaaacacactaggtcctcatgaaatttttacttttgtacttctaaacgtcttacatggtctaaactattctcatcgataccacttccttcccctccttcttctgccattcatgtaacatattcaacatatccaacggataatgatacttgactacctataagattaagttgaaggctcgttctgtctttatcaccattaaatttaaataagaacaatagcttacatttatttactactttatagtgcatagtctaatttcacatataaatctcatttccttcccaatagctttgtgaagcttgttattctttcattagtgtatcagacactttagaggtggaatgcaggcatctattttccaatggtttttaatgttgattgagtatcagaaatgcctatggagttatattttcttttaaataagagtacagatgtgcttgaacacttagagaatctatcgcacagttgtggaattccagcaccaaattaaaatatgtgtgcctgtgtcactacactagatttttggataaaatctagtcagtttgattgaagtgcaattttgttagtgttccaataatatgatactgagttttaaatatatcagtgtatttagtagatgaccaactttcaactcacttgggccccttacagccaaggctggctgcatgggcctgcagtctgtgcacggggccacatgcctagaagagccttgtgtttggtttaatgctctgctgctgctgtcttgaaattcttaatgaattttgaaaaaaaggcctgacatttttattctgcaccagttctgcttaaagccaagggcgtctactgtagggttgctttagcatggttgtcctaatgactgaatgaaaaatgtggttgaaaaggctgcttttaaaataagcaatgaacagatcgatggttgagagttgggcgggttggggaaggtgcagggtgaggcagattatggaaggtgtgagctggcagactcagcgggcatggaacagaggccctgtgatggcgctctgcagccttgggcaggggtgaggaggggagggcttatgctgtggggatggcaagaggcagctaccagtaggggatgcacatgtgagccttgaatgaacctttgctgggctccctttccctttttgtcttccctctccaaggcactacttacttttcagctcccaaaatatggggctcagaagtggtcaatagtgaggaaaggagtggtaactgaaagaagtctagggttctctgggtggaaagactcagaggaaacattcaaaccttgatagaaaggagatgaaaaatccatccttgcctattgttgtagctatagaaccccaaaagcccttgggctgcagatgtaccccccacaaatctatttatggtctaattaaaaaattaagttgaacttaatcataacagtgtcttcttcagatatgcttatcttctccgtaggtttagttgacatatttgaaatgttttaagactaaatgagccgggtgcagtggctcatgcctgtaatcccagcactttgggaggcctaggcgggtggatcacctgaggtcaggagtttgagaccagcctggccaacatggcgaaacctcgtttctactaaaaatacaaaaattagctgtgcgtggtactgcatgcttgtaatcccagctactagggaggctgaggcaggagaattgcttgaaccccgggggtggaggttgcagtgagctgagattgtgccactgcactccaacctgggtgacagggcgagactcctcaaaaaaataaataaataaaaataaaaaaaagactaaatgaaaatgtcacattaaaatgactatacatttttctaattctggaaacccaatgtcttcagagttctcttttaaaaacctcaaggccaggtgcagtggctcacacctgtaatcccagcattttgggaggccaaggcaggaggatcacttgagcccaggagttcgaaactagcctgggcaacatagaaagactctgtctctacaaaaaaattaacaacaaaaaaaattagctgggtgtggtggtgcacacctgtagtcccagccgcttgggaggctgaggtgaggggatcacttgagcctgggaagtcgaggatgtaatgagctaagatcatgccagtgcactccagcctgggtgacagagcaagacccactctctaaaatatatatagatatgtatatatgaaattaaaaactcaaaagataaaaacctcttgattcctctgactgccacccactaaggagaaaattcccttttaaaagctggaaggtaattatatctcagcccagagtagagtggtgctgacttttctctttatggaaaatatttaccttctttgctaatataactaaaggctacaactttccataaattcatcataaaattgtgtttcatgactcatcattatctagccccttttgcctcgaagatggttttggttgtaactggtatctccccagtctctcaaaatatgaacagatgtttgttgcttctgttcccttctcctccctacctgtaatgattaaaaaggtattctctgagagttttctcatctcagtgtgaacttagtcataacagtaacttcttagtcataacagtatcttcttagtcataacagtatcttcttcagatatgcttatcggtcaatttttccatatttatattttaaattttactcttaaaaaatgaagttcttgctacataccaaatgctttaacagattattgtgtgtaatccttacaaccacctttatgacattggtattattagtcccattttcagttcatgagactcaagttttttgagctaataatttgcctaaagacatatcactttgttaaatgtctctggttcagcctgtgctggttcagagctcacactagggatgtagcctggctgttggaatttgactcctagccctgccatctcctggccaggtaaccttgagcaagttacttaacttctttgttcctcagattccacatctataatgtaacaatacctactatgtaggtttgttgtgaagtttaaatgaggaattatatggaagacatttaaaatagtgtccagcataaatattgcataataaatatcactattattggtttccaaatattctcctaatgttatggcccatcctgctgtatgtcactgaacccaagtatctctgaataactccatcaagtgctgacagccagaactgtcaattccagcttatcagatgatagcatacataattattcaagtcatgaacagcagaggcagactaagaaaactttgaaaactaagatagtaaacagacgtgagaaccaaatgcaatatgtgatccctgactggatcctgaaccagaaactatttttcttcttttgccacagaagacatttgtgggtaaaaaatgaaggtctgtaccttgataatagtatcgtattaatgttaacttcttgattcgcaatcactttctgtggtgactgtagataatatcagtgtttttaggaaatatacactgaagtattgagagataaaggggaattacatctataacatactgttaaatattataaataattaaattcatatgtacagaaagacagaagaaaggatgattaacatggtaaaatattaacatttggcaaatataggtaaagggcttgtggaaagtatttttttaaacttttctataagtctgaaattatttcaaaatggaatgataaaaatattaatcagtagaaagaacagaaagagtactagatttggagttggaagaattgagttttattctagccactatttcctagtgctcttaggcaaatcatttagactctctgagcctgtctcctaatctaaaaattgaagataataaaacctacctcattggatttagtgggcatgtaagtttctgggtgaatttataaagttgtagcacattatacaaataatacttttttaaaaaggacatatggccccatgttcccactctgaaactagtagcccaggatgggctctgctacaaatcagctacagtaaagcttcagggatgggttttctcagttatgaatgccaagcaagcagaggggaaaaactcaggtgaccttgacacttcctcttagaaattcattttgtggctcccagagaagaaaagattttgacagggaacagtctatccttaaaaaaaaaaaaaaaagatttcaaataaaagaaattgtagatataaagaccagttctcaagattggtgattttcaacttggttgtacatcacaatcaccctatggatctttaaagaaccaaaaagtagatgcttacacccccaccctggagagtctgattcattaggtcttgggtaggtcctagacgtccacattttcaaagagcttcacagacacttctgatgtccactggggttgaaagccactgccctagtattgtttataaggactaaataagatcctttatacatagtgctcaataaacattaaccctaatctcatcttttcctttctctgtgcctcagaggaatgacaaactgaaattagaaatgcagatcttgttgacaaatgatttacaataaagtttctggatgaagaaaaaaaaagaaaactactgtcctagatagttagtcaaagtaggtgcctccgaaatcagagcccaaaccaagcccatctgatatcattatatgtgatctggggaaagaataaaacccctcacttaatttggcatttactagtatccacagtaccttggaggcacttaacatggataatgtgccaaggagacaggtaggcctcaaaagatgaagtggggaatatgggcagaaaagcagagtaaacttcaacaggattaccttgggtattgataaggaaataaagcaggcttacaagatgagttttataaacaataaacagtgattcgggaaaaggatcttggagtatgtcctcgtcattccctgaatacttgggccaagactgctgtctacgaggccatcaatgctgatatgctgagtgtcctcataaaggatgttgtcaattaaacccaaggaattacagtactctttacaagaaaaacaaaccacagaatattttatttcttgggaagttcctattgctatacttcatacacatttcagttagaaaagctccaagacaaaaataatagagttagaaaatagaaataaaaattttttagaagatggaatgcctttttttttataaggacagatgagaaaagtgaaaaagctcttagattggataaaagctgagagaatacataatcagaattcatgagataatgaagtgaatagctgggatggactttgtcacttaaaattggaaagaaattgtgaaagcatatgctgaggtaatttaagatttaagagaaaattacttcatatattgcttcatttaatttttactgtgaaatgtcattatttctactcttcaagtagataaaatgagtctgagaaaggtaatttttcctaagtcatgaagttggtaggaggagaagctggggatttgaactcagaccacctgactccagagtctgtgcccagaatcactatactcctggacctcccttatactttagattttccagaaggctaaggaaagcctatatggcatagtaagattcaagttcaactttaaacttttgatttacctttgaactcaagttcaaatcaagtaaaagtcattaagagctcagctaacatctttctattcatcacttctgtatgctcacagcctttgggctgattttgaaatagaaatgctagtcttgcaatattttcagctaagccagaataagataagatgtgttgttttcctaggaattaatttctccatttctagtcttcaagttttagtaaaacgatgcttgatgacttacagcaataaattcttaactggtaatcaaaaaagaataaactgtacttctgttcataaatagaggaaagaaaaagaagcacctgcaatttgataattataataattcattatactgcttacaaaggatacagagacagtatggcaaactagaaaaacccaggattactagttaggagagtaatgttctatacactaagccatgcaattttaggtgagccattttccttctttgggcaacacattcctcaatggtaaaaccaaggtgtcggattagaatttgatttcctcaaaacctagaatcatggaatgttagtgcaggaaaggggtttagaggagggcctctcaatctttgtcacctcatggtgcacctagaaaatgctcattctcgcatggcatcctggagccggcacaggaagtggttaaggattggagctgctgcctccaggtctcagaggatcaattattcagctcatttgtaggggagtccaagctttgagaattacaagttcagcctcatcattttccacatggagaaactaatgcctagacacattttatgaatttataacaacccataaattaaagtacatggtatcaatgtattttcagttgttatactattatttaacaaatctatcccaacctgacccccttcagtccattttccacatggtaactggagagacctcttaaaaactataaacctgattatgtcaacgcccattcccctcaagggttgcctcctgatgttttgaggataaagatccatattcttaaaatagcccacaaagccctgcatggcccaatctctatttctccagtgtcacctcaggcttttttttttttttttttgcattttatatttcttctttccttttctaaaacacaccaaccaattccccgcataagggctttagcaagtgctattttctcggcctggagtcaactacctttttcctcagctgacactcatttcaggcctcagttcaaatgccatttgctaaaggaaacctttcttaatcccccatctacaccaggttccccgattacaactcatcctgtctttcactacacagcaataatcagaatttatacttgtccatttccttttgtgattatctgattaatgtctgccttcctcattagactatgagccctgaatggaatgtgtgtctgaataggagctcttgttcattactgtctcctcagtgcttaccaatttctggtgtataggaaaagttcagtgaaatgttcaatgaatgaatttacggtttagttttggctacagaagtcttcctggcaacttccattcattgcactgacagctctgtacatcacatttcttgtaatatgaaacatggatatggttatgccttacttcactctaattagtgaacagtatgggcatttacttaaacttttcactgcaaatattctcaacaatttttttttattgtggacaactttgagatctaataagctacggaccatttcccccccagaatgaatacatccacaacattttgcaaacaatttcagccagtcagtccatggactaaccctatgaataaatttcaaactcctaaatttggcataaaataattatatgacttgagccttagctacctttccatgctcatctgcaattctctaatgtctttttaagctatgctatatcaaattccatgtagtttccctacatggaattagggattgctcctgtgagtagctactacactgtagcctgggcaacatagtgagactccatctcaggaaacaaagacaaaaataaaaaaccaaggtaaagagctaagagaatggatacataatatccctcaaatgagaagacaaactggaatactagcaaataaaattgaatacttgcaatgtgtaattatccacaaaggccattacaagagaatatattatacaacatacacactatttcttcagcctggaatactattctatgttttgttttttttaacatatcctccaatacttggagcagatttcatatctaacaggaggctcatctgattcttgtgctgaaacccaataaggatcaacctcctagcatttacttcctgataggggctttcatgaaacccaggaaggatcaatctcctagcatttactttctgatgtcaatttcgataacaatttttcctggagaatgttaaattctttgagaatgaggagtgtgtcttatttagccgtagtgcctagaacagtgaatggcacaaacaggccttcaataaatgtatgttaacctgagaaggaccaaaattatcaatgtgagaagaagccaggcactgtggcgtgcacctgccatcccaattactggaagctgaagcaggaggattgcttcagcaatttgtttattatacaacaaagttatttttaccccagtaaaatgactaaaaattgcattagcctaaggtatcaatgtcagtatcagtttctgttacagaaaatcatcatgtaaacactagaacaatgaattctttattaaaacaaactgaaggcaatactcagaaaacgtaccattatgatgactttatggaaagattcaaagctatgctgtgtgctactattgtataacgttttataattctctctgccttgtgaatagtaagcagcagattttagctctcagatggagattgtagagtaacaaacaagttaatgggtaatgagaaaagtggagaactttgcacggaaagatatgtacactgatattccaagcaaagaaattatttttgctgttttcaacttgcggtttttattcatttactcaacagattaagctatttctaactctaaggttggtaccaaaggggaccagtatttatcattagaagaattaccattcattacacaatggaatataagcataatgcataatggactttcacagtgtgattgggtagaatccaacgagacggctaattcactcaattctgtttcacttactctggtgctcttctctcttatgccagattcatttgttgtcataaggccagttatagaagcacagtgggaggcggggtggaggtgaggacagaagcattatcagaagcttccatggaggcacagtttttaaaattacccactgaaaatccatagatagcctcattgtagcctctttccagcccctactcttgctcagaccatagtggtaatgacagaatgggagatatcactcactgatagagtagactattctgtaagatgacaaggtcagtaaaagcagtaaataagggtgtgcttacaacaaagatggaattcacaatgtatgttgacccgaatttaaaaacaagaaatagaattatggaggaaaatcgaattgttataacccctagaaacaaaaacagcatccagcacaattgtgagtgcacagtgcataccacaagagatgtgagctaaatgtggtataatatgagagtatagtgggcctgaagaagaaagtaaaaagtggagagatacagcatttcatattatttttattgattcagagggtacatgtgtaggtctgttacatagatatattgtgtgatggtgaggtttgggcttctagcatacctgtaaccataatagtgaagattgtactcaataggcaatttttcaatcttcatcctcttctcactctccccgcttttagagtccccagtgtctattatttccctatgtatgtccatgtgtaaccattgtttggctcccacttacaagtgagaacacagcatttaatattatcggagggagaaaagatcccatactacacatttgtctcaaataataaatacatctgtggtttttcaaagaataagccctaatttccaaggcagacttcctagtccatagctataccatgagatggaaatttaaatgctacagtgatttggggtgattcacacaggcattctgtataaattaagcaaaaatgaatgtatttatcaataattacagataaactcaccaaaagtacagccaaagccctttggagtatgacataatttagcaataaaatcaggtggtgtacctaagggacagactataacatacatattctttaaatcccagtgacctcttcccaggggttaaatcagaggagtcatatcaaatccaagaaatatcatctttgaatatatttcaaaagcctcaaatgattaaacccaatgaccttttaataaatgtaaaataaatacacaaggatatcagctctaggtctgccttactccttcccttccttccacagccatttgtcaataatcaactaagttactgataaacagaggctaggttcttgggatacaaaggtaagacatggcccctgccctcaaggagttcacactaaggggtgaactacacagaaacaaataattatttaacaatacaccaagtatgttaacagaagtatgtataaggacaatggggacaaagaggagaaagtacttgtgattttgttcctcatatgacacattattattagaatgggagatgagaattatgtacttggtcattcaacaaatactgactatgcccctctcatgggtaagcacagtgaaatcacagtgagatcagaataatcctttggaattccaggggcacgtgaccttctctcatccccctcaagaactcaaaggcctcttgctgctgacaatacagcagcttgatagttaagaattttttaaggaataaataactttatatttttaatctaaaactgagttggacaagtttgtgaataaaaatatcagttaataaggataaaacctaagtaaatatctaatcattctaattacttttgagggaggccaaatattctgactctatttcctattatatcttccctcatgcttagtttttctagtctcactccccatcctatcatgaactctaaagaaataatacttgttacatttaagatcacacagaaaggcagtgaggttagagagtataaattctggacccagattgcctgggttcaagtctgtgctctgttatgttctagctgtgtggccctggggaagttgcttaactcttctatgtttcagttactcatctgtaaatgaagtcgtcaattaatgcatataaaacacttagaccaatgcttggcatatggccaggactccctacaagctagttaatattcctaccatatacataaaaataaaaaatcaataagcaataagaaagagttaatgcaaataaatttaatagcagagctatcttttaaacttcatcaagagcatgactgtatcaaattcgtaactatatcaagtaagcatttgcccaatatgagatttaaaagtaacgactatagtagtttggatttcatctatgcttaagaaagtgtgactttgctgtggataagatactttcaagatgttgtcttattgctatctttgtggctaaattaacattcagattaaaggtgagaaggatatagcgattgttataacttctttcacaattatctcacagaaaattgctcatacaatattatttcttgaaagaaataatttcaatttcttgaaagaaaatttctttcaagtttcttttattttattttttttttgagacagagtctcgctctgttgcccaggctggagtgcagtgctttgatctctgctcactgcaacctccacctcctgggtttaagcgattctcctacctcagcctcctgagtaactgggactacaggtgcacattaccacacctggctaatttttgtattttttgtagagccaagattttgccacgttggccagactggtctcaaactcctgacctcaagtgattgacctgccttggcctccccaagtgctaggattacaggtgtgaaccactgcacccggactcatttctttaaaagctttccataacctgcaaaaccttctcaatacatgtgctcttgaaaacattgagcctaatattttcctgttagactagtcttctgtttcctcttaaaacaggaaagcccataactgtctaaaggacaaagaacagtagtaggtttaacaattttcaccctaaagccaaagtgggagtagctgtaatattttatgaatgaaaaacaggatgaattctattagggcaaccatgttttagactcctttctaagtcacctcctagaatttttaatcagtcacctaagagttacttattaactcaaaaactgcttagtcactgactgaaaaatgaggcagggagcagaccaaagtcaagagttcagggtcaaactgcagagagcaaagcacaatgagtgaattggtttcatctttctcctcagtcttccagagccaggaaaatgaagggactggacagtgttggtggttggtaatgtgaacacaataccagctgtcttaggtgagtagacacaaaagtcacaggttaaaaagggcactttgtctcccttacttgatatgtggatcaaagccatgtacccatacatgtattgtccttggcatcttttctcagttttctctttcacaagatgcccatacacacaatatattctataccaatgctcttctggaagttctttcaacttcaagattactagaaataagagcactagtgagcatatctatttgttagttttaagtaatatttaacttgcagggcgcagtggctgacgcctgtaatcctactttgggaggccgaggtgggtggatgacctgaggtcaggagtttgagaccagcctggctaacatggtgaaatcctgtctctaccaaaaacacaaacaatagccgggtgtggtggtgcatacctgtagtcccagctactcgggaggccaaggcaggagatttgcttgaacctgggaggcggaggttgcagtgagccaagatcctgccactgcactccagcctgggtgacagagtaagactccatctcaaaaataataaaaaaataaaataaataatatttaactaagagaagttaatattttagttacacatttctctctactgctagaggattatatttggttattacagtatttcccccttatccctaggggatacatcccaaacccccagcggatacctgaaaccacatatagtaccaaaccctacatatactatgttttttcttatacaaacatacctatgataaagttgaatttataaattatgcacagttaagggatcaaaaacagtaacaatacaatagaacagttataacaatatgctgtaattacagttatgttgtgaatgtggtctttcacttaaaacatcttaagtactgtattcatccttcttgtgatgatgaagggtcaaagcagaacagcatgagattgcatcatgctactcagaatggtgtgtaatttaaaacttacgaattgcttacttctggaatattccattaaatatttttgaactacagttgattgagagtaactgggaccaatggaaagcaaaactgtggataaggggagattactgtgatactgacttattgaattcggattatacagttctgatatgagccagtcttttaacatctttctagtttatgactttgggtcccttcatgattcttaatcacttccattcaattataaaatacttattttattagctgggcatggtggtgcatgcctgtagtcccagctacttggaggctgacagtggaggactgcctgagcacaggaattcaaggctgcattgagctatgattgcaccactgtactctagcctgggtgacagaatgagactctgtctctagtttacaatatgtatatatattgtctctaatttactctgtatgtctgtatgtgtgtgtgtgcatattaagcccataacaaatatttttgtgctctataagacagctgagaaaaatatatttaagagtctaagggcaagctagtctatctgtatacttgttataaaaaaggtaaggtatattgtaaatacattgcatttaatggacaaatagttgctagtatctctctggatttcaagggcccttgctaaccccttaatttctccattatgataaaagatcaagaattggccaaactcacttaatatattaacattactgaagatcatcatagtaaaggcctacaaaatagagacaagcattgcttagtggtgatggaacaagcttttgattttatttgtttttaataaacagtaggcaaagggatattttggttgtctagaaaaaacatgtattctcacttcctttctattaaccagctaacttttgcctctcaaacttcagctacaaaagggaatcatccatgagtttaattgtactgccaggtgacagacaagagggtttatatgatgagaagagaggctggaaaaggaaaaaaaaaaaaaaaagaggagcaagttcagataggtacagaggctagcacctgggtactgacctttgaatttcttgcaaggcaatataatttgctcttcaaacataaaaggctacactaaaagaataaaagccttttccccgctatgttcctataaaactttatttatggacattgaaatttgcatatcacatacttttcatgtgtcacaaaatattattctacttttgatgtttttcaaccatttaaacatgtgaaagccattcttagctcatgggccgcacaaaaacaggcagcaagggatgggcccttagactaacattggttgactgctggattggagcattagagcttgggtatgagtcccaccccagggcttccaggagagggggcccaggctgatgccatctccaccctcattgctctaggcgggaaggcagagctggtgctgtatgaggtgtggctgtagatcctgggccagcccttcaccaaggccttggaagataaaaccagtcctgagtcccgggtgcttcaggggcagctgatgaaatgagtgaagtggcaggatggagtgggagatcagggaagaggcctcgaggggatggaggatgactggacaaggctttggtagaactgtgaccctcttcacccgctcctgactccccagctgaccaccatcctcagacctctacagaacttgacctactggaggtggagggattccaatgaatccagggtggccctcggtgacccagggctcagagctggacttggttgagggcaggaggctggaagagatgacctccgctagtcccccccaggctgtccagccccctgaagcctgtgatgatccttccaccaggccagacccactgactgccagagtgggtgccaccttcttgagggctgtgccagcccaggcccttgggtaagaatgtgtgcaccagtgtctggacaccctgtgggaggcagagggcctcttggtagagatggtcattccagacctcggtcagtatctctttccctctgcagaccccctccctctgtctatgtcctctgtccatctgcctcctccctcgggttcattgcccctacatgacctgatctgaagcctgcctcctcagcctgccttgcatcctcatgggagccctcccatgataaatttccaatttatctttaaaaatacattatttgaaaccagatttgttaaagcccataatcagttgaaatgaaaagaaaatccagatttgtgtgggttttatatttggtaaaaagataattaagtaagttctgacagtgaaattagagttttaacttagctgggatatcatttataaaagagcctaacaggcctgacacgaaacaggcctgccatagaagttatatatagcctttcctttgactctactatatttattttctaatggacaagttaagtatagaatggtaaagataataatttaaaaagataataataataaccaatatttaattgaatacttcctattcttattgttttacctatatcacctaatctatttcttgctgctgctctctgaggtaagtactattattattcccaccataaagatgaggcaattcaggcacaagagtttaacctgcttgcttggacagctagtaagtggcagagctagaattcaaacccaggtagtctgattccatatgcatttgctgtactgaaagtacttaacccagtctgggcacaaagtgagtgctttctatgatcatcattgcttttattattactggatttaagaaaactatattgaatgcctacccactggagaattgaggaatgaacaaaacacacaaggtcactgttctcatggatcatagaggacaggggaggagacagatactcttcaaagaattacaccttgatagtagaaatagatcacttgaaggagaagaaaatttctgaatggtcctattttagactaccaggtccttaagacttgttactggatgatcagagtatacgcgtccattactcctattatctactcaccttaaactctgctgcttggttaaagttttggaacctttatcgagtcacttccctgttcaaaaacctttgatggcttccagttttctagagcctaagtagccactgtgtgtcatacataccaagaaactcccatccagcatttacagcaaacatcagtaatccatcatggtgattttttttttctatttggttgtagttttatcaataaatcaaaaactggcacttgaattgaaacacttttgtcatcgttgacctagtttgctgtatagaaacactggttttggacttagacaaacttgggttcaaatttcagctctctgccactcattggtggggtgatcctggccaagtcatttcacctatgggagcctcactctcttagcatataaaatggagataatagaaactattcaacagagtttttaggtaatgcaggtaaacaatttggcatagtacctggtatatattgcttagtaaattaaagttattatttttatcactgttaccataatgttcattattgccatcagaaagctttccaaagtctccacaatctagctctaatttacatttccaaatttatctcccatactctaccaaaggaaccctccacttcaaccagaggaactcaatgtctcctaaaaccagcctgccatgttctttttctgtgtgtataaaaatctgccttattcttcaaataccatttcattaaattcatgaaatttatttcatgaaattttcctgacccccttcagccacactcatactgctctccattgaactctcatacttactgtttctaacacttcatcatacactatctggtaacattctcttatgctggtgtttaattttatattacaatttaattttacatttttttttatcttttccatctaaaccctctacttttctttttctttgagacaaagtttcgttctgtcacccaagctggagtacagtgatgtgatcatggctcactgcaatctcgaacctcccagcctcaagagatcctaccacctcagcctcctgactagctgagactttaaacacctgccaccatgctcggctaattttttttttttttttattttttgtagagacatctccctctgttgccccgactggtcttgaactcctgggctcaagtgatcttcttgccttggtctttcaaagtgttggaattacaggtgtgagctattgtgcccagtcaaatagggataatcacattttattttttgaaacagaatctcactctgtcatccagctggagtacagtggcatgatcacagctcatggcaactttgacctcccaggctcaagcaatcttcctgcctcagcctttggagtagctgagaccacaggtacatgccactacacctggctaatttttgtatttctttagagactgggtcttgccatgttgcccaggctggtctcaaactcctgggctcaagtgattctctcacctcagcctccgaaagtgttgggattacaggtgtgagccactgtgctgggcagaaatgtgtatcttcaaaacaatacctggtgaaatgactgcggattcatatcaatgaatgaatgaaatttaaataaaataacatgtggtagttaacttaaaattaagccatggattaaggagataaaattaatttttaattcctcatgttacattgaagaactcaatattataaaaaaatctctggctttttattttgaatttgaaaatcagaggccaagcacggtggctcacacctgtaatcccagcactttgggaggccaaggtgagcagatcaggagttcgagaccagcctggccaatatggtaaaacaccgtctctactaaaaacatgaaaattagatgggcatggtggcgtgcacctgcagtcccagctactcaggaggctgaggcagaagagtcgcttgaacccgggaagtggaggttgcagtgagctgagatcaagccagtgcactccagtctgggcgacagagcaagactctgtctaaaaaaaaaaaaaaaatcagaattttctacctttgtccattagtcctagttaaataaatatttttaaaaatatttgtgcccatgtataagtgttaaagaatactctatttctccaaataattataaaggattttttctttatttttaaaatatgtttttaaaatttgtataatttaaaaaaatttttttttaagatagagacagggtcttgctgtgttgtccaggctggtcttgaactccttggctcaagcaatccttctgcctcagcctcccaaagtgctgggattaccacagcacctgtcccaattttctttaacatagataaaatcaccactcgcaggactcaactagtttacattcctctttgacctatgaaatgtgatatatgttttccatatcaagtttgaataaaattatcaatcaaagactccataagcatgtgtaacttagcccagttgctcccaaccaccagatggtgagggtctaggatgacatttcactgctttctggcaaaatgggaaaaatgagggcaacaaagcagtgatgaagcaagggttggcaggagtagtccaccctggggaaggggcagtattttctcactgacgttgtttggaactgcctgtttatggtgataacaaaaagcagacaaactattagtggattctattattgttttaaaatgatctacagaagatgcaatgctgttttgcctgtgcctgaagtggactgcttcgaccatcatgcctttggcatgcaatagcaataaagtgagcttcaggtaaagctgaatttattcagttgaagagacagtccattattctgtgataaaatgctgttggtgattaaatgtccttttaaaacaaaacgatgatgatgggaaacaaatttttctaatgtcttcatttgttaaattttaaaaactttatcattgtgtctatccctgaagtgggttttattactgtttagttttttttttttttttgaaatgttccaggtctgtgaaatgtcaaatctgacaacagcttgacaaaaattaatcaagagaacaacttgacttaatggagagtgcacagtgttttttggctcagaacagtggctctccaagtgtggtactctaaaccaatagcatcagcactaactgggaacttgttagaatgcaaattctcaggctctatctcaggtctactgaactagacactggggggtacagcccagcaatccgtatttttaaaaagcccagccaggcatggtggctcacacctgtaatttccaacactttgagagaccaaggtgggacgattgcttgagcccaggagttctagagcagcctgggcaacacagggggaccctgtctctacaaaaaaaaattagtggggcatgacggtgcatgcctgtggtcctagctgctagggaggctgaggagggatcacttgagcctgggaggtcgaggttgcagtgagctgtgatcatgccactacattccagcctgggtgacagagtgagactctgtctcaaaaaaattaaaaaaaaaattaaaaagccatccaggaattgtgctactgtttgagaaccatttcccagggaataggtagagaagatgcaaaaagtgctgagacaaaatgcctggagattcttaaatgccccctgtaaggtcacttttagtccaatgattgtgtctatttattttatatggattttccatagttattaattaaccaatttatacaaaataaattaatctaaaataatcctagagtcttcggcaaatgattttataagtgcctatataaagtgggataaattatattaaatacagttcttaagtcattaagcttgttacttttcagattcagaaggcagcctatctgaagaaaggtggagctggcactgtacttgagaaacagaaagacctatgaacctgtaactccctttgaatctagcaatgaacttatgccccactatgacgggatataggagggaatgtgaaattgctccttatccaagattcttttatctgagaaaacaaccaatgctgatgaaatactaactgggccataaagaattacaatttgatagcttaaggcctcttatattatcatgatgtttttacgatgaatgtagagacttctgaaatatcaggtttgagaaggaagaaaagaatccatgcaaaccattcgctttccacatgcacatatttcaggttttacttgaataaacagcaatgaaagaagatgctggtggacgtggcctttttaattgatacataataattgttcacatttttgggatgctgcagtggacttttctggcaactggcaggtggagggaatggtgagatgtggtacttgaaagtggggctcactctcatcaggtcattgagacatttccgccacataaagagagagagggtatggaggtgcactgtccccattcatgatatattcccacatgcatttactcaacagactaaaagcctgcaatatgttagcagctggagatacaaaagtcccttataagcccaggtcctcaaggcacttacacaacccacagggagaatgacaagagttggtcccctgtacacctctgagccacatgaccatgccaaatggtgagtgcagatttgatgaacctgcagataactattttaagctgcaagaaacccagggcctctgcccttgttaccctcagcatccatgcaatacatgcataccacatatctcaggcctctcctcctccctgggagggcaaatggcagccttcacattgagacttccccccaaaaaatctgggtaatcaatcaggtcatggctggctccttccacagaagccacagattcccccattcagagactggagttccgttggaagtgtaacaacccttggctacaattaaatccatctagagaggctattgatcctttcaaagttaagaggctgctgctgcttccaactgtcagttaagtcctgaaagcaaaacaatccctttgctggccttctcacagggtctaggctttcctcaaaagcagaaccaaagccgacttcgaagaagtctggtgtatgtcttcttttgagaagtgtctgttcatgtcctttttgatggaggttttttatctttttggtaaatttgtttaagttttgtataagtgctggatattagacctttgtgagatgcacagtttgcccaaattttctcccattcgataggttgtctgtttactatgttgataggttcttttacaagttttaaaaaagtctggtgtgcccctactcactgggacagtggtttctaaatgctagtttaactatcagccatatcagaatatcagaatcacctgcaacataaaatacagtagtgcccccttataagtggggaatatgttccagttcccccagtggatgcctgaaactgtggatagtaccgaactctatctatactacgtttttccatatgtatgagagataaagtttaatttataaattaggcacagtaagagattaacaataaaatagcataattataacaatatactgtaatatttcctcatactactcagaacggcatacaatttaaaactttttattttttaatttttgcaaccctgctctttaaggtaccatacaatttaaaacttataaattgtttatttctggaattttccattttatatttttgggccatggttgaccatgggtaactgaagctgtggaaagtgaaaccatgaataacggggctctactctatagatataaggagctcataccagacctccttaaccagaatcttctataatagggctctaggcttacatagttaaaaaaaactctataggtgattttaatgcatgccattgattgggaaccgctgcactaggacggtagttctcaaatttcatgggcatcagaagcacctggagggcttgttaaagcacagattcctgggtcaaatccccgagttgctaagcagctggcctacagtggaccccgagaatttcatttcccctaagttctcaggtgatgcagctgttctggagcaggggaggacacataagaaccactgcactagggattagctagggccagttccattggaagcctgtttactagctaaatgcctcttgaccacctggagaagatactgctttttacctttccaacattcattctccctttcttccttctaacagtatcttgatttttgctagtgggagcaatgttcccaagtaacagaactacatttactcacttcctttctaaaaaggggcggccacagtactaaatcccagcaacaacaaaaatcataacctgaagctgttgggtgagggctctggtttttggaaaagcttaaaggtgggcgagggaggaagtgttagctcagctggcattcttcgccttttgccctcactcttctttctttatgcctggaaaaaagaagtgataactcgagttctgacaaccattctgtggcaacaaggcaaaaagcacatactaaagatgatgacggtaccaaggaggaggagactgggtgactgatggtattacggagttgccataccagtcccacatgcctaccttcagatctcaaattatggggcggaaaaataaaagttctcatttttaaagatgattttaaggtctctatttactagtgaccagaaaattaattattaatttgtcacaccccaacccaccaacatggaggccattatattcacctcttttctccgatcctgctattctcacatggctctgagattcttcttcccttccccaatctctaactattcctattgctttctgcagaacttcagtgccattgtaaactcccttgaaacttgaatctcttcataggcctcttagccttaaatgaaacttggatatcccctaagggcatcaattccttggagtccgcaggataagaatctctggccaggagggtaggagtagttctatcctttgtcccagtgctactttaagacctcctccccttatatatgaactcctgactttttgaggcttatgccatctggctagatcttttctccttgttgctgtcacacctttggttcacaaacttccctagtttgtgaaagacttcagaatttgagtcaccattttcttctccaccctacctcctaaccatgatcctaggtgatttcaatgccactcaacatgaaagcttctctcagttcctagacttacatatctctagtgactgatactgatctccactccacactggctacctccttccatggccacaccctgaatcatatcatccattaccatggaaagctccacttctgaagtgtacagtgacacagctctttccctgttattcctggggtctctgtaggtaccttagaaaagcattcggtcccttggcccatctactttatccctttcttcaagcacctcctgccatcacatctttccttgtttataacttcaactatagttgctaacatcctcaattatctttcctcatcgtaccctcctgtaaaaacctcacccctgggccaaactgttcaccagaaaataataacaccataatacatgtaatctcctaaatcaactgaattgtaaatacaacccataaatatatattctgtcatcagcactttctccatggccacttcaaactttgtctactatctcttattcaagactcctggtactagatgttttggaatttacaataataatctggaatatatagtatatattatataatactccaaggggtctgggaagtcactcatcatcaaatacattaatatttttacagcagtgtgaagagtcacactaaataggttaaataaaaatgatatacattaaatgttttgtcaagctactgaaacaaaactgtttaatgatacacaacttgatataagacaggttaggttttaccattaaacttatgaaaaaactttggttttcagacatttttagattattagattttggtaacacagataaagatggtactatcacgtttgcttggggataggcattaatctggattcattcccacaggctacctttcacatccaattagtctctgaggctttctgttctaccccactaaatgtcttttgaagctcactgcttctggctatcccttctgccatagcaattcaggaaaccagaattttctcctgaattacttaatagacttctacctagtctctgtccccctagactccacccacttgtttccctgcctgaccccagggccctttcatctgttctctatactgcagccagagtgacctctataacacaggtatcattgtgctattcccctgagtaaaacatttatttggatccctaatggcctcaagatgaagttcagttgtcttaatatgactttacgaggcccctgctgatgtttccagctttatctcttgccattttctacctcctggtcaaagccccagtcttactgcactatttttagatctctaagagaaagctgtttgcttttgtatttgtacaagttgttccctctttgacaatgtactactaaaaatcacaactcttcttctttcaagatagaagctaaaactaaagataaattatgagtgtcagtatgtgcagaggcctgcgttaatcacggccaagaaattggggcctgtccaatcatcttagtcaccatgcacctatgtttatttctgattaatccttgattcactattttttcccccagagtgtaccagaataagaatccatgcagaagtaattatgtatccaaattcagatttgatcaactacttatgaaactgactttgcaaagattatgacagtgagaggagtctagcatagctgactccatcttgcttctggcctcacagactggctgtcttcactcattcctgggtgtcagccaagctcaccatgagaggaacttagtctatagtttaacctgaaaacaagaactaaccccttcctggctagggaactgaaaactgtctttgtaaaactaatgaaaagccacaatattaatattatgggaggggcctgaatgctgctaaaatgtagacctaggttctataatgctttactgctcaggggtcatgtggtccagaggtcacaagatttgtgatctccccaattgatcccataggtaacatcactatcgtaaaacctaagattggtcttttgagatgttttttttagatatgcattccggcaaccgatggacctcaccttgaccctgacttatgactcaactgatcctgtggccccacccagaggtagactcagcacaagaggaccgttttctacatctctatgatttcatccccagtcagtcagcagtacacacttcctagcccttgcccaccaaattgtccataaaaaccttaacctttgatcctttggggagactgatttgagtaataattccatctcttatgtgggcggcctcttgtcaattaaaatggtaacttcaataccacagtcttggtgaactgattttctctgtgcagggggcaggaagaacccgttgggcaattaaacttatacatacaattaaatattttatatgcttcttaaaattttataatcacaaaagtggtatcaccaagttacagaacatttagaaaaaaaaaaacaggaaagacctatgttttcatcatcctataaaatatttgctatacataactgtctcctgaaaggtaagctctgtgaagataagagccacatgtattctgtttactgctgtgttctcagtgaagtgttttaatgtttaaaaaatataaatacaggccaggcatggtgactctcacctataatcccaaaacggtgggaggctaaggctggagaattgctcaaatccaggagttcaagaccagcctgggcaacacgatgagaccccatctttacaaaaaaaaaattatttgggcatggtcacacagcctatagtcctagcctctcaggaggctgaggcaggaggattgcttgagcccaggaggtgaaagctgcagtgagccatgatcacgacattgcaatccagcccaggagacagggtgagaccttgtctcaaaataataataataataaaagtacctaaatgaatgattgacctatcattttggtatacagaattaaaatttgaacatacttgaattttctaccatatacccattcagcaacattgaggttctcaattttagtacatgcaaagttttggttgttcccgtaagagaaaatcagaaaaagaaggtccttggaaaagaccacatgtttaaaggtaaagtgaaaggcaaagaagtagatattattttccccacataacaatgattcccaaagatgtttttcaacgaatcctggggaaagatgaaggaagcaaggagaaagtaaaactgcctctcacaagtatcactggtgacatgagatgacaactaacactgaagtggagaagaggggaggcgtacacgaggttgagtcataacatcacaaaggcatcattcattttcatagacaagggggagccaacaaatgacatctcgtatgagtaacgtatgccatacagcaaaataaatttgccagtatcttgttagaactgtaggtggaagccatctagaaaaatttctgatgagcaaagggataaatggatcaattaaattagaatctctacttgttatctttaaaggtgttaaggtcatgaaagtcaaggaaaaattcagaaactgatccagattgaaagagactaaggagaaaactaaatgcaatgcatggtcctgacctggatccttttgctagcaaagaaccttattgagacaattggtgaaatctgagtggagtctaaggattagatggtagtaataaatgaatgttgatttccttatttggatgcttgtaatgtgattatgtaaaaaaaaatgcccttttatgttaaaaatacacactaaaggattcagaagtatgcacataatgttgatgacttactctcaaatgttcataaaaaatttattgtactgtacctgcaacttttctaaaagtttaaagttgtttaaaaaaattagaatcttggccaggcgtggtagcttacatctgtaatcccagcactttgggaagccaaggcgggcagatcacaaggtcaggcgatcaagaccatcctggctaacatggcaaaaccctgtctctactaaaaatacaaaaaattagctgggcgtggtggcatgcacctgtagtcccagctactcgggaggctgaggcaggagaatagcttgaacccgggaagcagaggttgcagtgagtcgagactgcaccactgcactccagcctgggcaacagagcgagactctgtctcaaaaaaaaaaaaaaaaaattagaatctctgggggtgagtctggacgtcagtatttagaaaactggctaggtgattctgatgtgcaaccaaggctaggaaacactgttatagagtcttctctataaagtgtgacatactttttcaccgagtgcaaaaaatacaatttatttaactaaactcttccttcctttctttcaaaaatcacttattgaagagcttttatatgccaggcaagaaaaaatctcttccctactatgtgtactcacagtctcacatgagcaaacagacactgtgctgtaatagtaataataataataactactatcatttgttgagcaattactatttgctaggcacaatgatatttgatagggcaggtactgttatcttcgttttacagagtgaggaaacctacgcatagtgagatgagtaacttgcccaggagtacagagctattttgacttggctacaccactatagtataggaaggcaaagtgctatgaaaacacacatacggactgatgcagactatgggtgccatggaaggtttcttagaggaggtaaggtgggatgtatctgtaaacatgcgtattatttccattgttaatgatcacaaatactccttccatgaacatctgtgcagataactttccattttgtagtcctgctgccactctcttcctttgcttagatcctaagaagtagaattctgggacaaaagttatagaaatattccaaggctttcaatatgttttgcccatagttgtcaccagctatatgagggtatctactttactgtagcattgccagcagtgggcattattacttcaaaagttctttgccattaatagaaaactagtatttgattactcagctgaacattttaccatcaatgctatctttaacacacaaatttaagatcattgtagttacaaccagcagagtataagagaacattaacagtgacagaacattctagaatgtctcataaataccataatttattcctataatcacaaaattgactgggtcacaattagcaatattcaaagaaaacaaatttctgtattcatgctaagatctttgacctctcaaacttactatgagttctaggagaacagtagaaatgaattgtttgatcctatcacaatccagcaagtaaaacatgttctataattgtttgctataaaaataaataaataaataaataaataaataaaataatggataatgacaaaatataaactgaagccatactttctgagctctatacccatgacacatagctcagtaaacatcacattagggaaagattaaagagaagtagcatgttcccctctttctcttcttgccatataaataggataacaatatattctagtttgcgtgtgacagttctggtttatgcctcttgtccgaacatcttttctgattagagctgcctttcaaagggtgtttaattgggcaataaattttatggtcactctgcatctaaaggatgtccccctaatgaagagctgatcctaggaacaaagtgctcactgatcagacaacttgtcttgtgtcactcggattttcactttgaagacctatagccagatacctcatttggcctttatgtattttcataatattttatcatctgaagccaaataataatctgaaagtagctaattgataagggcatccttgactatctcagcactctttatttcattttattgataaaagaagtgaggcatggaaagaaaatgtgacttattcaagttcatatcaagaaaataatcagccatataagaggaagctactgatgctctaacttctgatttttgattaattctctaaaccacacagtcattaatgtacactgaaatctccagtgaagttagatcagaaaaattgcaatcatttagtaaatggctttgcaaactacaggcagtaataatctatttcaaacaatatgaacaaaatcataggcataccttagataatactttttcctttttttcccctcaggccctcttggataatatttttaatgggtataaatttcatggttaataacatttcagtctcattaaataaaagtctctattcaaacctagttgataggtccaagctatcagaaagtgaggaaatatttatttataaaataagttaaaatttaaaataaacatttaatctttttggttattaaaaaataaagcttggtacatttttacatttcacaagtatgtctaaatttcatacaaagatgcataatagataaggttttacaaatatcttggattataacagaaaatcttaatggagctaacaaagtcattttctataacaacaacaaagaaacttatggtgataaatttaatagactattactaagaactatatgaaaaaaagtgactctactgcttgcataaaaggagaggcataccacatatgaagttggagaaactcactattacagatatgacatttccatataatttataaacatattgtaatgtcactgaaagtcccacttgcattttgtaggggtggagtaaagacctcggtaaaaagtcatttaaagttcattcggaggttggccaggcgtggtggctcatgcctgtaatcccagaacttttcgaggctgaggtgggtggatcacctgaggtcaggagacagcctggccaacatggtgaaacttcatctctactagaaatacaaaaaattagctgggcatggtggcatgcacctgtaatcccagctatgcaggaggctgaggctggagaaatgcttgaactcaggaggcggaggttgcagtgagccgagattgtgccactgcactacagcctgggcgacagagtgagactccctctcaataaataaataaaaagttcatttggaggaatacattttagggactaaccaagaacacttttgtaaagtataaataacctacaataataaaaacagtattttgctggtacagatcaatggaataaaataggaagttcagaaacaggcaaggatgtatataagtattcaataaatgagaaagaacaatgaaaggatggatggatttagccatttaaataaaataaattgtttattattaataatattgtgatagctggctaaatccatacctcacactatatgtctaataaattccaggtggattgaacatttcaatgtatgaaaatgaaaacaaaatatttggggaaggcttttctatgtacaacttccaggacataatttttttttaaaagactaatagatttgatcacataaaacataatactcattaaaataaatgtgtattaaggatatcaaccatttttcttcatttaatcacttaaatttattatttctttttaaatttcatttagcttattttgacacaaaaattttaaaatctataagaagttaaaaaaataaaatatttatttacagtttccttcttggattttggcctagaaataactttcttaaccctaaactggacccattttcacttatattttctcagaatttttcatttcatattttatgttaatttaaaagatgagagatcaaatatggctttgtttcatattagctgtctggtttggggatgttacttaacctctctgagtctcaatttcagtttcctaaaaaaacagatataatgaataccagcctattggagttgctatggcaatgaaaagaaatcatttatacaacacatgtgtcatggtagaatctggttaataaaggtgaccaaaatgttagctatcactttgagtgctattgttatacttggtagctagtcgggtatgagcagggcaggaaagggctcccatacctcacaccaggagtgttgggagaccatcaggtgatggtcaggtggttgttaactgtctctctgaagtaataattggtcacagctggcgccagggaacggcggtctcctagtagatagaaaacacctaaaactggtgacgagcggcttctcaataagatctcaggagttgggcaagtggtcagaagtagtgcaagaccctggaggtatgccatcatataaaaacctcaagtcaaaaggtcaagccatacacttgtctttcaagtcacctgcttggccctcttccaagtgtactttcctttcttttgttcctgctctaaagcttttaagtaaactttcactcctgctctaaaacttgcctcagtctctccttctgccttatgcttcctcagttgaattctttcttctgaagaggcagatactgaggttgctgcagacccatatgaatttgccatgggtaacactatcacactgtatattagactccttccccgccttttttggaggcaaagtctcgctatgatgtccagggtggagttcaggggctattcacaaatgcaatcatagcatactgtggccttgaactcctggcttcaagcaatcctcccacttaagcctcccaagttgctgggactccaggtgcatgccactgagcctggctagacttcttaatttcattggaaaacagttgacccttaaacagtgtggaggtatggggtacctatcccctgcacagtggaaaaatctacatataacttttgattccccaaaagcttaactactaatgctgttgaccgggagcttcatcgataacaaaaagtcgattaacacataaatagactagtatctatatatatgttatgcactcataatacacatttttttctatttttttgatatttctaggctacaaagttcacccaagagttttttcaaattgtcacaaatctccaaactttctaatatatttattgaacaaatgaatatataagtggaccagcacagttcaaacattgttcaagggtcaactgtatgtattttcatgactagcaatttatggtgatggtatagtcacctgatataaaaacaaatttcacagaatttaattattttaaaatcaaaatgtatgccaaccagaaaaaaatatctaaattctttgaaagctatgcagcatgctacaatttggtctttcaaagttgcagtccaaaatcatcagatggccaagtaacagagtcatccaaggggaacatcacataccaggacttgtcagggggtgggggggataggggagggataacattaggagaaatacctaatgtaggtgatgggttgatgggtgcaacaaaccaccagggcacgtgtatacctatgtaacaaaactgcactctctgcacatgtaacctagaacttgaagtataacaataaaacaaaaagttttcttacacatcagaactcctgagataatttatgagcttgaaatataaataggatgtttaccttctttatcttacctctaataggccatcctctggcagatcagtacagtgaacagcattctggatcttagttttaccaaagattgctctgagagttccagggcgtaaatgccgggcaatttcctattaaacatacattcacatatagattaatgttagtcatatggtataaataagaaaaacactagctatatgaaacgctaacttatttatgaaatacatgttatatatagacagtgcttataagggtttttctgtggcccaatgtaaagtctgctttcatctacatcggggaaaaataataattgcatttctttttatcaatagattatgggaatcacacaaaatgtgaagctagttcattactgtgaaagacttgtattttataaagacagtagagatcttaacaactttgatttaaaatgaaccaatttgatgctattgatttcaaaagcttttaaaaaaatgttagctgtatcaacttaatggtagttcatctttaagagaaaaaatatggtcacaaatagccctgaatttaatgagggttagagagaggcaagggaatgataatgatgtacaaaaaaatttaaattgagaaagacaggaagagaggacctaggggataaagaggtaattgacaatgaaaaggtggatcaatgaatttgagctcctagtggtatgggataattattgagatctgtatgttagaagaagagagctggaaagttaaaagatactcgagactgagattactgtgggtgggaggagagggggctatagtgattgataatgatcagttttaaggcataaccatggataaggttagtctgagggcaagaatgttagaagaaagaagaacaacagattgagaggccaaggtcgtaagtgggtcacctctatgaaagtggaaatcagaaagaatcatgacaggtgtagcttagggtgcaaagattctgagcagcactcacatttgtggttccatcacttaaggatgttttaaagacatgcatttatttaattacttaagttttatttgccagggttccatcaaatgtcagctataaatgtattatgtttaggaaaaacattttgataaagtagaaaataaggatgtctttatattttatttcatatttattactttcattctgttctccgtaatttttctagcaagtaagtatccaatattaaaaacctactcagctgcgcgtggtggcccacacctgtaatcccaacactttcagaggtagaggtgagtgaatcatttgtggtcaggagttcgagaccagcctggctaacatggtgaagccctgtctcaacatggtgaaaccctgtctctacaaaaattagctgggcatggtggtgcgtgcctgtaataccagatatttaggaggctcaggcaggagaatcacctgaacctgggagatggaggttgcagtgagccgagactgtgcattgcactccagcctggacgacagatcagactccatctcagaaaacaagcagaagccttactctgcttatatagtgggaagctgtcattttgtgacataagatgtaatttatgaaattgtgaaaagtgagtactaacgttctttttcttatttccggtcagggaaaaaaacacttttaaattactcagttccagtaaactgttttattagaacctattctctatcaaattttgtttgatggccaggctcatacctataatcggcactttgggaggagtttgagagcagccttggcaacacagagagaccccgttgctacaaaaaatacaaaaattagccaggtgtagtggtgcacgcctgtagtcccagctacttgggaggctgtgtgggaggatggcttgagcctgtgaggtcgaggctgcagtgagccaaaatgacaccactgcactccagcctgggttgtcagacagagtaggaccctgtctcaaaaaaagaaaattttatttaacttgcactacattcattaaaagattactttcatataagtgtctgctacatgcacagcacttgaaatctgaagaggttcatgtgtgttggcctagcgcggtggatcatgcctgtaatcccagcactttgggaggccgaggcgggtggatcacctgaggtcaggagttagagaccagcctgatcaacatggtgaaaccctgtttctactaaaaatacaaaaattagcagggcatggtggcacgcacctgtagtctcagctacttggggggctgaggcagaagaatggcttgaacccggcggtgcggaggttgcagtgagccgagatcacgccactgcactccagcctgggtgaaagagcgagattccatctcaaaaacaacaacaacaacaaaaatggttggtaattcctggctgtttttttttttttctttttttttatgagttctctatttgcttgtcatagatgccagggacatgctgctagatgaggtattctggttgccttcctttcagaagggggtgctaccatttttcctgagtgttattagctgccttcccattgctctgcctctttagctcaagccccacattcagtgccttaggctgtggctaaaagtatcaactgccttctgctcaatgtaagcaagcaaatgtgaaggcgctgatttactctgctgctcttcatgcagccctccaactaaccaccctgcttaaggccccatgcccttcctcagccttgcatccatatgtctgatgtgcagcccacccagtacccctaccccttctggagcagttctctcctgcacgttttagagtgttggttttcctcaacgatacaatcctatctgctttgagtcttttgaagtttatggcctgtaacaaaactaaaaaaaaacaaaaaaaaaacaaacccacaaaaacaaaaacatacgtgtgtgtgtgtgtgtgtgtgtgtgtgtgtgtatgtgtatgtgtgtactcttccttgttttccagcatcactggagatttactctttaaaacaacacacagtgaaacagtatctcctgtaaattcctgtaaggacttggtaagcaaggggatgatgggcacatatggtcttctgccatcttcatgacacttcatcttactgacattctctatttctccaacacaacaaaccatctttagttcatttttcatgctgctataattttgtacctaaatgccaatacgatcatgttatttacttgctcaaaaaatctttgaaggctcataattgcctatggccaaatgtctaaactccccagtgtggcattcaaggtcctccccattcttgcctaaatctacctcactcacacctgccttgaaagcttacacatcccagtgaaaacactgtttcctctataaaagcaaattaagccttcccaatcagagtaatccttgcttcttcaatgttcctacagtagtttacacttccaatataggccttcttgacttgcaatttatatagttgttttgtgagcctattttagtaagatcccattagatttcaatccctgaacacaatataaaacttcccttatattctgtatcttactaatgaacacacagtaaatgtttggtaaatatttgttgactgatataaaatgacagtacttctattcagagtgtcaggatggagtagcaaataagggtgggggctgtggaaaaaggctctctggatttgaattttgcctctgccacttaacagttgtgtgaccacaccacattatttaacctctctatgcctgctttaatgttcttatttgtaagacaaggataaaatagaatctgtcttaaggagattaagacaattcttaaagagacagaaaggtatgttttgacaaatatcaaagataatctaaccaaatattatattatctttaaataaatatataacatctcttaagagttgtaatcgtcatagttttagaataaaggtataagtttagattagatcataagctaattatgacctattattatccattaataaacctcagaaaacatgaagtatttttactgatataaaatgttttatttaggtaaatgataacaatgaaacttaaagatataaaacaataggtattttcttcatatctgctcttaaaatctaggctttcatgttagatcctctttaaaaaaggtattgataaattaattttagttttgattagtataaaatatcacatatgcttataaagtaaaaaatattgaaatactaaaaaatacaaaaatattaaaaaatactaaaagtgagagtgaaataataacagcacttcccccctccatttcctgatggattgtccctaattttttctaacagatttacattcctcttgctgcttaaactctggtgaagaccatactaccacgcatagttcccctcccttcaaggagcagaagcaattatgagatcataaaagcaacacaaagtaccaacatataatttcatctaataccataaataattcttaaaaagttattgcagtatttataaataacaggttatgctgagaaaatcagactcattaaagagcgatacttatttgtacttggagggtcagcagtctttcaaattccacaaaattccaggcatattcatcctcccctaaaaccttgcatgctgagtcccatcaagtcaaattcttggctatgttacagctcatcataagtactaaaaattctgctcaggtaatcctgctgtgggaggaagaattctgacttatagaatgacttctaaatctaagatatcaaaaaaatgcaccaaatatagaatagtgattggcaaaatactgaaaataaagaagggaatatttatttaattattctatggctgtgttattgtaaagaatgtcactgtttattgaataggtctatcagattgataaaatatgtctggacaaagaataacttacttccataataaagccactcagtttcagttctccacaacacagaagagatatgtaagaattgaaaatgcccttctatttaagaaacaaattaaactagaaaaagatttatgaaatttactaattacagaaaaagatcaactgtagaatatattcagatacagtcatgcattgcttaacaacagagatatagtctaagaaatgcatcattaggtgatttcctcattgtgtgaacatcatagagtgtacttacacaaacctagatgatatagcctactacacatctaggctatataatttgctactaggctataaacttgtatagcatgttgctatactgaatattgtaggcaactgtaacacaatgataaatatttgtgtatctacacatatctaaacagaaaaggtacagtaaaaatatggtaaaaaatgatgtagacctatagagggcacttaccatgaatggagcttgtaggactagcagttgctctaggtgagtccgtgagtgagtggtgagtgagtgtgagggcctaggacattactgtatactactgcagactttataaaacactgtacacttgggctacactaaatttataaaaatatttttatttcttcaatagtaaattaaccttagcttactgtaactatttcactttataaacttctaagtattttttaactttttttgactcttttgtaataacacagcttaaaacacaaacacattgtacagctgtacaaaaatcttttctttctttacatcattattctataagctttttctattttttaagttttttttcttttgaaacctttctgttaaaaaggaagacacaaacacatgcattagcctaggcttatgcagggtcagaatcatcaaaatcactgtcttccacctccatatcttgtcccactggaaggtctttagggacaataacacacatagagctgtcatctcctctgataaaatgccttgttctggaatacctcctgaaggacctgcctcaggctcttttacagttaactttttttctaataagtagaaaaagtatactctaaaacaacgataaaaagtatagtaaatatgtaaaccagtaacatagtcatttattatcattatcaagtattatgtactatacataattttatgtagtatactttaatacaagtggcagcacagtaggtttatttatgccaacatcaccacaaacacgtgagtaatgcattgtgtgactatctcacaacagcaatttttcagctccattataatcttatgggatcagcatcctatatgcagtcaggtgttgatggaaatattgttatgcagtgcatgactgtaatgagtagcatatggtggtttatcacgaggtcactagtctaattccaggaaaatctaagtacaaggaaaaaaatattctctggactacaggataactatgttagcagtgatatacatatatggataaacattaaaagaggagctagtatagctcaagtcctagtaaccctaaaacagctgtgaaacaatgttacaatcattgtcctcctttcacaggcaatgagggtaataaaacttaatatcaaatgccagtgaggggaccactataactaaaacagcaaatattttcatttctatccattactagtattcttctgcaacaagtcttgtaatactaaacagcacatgctaagtgctctcttgactcctccggcacttcaaaaatatcttaccaaaactgacccatcaaacagcttttcccagtagtatgcaactttgtactaatacagttatgcagttttatattcctgggagataagcaatgtcagatgaattcaaactaaaatgagataatgaaagatggggaaggaattggaagtagaaaaggaagccagggagagacccagaggctactttctgctaagtctaaggatccttctagaacctatgcataggctttagaaagagtaattgcaaaattaaactcaactacttatttatataatactaatctcattgagtgagccacctgcaggttcacagtaaatacacttattggcactggaaaatacataaattgtttgtatatgaggaatcactaaaacatcaggcttgtggactctgacaggcttcacatctcacttttcattagataaaaaatagctgtaatgtaaatttatagaacctgaagagggtcacaattaaatgttatttcaggtgaaatatttagataattcaatcctgtctttttcattaggtttcaatagaccacatggcatcgtaactattgcctcttactgatctgtttgctgtttcagccaacaataggaactggctgaagtgaaaatgaagtcttatttgacacaggtgttacttttaaaagtaaaaattatgatctcttggttcttttttaaaagaattgggcattcttcagaaggatgagctcaactaaaaaagaagagtcagaaaaatctcttaactcacttttatataaattacttagtattttagcaaaaactacaaagattcacatatacaactaaaatttaagaacataaacattagcatagaggattgggttttttggtaaatattttcctatttctttttttctaaatacattttaagacatttaacctttaatgtatactcacattactactaaaaaatttaagaggcattcttttattttaacaccctggacctgaaagcaagagaggcattcttaatatctccccgcaaaagaatcgttccacattctactccatccctataacataattactatccagtcttgctttactattttaaagaatcctacaattcaatgctcagaaacttcctcaaaggaataaaataatgaaatagctgggacccactcttggcacttctaacatccaattcttggcaaatcctgtcaatacaactactaatatataccctgtatcagtcggcttctatatccactctagcaccatattctcctgcctagaatattgggcttttagattttatacttgctggtctatctggtttcctagatacctctactcctagtaaacatattgtccaaaaagcagttagaataagctttaaaaaaacataagttgaatcataccactttcctgccgaagaatctctgatgctttcattaagagaaaatgcaaaattcttgggctgggtgtggtggctcatccctataaccccagcactttgggaggctaaggtggaaggatcatttgaggccaggtgttcaagatcatcgtggccaacacagcaagaccctgtctcttaaagaaaaacttctcaacataacctatagtcctgcatgctctggctcctgcttaactctccaaccccacctgaaatgaactagtcacatcaaccccttccaacttttcaaactagtcacatcaaccccttccaacttttcaaaggcaccaagctctttcctacctcaagcatgaaaacacacagtatttcccttggctcagcaattctctttttttgttttttgttttttttgagacagagtctagctctgtcgcccaggctggagtgcagtggcgtgatcgcggctcactgcaagctccgcctcccaggttcacaccattctcctgcctcagcctcctgagcagctaggactacaggcgcccgccaccacacccagctaatttttttttgtatttttagtagagacgaggtttcaccgtgttagccaggatggtcttgatctcctaacctcaggatctgcccgcctcggcctcccaaagtgctgggattacaggcgtgagccaccgtgcccagcctctcctctttcttaataattgccttacaaatggcttacaataagcaacagaaatcagatgtgatcgattctacagagtgactctctcaactctttattctatcctccttctagatggaaattagaaatctaaaaactacattccccagacacatttttggctagaattcttgcgatgtggaagtcctaaatgagatttggaagacaggacaaagcagaagctaccttcttgctaatgttgctacaggcagacaaggtaggagacacaagtgtttgagttgtggcagactcaatgcctaagtcactgccatggtagtagcagtggaggcagcagcaacttcaggattctaggtatgggaaggtactcttgaaatcaatagctccagtggcaactcctgacttaaggccctgcaacacttaagaaacttaagttcgtaaatagctacttccttgaatcgaactcctttaaaaaacatccctaagctggtttctgtttcttgagctgaactctcagtgatattctgaggctccatctttcttcctcatctctacagaaagctgttttccctgttcccacttagtaagtacctttttgctatctggttttcagctttactgctctattgaaattgctccctccaaagtcacctataatcaattagacttctagctgaaacctcttcttttttttttttttttttgagacagagtcttgctctgtcacccaggctggagtgcagtggcacaatctcagctcactgcaacctccacctcgtgggttgaaacaattctcctgcctcagtctcctgagtagctgggattacaggcatgtgccaccacacccggctaatttttgtatttttagtagagatggggtttcaccatgttggccaaactggtctcaaactcctgacttcagataatctgcccacctcggcctcccaaggtgctgggattacaggcatgagccaccgcacctggcctaaaacctcttgtatagcagtgaagttataaaagtaccatcagaaataatggatctaatacatgtggccaaaaaacatatgaaataaagctcagcatcactgatcattagagaaatgcaaatcaaaaccacaatgtgataccatctcacaccagtcagaatggctattattaaaaagtcaaaaaacaacagatgctggtgaggttgcagagaaataggaatgcttttacactgttggtgggaatgtaaattagttcaaccattgtggaagacagtgtggtgattcctcaaagacctagaggcagaaataccgtttgacccagcaatcccattactgggtatatactcaaaggaatataaactgttctattataaagacatatgcacctgtatgttcattgcaacactattcacaatagcaaagacatagaatcaacctaaatgcccatcaattatagactggataaagaaaatgtacatatacaccatggaatactatgcagccataaaaaggaacaagatcatgtccattgcagaaacatggatggagctggaggccattatccttagcaaactaacgcaggaatagaaaatcaaatacccgcatgttctcatttataagtgagagctaaatgatgaaaacacagggacacatggaggggaggaggggagcaacacacactggggcctgtcagaggaccaggggtgggaggagggagaagatcaggaagaatagctagtggatgctggatttaattcctgggtggtgggatgatctgtgcagcaaaccaccacggaacacatttacccatgtaacatgaacatttacccctgaacttaaaataaaagttggaaaaaaaaaaaaaggcatgtcagtcaaagaaagaaacaatgggtctaacaaactgatcttagtacagttatatccaatttataaaataacatagagattttataaaatttaggtttatttgtcctagagtagcaacattagtctcagcagttagtagaaagattttggtgcctttaaaggcctagcttcagcgttatctggctgaattaattaagataatgcccataaaatgtctaatggtgtctggccaaactggaggcatttagtagatataatcattgtcttcatagtattataaataaactcatagctaacaatgaggcacttatatagtacttgtgtttttaaaagcatgtactatttcacaggaatcccacaaatccccttgtcagcacaattgctgacgaggcagacagtttttgccttttacagatatgggtaacttggttctacggacagtctcagacctcctatccagcaatgaagaaagagtatatccaaagatccaaccacttggggcaaactctctttaaaggttaatttcctaaactgccgcatgtcttctatgattccctttaaagttgcagtaagcagctaagattccagaccaaggtgagcattttttgaaaccatctaatcttctcctataattaccaatagcaatgttgtcaaaaagaaatgtaatgtgagccacctatgtaatttaaaattgtctagtggccacattaataagaagtgaaattaattttaacaaaataatttatttaaccctatatattcaaaatactatttcagtaggtaattaataaaaattattaatgagcttttttacattcttaatttatgctaaattttcaagtcctgggtgtgtattttgtgtataatacatctcagttagaaccagccatgtttcaggtgctggagagctatatgtggctaatggccatcatattggacagtagagacctagagaatagtagctctctcccaggaccgaggtttaacttctgagcaacattctacattaagggctgagccaagactaataatatctgcagtattaacctctctcatgctaatggaaaccttgaacataagcttgagggcagtcaatctaaccatatttctcatgctgccatcctaggctataatcctatctatttatctatctatctatctatctatctatctatctatcatctatctacctacctatctataatttatcatgtctgttgcccacttatcctccacagctggcattgccaatgttcgtcattatcctcaaggctccatcctcaattacatgttttctctcagcaactttgtttcctgcttcacagaaaaaaaaattaagactgatatcaagagattcagctccctcaaattcctacacacacacacacacacacacacacacacacacacatatatacacacacattatccttcccttccccctttccattcagtgccaaagaaagtgccatttcttcttcttttgataattaaccctcccatctctttgcaactctaggtcaggaaacttccttcattataattacctttcgcctgtgttttcaacctttctcttttcaagtttattttatgcatcctatcaaaatgctcatgtctctcccatcacttaacaaatagacaattttaattactgtcctacctcttcccctcctttttagaagtcttaataagctccactttcatttactcttcagccttttgcctcacaacactatctaaaccgctttggcaaaggacactgatattctcctaattgcccatagattctctcaatttgtgacttgtcttcagcatttattactctggaccattccattattcctgaagccctccatttactcagcccacatgataccacagtccaggatctcctcctgactgttcctctcaggctcctttatttccaccttcctactgcctagggtccactccatattctcctcttatcttctggctctccctgggcaatttcattcactactatcatatatctttagacgactctttaactactgcccagttctcttttctgagttgcaggctggactatacaactgcctaatgctcactgcagccttgaactcctgggctcaagtgaccttcctgcctcagcttccagagtagctcggactacaggtgcatgccaccacaactagctaatttaaaaaaaaaaaaaaacaactctgtagagataaagtcttgctgtattaaccaggctagtcttgaagtcctggcctcagagatctcctgccttggcctcccaaagtgctgggattacaggcatgagctataatgtgcctggcccccacagggctcttatactcagcttgcacaaaactaacctcattgtcttcctcccaaaactccccctcttcctaaattccctctcgtcataaatggcaccactcttacaccaagttacctaggccaacagcttgggagtcatcctaagactcctctctctcccttttgggccccccatctaatttgttaccaagtcacacagattctatttctttagcatagcattctttccttactttccaagtctactcctactatcacagttcaccttcacatcttgtttaggttttagtggtctgctaacaggctgcattacctctaccattaaaaatgtactgtttgtttacccttctgtcttaactccttaaaaacaaggactacaacctttttatatccaacacacagaatcctcatgaaagattcattgaataaaatattaatgatttagtggataagtgaatggatgaatggaatgactaacatgctcaaatttatataccccattaactttgttaatgatagggtagagaaactaggcctcttggttaccaatagtctgggctccttaggctatattagatccttcagaagtgcctattttaaggaaccccgaagaacatccttttgaaatctaagtaaccaccatttatctattttgtgaggtggtggttttgtgtatcacattttctcaaactaggacacacctgcctgagaatggaaatgagaactctaagctctaatccatagctctgaaagtaacttgctctgtgactttgattgaggataatattactgtttcatcacagatataaaatgccatgtgacaaatatgtggaattggactaatccactagaatagcattaagtttataagtgcatgctcataaatgacttttccagttgagatattaagactattccccaaagaactacttaatcttctggtgaatatccatagcatagaaaagaccaattcactctaaacatgagagatcacatataataaataatctttcatcttatgttagacatgtctattactattatatattttaaatatatacacctctataagcaataactcacatctttatatatgatcttgaggcaagactcccatttataaagaaaagaataaactctgttcactatagttgcaagtcaagtatattttcttggttacatatttcttaagaaaagccctggccgggcacagtggctcacgcctgtaatcccagcactttgggaggctgaggcgggcggatcacgaggtcaggagattgagaccatcctggctaacatggtgaaaccccatctctactgaaaatacaaaaaaattagccgggcatggtggcaggcgcctgtagtcccagctacttgggaggctgaggcaggagaatggcgtgaacccgggaggtagaacttgcagtgagccgagatcacgccactgtgctccagcctaggcgacagagcgagactccatctcagaaaaaaagaaaaaaaaaagaaaagccctatgtgtacagattatactgtattatcctattaatgagaacatttactaaatcagaatatgccatttcttaggtaatgtaaagttattgccttctgaaagtatattgtttttacttccctaatactttattgtaaaaagatttttttttctcatggtcacattataatagcttttttgaaaagaaaaactttttattaggagttatattctaaaaggtaactttaactttatcctcccccaaaattcatttttctcttcctaatagaattgtaaactgtgactatgatcttgaaacacacttacattgtttttaaaaaaaaaaacaaaattccatttcctcagtcattctcttctaggctatctgatctctgcttttccctgcaaacgtagtgttcagaatgtattataaaaatgcaattttctcttgtactattgaaatgaagcaatcttttaaaaaaataaataactttgaacttcaactagtctgtatagttaagtattttagaaagtcacaggaaaagtaatttcaaaactgtcatttgatagtaactggagtgaatgctgggcatctctaatcctggtcttttgacagtacctcaaacacaacatgtcccaaatcaaaacaattatcttcccctatgatccctccctctgcctctccctctcaactcagtttttcttcttcagtttctagtagtatcactattaccaaatgttcaggctacataatatagggctatttccaaccatttcatccattcccaaaatcaattggtcattacctaatttgttgatctcatttgttaatctgtccctctacatattcaataaatatttattgatacctataatttgtgaggtactgggctagaaataaggaaataaaaataagatggtatttttattctaaatggtcacagtcttataagaagtcagacatgttaataaacagtcggtgatgtgctagtaactgtttaacagttttcaaaaaacaacaataaaaaacagatttgtattgtttgctcattttcatggtgtaaatattcctaccaaggcagagcatagaattggaaagtgatactaacaattagatcttgcaagctggtgcaagctgacttcaacacaacactctaaaagcactcacagtgtaacaagagctctactagagatatatgcaaagtgctataaggggagcacaaaagagggaactctagggtacccatgcaacgtttcacaggatcctcttggttctgtgaacttctttccattctgaactaaagctactactttagttcagcaaaatgcaattgagagtcagcatgatacaatttcttcctgactcaaacacctctgatgggcctccactgtttgtaagtccaacaattaataagtccaaaataagacacgacaattcaaggaactttttcatcttgcttgagctactctttcagcctcatcattccttcatacacttctacatgatttatgctttagaaaatatttagaagtgaaaaaggcagatgaaatttgacccaggataaaaaagagaacatacatatttgtcataacagtaaacctctttacaaaacttccattgagtcctgtgtattttctctgtgatattcaaaatccctgtcaaacagaatggggtgaagcttattaatactttcacatcttgccattatgtgtttatgctgtgctttcccttagcttgtttttcctcttcttttctggtcaatgaaactctaagactctagaaaaattgtcacttccatgaagcatttcttaatccatagctagagttaataaacctctgtgctacaaagggtattttagcacagtgatttatattgtaactaaaattttatgttgtctgtccctctgtaagagcacagatcagaactgtattattccctgctatatccagatgccaagaacagtgccaagtacataataggtgtcgaattgttcaattaatatttacttagcatgcaaaaacttagttgtgaatgtctcttcctagagttgataaatacattagaattagagattgtgtcttactcatcttagtatcccttacagcattcagtacctctgacacaaggaagtacttaatatatgatgtttgcattggactgaatcttctctaggcctttcaatcttctgagcattcaaaaactatacaccagtatttataaaatacacatatttttaaaaatatataagtagaaatgcaccaaacagattgaattgcaaaatgggtaaagatgaactctaggcaatacaggaagaccaaccagaatttacattggggaattgtaataaaattagagtatttctactgcaaaagggaagagatgtggctgcttctctaattgttgcttttaaatggtacttcattaggttgagaattgaaacctgagactcacacaaataacaaaatagcaccacggacaggattgcaggctctagacactattttgcaacttatttggacaggcttcataggaacacacaggctaaggatttgaatgctctattgctctgaggggtttgactatgtacaatatatttcatacttaagattcatttaaaaacctaaatttcagaacttgttattggtctattcagggattcaacttctttctggtttagtcttgggagggtgtatgtgtccaggaatttatccatttcctctagattttctagtttatttgagtagagatgtttacagtattctctgatggtagtttgtatttctgtgggattagtaggtgatatcccctttatcattttttattgtgtctatttgaatcttctttttttctttattagtctggctagcagtctattttgttaatctttccaaaaaccagctcctggattcactgattttttgaagggtttttcgtgtctctatctctttcagttctgctctgatcttagttatttcttgtcttctgctagcttttgtttgctcttgcttctctggtttttttaattgtgatgttagggtgtcaattttagatctttccagctttctgatgtgggcatttagtgctatcaatttccctctaaacactgttttagctgtgttgaagagattttggtatgctgtgtctttgttctcattggtttcaaagaacttatttatcttatttatttctgccttaattttgttatttacccagtagtcattcaggagcaggttgttcagtttccatgtagttgtgcagttttgagtgagtttcttaatcctgagttctaatttgatggcactgtggtctgagagactgttatgattttcgttcttctgcatttgctgaggagtgttttatgtataactatgtggtcaattttagaataagtgcgatgtgggtgctgagaagaatgatttcgggtggagagttctgtagatgtctattgggtctgcttggtccagagttgagttcaagtcctgaatatccttgttaattttctgtctcgttgatctgtctaatattgagagtagagtgttaaagtctcccactattattgtgtgggagtctaagtctctttgtaggtctctaagaacttgctttatgaatcttggtgctcctgtattgggtgcatatatatttaggatagttagctcttcttgctgcactgatctctttatcattatgtaatacccttctttgtcttttttgatctttgttggtttaaagtctgttttatcagagactaggattgcgaaccctgcttttttatttttttctttccatttgcttagtaaatattcctccatccctttattttgagactatgtgtgtctttgcatgtgagatgggtctcctgaatacagcacactgatgggtcttgactctttatccaatttgccagtctatgtcttttaattggggcatttagcccatttacatttaaggttaatattgttatgtgtgaatttgatcctgtcattagctagctggggtttttacccgttagttgatgcagctttttcatagtgtcagtggtctttaaaatttggtatgtttttgcagtggctggtactggtttttcctttccatatttagtgctttcttcaggagctcttgtaaggtaggcctggtggtgacaaaatctctcagcatttgcttgtctgaaaaggattttatttctccttcgcttatgaagcttagtttggctggatatgaaatcctgggttgaaaactcttttctttaagaatgttgaatattggcccctactctcttctggcttgtagggtttctgcagagagatctgctgttagtttgacaggcttccctttgttggtaacccgacctttctctctggctgcccttaaggtatattttgtacgaagttcatcttggagagtacatcagaaaataacagcttcaaagacaaatgtctataagtattttattgatggtttttgttttgctttgtttgaatgtgtgggtgttttatttcatggcatagggcaagcaactgatcacacctgcttattttataaatttcaggctaaagctgtacaatcatgatctatactacagagctttggaaacttgattgttcaatcacgtctatgcaacaaattattgggaatgagttcaggtcctgcctgggtactccctcattaggggtatccatccattcaattgaatgtccatgctattctgaatctccacaaagagcacacctggcttggctaagaggtgaagcacactgctctgcacttgcatgtggacatacaataaccacattccagctatttttcagaaagtttaactctgaacctattgtcattcggtattaatcaaaaccttgacttaaagaacaggtatagaagattgcttaagggaacacaacaaacacatcttttcctttaaaactctattcctatattgcaccagctgtgggatcagatcattttgacttctcatataattgttacacactgaggtgataccataagcatcttaaaaggaatattctaagaaactggtagttattgaggacagtgaatgctggatcacatagtgtcttcatttgagatccatgagggaattttctattaggtatcaggaaaagttgggctttttgtgagcaactaatttgcttgtcatggacactgtcagtcatataatttgattgggtggaagtctaaaagctgagtaataatgtggctacccataacaaaagtacaggatttcatggcatgcattttattgtttagagcctcatttgctctctgtcttgatttcctcattcactttattttattatattgcataaattttataaatggccttacatttttactaaaaaaggaagtttaaaataaataaatgaacacaacaatgacaatgttgtaaacttttacaaaaatgtagagttaacttatacatattaacaggtattttaactattatagtgttaggtaactacagatactttttgttacatgcactcttaaaacaatgaatgtttaataatcacaaaatcattattttcgcacaatttcaatttgctatttaaacttataaaatacttgtaaaaatttttgctttattcaataaactgtatcaatgcaagtcctactttaaaatcagtgctgtgggctcatgtaattcatttattttaaaaatataatcatttttctattgaattcagctttcgcaacaggataaagagcaagttttgaaacacaacaaattagcatactatcaagatttgttagccctggtactccttagactaatatagatagaaagagttaaccagtttttcttttcttatattatttctgattggcctgactctgagtacactatgcttaacaaataaaattctctgcatatgaaacaaagacttaaaaagacaaattactgttttggcaaatattcattctcaattaaaattcatgtgagttgcttcatgtactgtttgtacaactaatgtctcaaatgtgacatgactataacagaactatggcagtgtaagctggtaagtcaagttgataaatgctgttcattgcaatgcctactgtttatgaactcctcaggttaattcgtgttccaaatattaagtagctcttttgtatattaatgtacgtcaggagccaacaaaagttttgctattgagagaaaataattttcaaaagaaactatgaaataatataagtcaaagttctattaaactacttctgtcgttttagaaagggcaagatgaaacaaattataaatgaacatcttttatcctctgacctagcaattttacctctagaaattagttccaaggtaaaaacttgtacaaacatttatgtataagtctggtctctgcaacatcctcttatataaaaattagaaaaaaatcaacagtaggggaatggttagttaatccatatgctggaacactatgcagctgttaacaaccatgttatggaaatatatttaatgatattagagaagaccacaatatattttttaatttaaaaaggatgttacaaagtagtaatgattatataatcttaattttatttttataatatatatataaaaagacaatggtttgaggtcaggtcaaaatgtttattttacagtgtttatttctgagaagtaggcaaacaagaatagttttaaaatttttagtctattaggtcttgactcttttccataatttttcttcttttttttttggaggtggaataggggtaataaacatggactactttagtaattaggaagaaaacaatgaaagtgttatttttataacttacatttaaaaatgtttgattttaatactcacggaacagagatgtcttctttagtttgcctaaattcacttgtgagaaattggagatttgggggtctggggagagaggcaatataaaaaaagtgtaggttgactcatactaaaataaatatggcatttatcacaggaaggaagcaagtgaactgtttcttttttttttttttttttttttttttttttttgagacggagtctcgctctgtcgcccaggctggagtgcagtggcgggatctcggctcactgcaagctccgcctcccgggttcacgccattctcctgcctcagcctcccgagtagctgggactacaggcgcccgccactacgcccggctaattttttgtatttttagtagagacagggtttcaccgttttagccgggatggtctcgatctcctgacctcgtgatccacccgcctcggcctcccaaagtgctgggattacaggcgtgagccaccgcgcccggccgcaagtgaactgtttctaagaaaacaaccagaaaaatggtgaagtgctatttagacacttcagtgttggcaatcaaggtttgaagtaagcataatttcccaggattacccttaacgtgttttctatttggggatataaagcgaatcaacaatgcactcttcctctgcaataaggagcatgggtttgttggttgccattaaagcctgaggactcagactcattgcttgttgataactattattgctccatttttgagttccatcaaacaagagaaaaaaagtctttacagagtttatactgaggatatgcgtaattcttgaccctgaaatgtgatacctatagaatctaagagtttactgggaaaaccatctgctccgcaaagctaggtgtcccaaataagagaaaagttagaaaaagtttgtattatttacgtgactagaaatgtgttataaagacttttgcttttcagcctgaatctagtgaagacagaagtagaagttattcacgtataatctcatccagtctggtattaatgaaaatggataagctaaagtccattcctattgatcagatggagaaatcagaaaaaaagatatctaacatcttcaatcattcagcgtattttttcaatcaatatctcagttcagtcttagtgctatttgcatattacataaaaatgcagcacttaacaaatttaaatctcttatcctttttctgaaaaaaaaaatggcatcatcaataaacatttgctgaaggtttgacagacactggtcactcagaatgtggtctgtggtccagctgcatcacatcacatgggagtctgtcataaatgtagaatctcaggccccaccccagaccagctgaatcacaattttcaattcaacaagatccccaggtgttttctatgcacagtacatggatgtttgagaagcactgttttaagagcatttttcaagtattggagataccaaaaaggtgtaaagagacttctctagttagttcctagactaggaagtaaatatacataaaagataaactatacaagaagcatatgacaactgccaggtgagaggtgtagacaattaacggcataggagtttgaaggaaggcaaaggtcactcaagattggggcagctggagacatcttaaaggaaagacagtatagctggccctctgtatccgcagattctgtatccgtgaacacaaacaatctgggatcaaaaaatattttgaaaaaaaattgcacctatacagaacatatacaaactttttttcttattattccctgaacaatatagtataacaaaatttacatagcatttacattgtattaggtataagtaaactagagatgataaaggaagatgtgcatagatcatatgcaattactacactattttatatcagggacttgagcatctcagattttgatatctgaggggtcctggaaccaatctccctcaaataccgaggagtactttacttggaaaataagaaaaaagggagtatggtaatactcaaccctcctttgcataagtttactctgtaacagttctgtaaattttatatacctagagctcttggtatggttattgtgtggagaaaaactatttggtctgaacaacttagttatggtaacttgaaaacagtatgcatgatgtacaaatatacagccttctgtgaataaggccaggctgttttccccaaactgtgtgtatttcattttttaaacaaatatattaaatttaggatttatttagaatgcaggaaaactcctttttgaagcactcctgaaaggaattcttttggaaaatatagaattattttataatatgaatagtcaattcctgaaatatatataccgtgagttaatattttcattatatttcaattaagtgcttttaaaaagatcatgcttggccaggtgcagtagttcatacctgtaatcccaacattttgggagctgaggcaggaggatcacttaaggccaggagtttgagaccagcctgggcaatacagtgagaccccatctccacaaataataataataataaagatcatgcttgtacatacttactatctggagctaatggttattgttttgctacagtgtcactaaacaaaaatcaacatacaaaggtgaaagggtggcacatgtctgctgattacatttaagggcccccaaagtctctctttttgtccttgcaagtggtaggattgtttcactgcgatataaataaaacgccttagtaattacatcctgagaacaccatggctcagtactattcatgccaacttaactgaactgaaacatggcactggtgtcagtggcttttacttattgatggatttgtaaggtggcaggctctttcatgtccaaaagcggtagtttcccagggtctcaagaagatttaaaaatattttccttccatcacaacacaaagcctactgactttaagtaatgctgctgagggttaacatttgaaactgacaagcagcacatgtgtattacagagataaggcctggcacatgttgctgcagcctcctgagattttgaaatgctagcagctccagctggtggctatgctccattcctaatgtgcactttttagggaaacttgagcccctccttctgactgtgatagggacatgtctgattggaatagggttatttttaaagatattcagaacaacgaacatatttattctaagaataaaaagagagtggaaagaaataaaagaggtaaaatgttaagctgagatcttaaagaaaacagtatcacttgttaaaaaaaaagaaaaatagtgaatgcagccaaagagcagttaaaaaaaaatcactagggaagaatagttttaaaaagaaaaaagaaaaaatgaaggaactgaaaggcactttttatgagaatcattcagataaacatactgaaaaatagcgaggcaaaaaagactgatacaaggagtagggaaatgaaaatgagttaaggaatggggaaacaaaaaccagttgaattccaaaatgaaataaaaacatagagattaaaaaaagaaaaagtacactatggaagaagacagctatcaaaatttctcaatccctatgggggctaaggtggcacacatggaatggaaggcaagggacaagaaggtgggtttggaagtagacagggcgacatagttctgtttaaataatattgataggagcccactggtctggactgaactccttcctgcaaaaggcccaacacaccaaaccaaaatggagtcacagatggtaaagttccatgttaccaagccaaaactcagtttatctgactttctgagagatcaggagagtgagagataatagcaaaatcttcaagttttagctggcatgataagaaaatcctctctgctttaacctttacaaggaaattaattttgaaataaccaacccactttttgttttctgtttctgctttcctcagtccttttgtgactataaaaccaactgctcagcttattggggcactcattctattttacagaatgaggtgttgcccaattctagtatcacaaataaaagtcaattaagatctttaaactaaatttgttgtaattttgtcttttgacaattcttagctgtaatagaagatgctaaggccagagaagcaggcaaagtcaaaactaaattcaaaatgttaggggcagagtcagaaaaagtacctaatccaaaaggatacttaggcaaatatcctcaaagagttaaaattccatgggtgacagtttcatgattggttactgaagttaactggaatattatacaactaatcttttgaggttggtgtttagaatgttaccactctcatctacaacatatatattagtactattatcacagacagaaatcatggagaacagaccagagactaactcagcagcagaattatattcttaaatgctttaagggcattcaaaacatgttttttgcattatatgcaattataatttggaaatatattcttgacattataaaacacaaacaattcaagatggaaccaggtagaacagagttaagatgctggctttttaataagaatatgtcttttggaaacaataaaaagatacttttaaaattctttaattttattttagagacaacaatcttgctctgtcacccaggcacaatcatagctcactgcagcctcaaactcctgagctcaagggatcctcccacctcagcttcctgagtcgctgggactacaggcatgtgccaccacacctggcttatttatttatctacttatttatttatttttatatttatttttcccagctggttttgaattcctggcctcaagtgatcctcccatctcagccttccaaagtactgggattataggcatgagccactatgtctggtcaaaagatacttttttaaaaaggttttaaaattaggttctttgagcctcatttctccaactataagatgaacatcagaaagtttaccttgaagggaactgaggattagagcaaatcgttatcaagtttctgggtcattaactggatatagcagtcataacaaatagttcatgagatgtgtatttaaacaatacagaatggacatttaattcatcttttactaacactcattctctcaaaaatatatactgagttcttactatgtaccagacacttttctgaatatatcagtgaaaaaccaaaaatcctttccttccaagagcttgcatgctagtgaaaggaaacaaaaaataagtgtgttcaatagtaaatggtatagtatgtttagaagctaatacttacttgttacagaagaaagtaaaaccaaatatagtaggataagtaattgagtgttaggctgttacaactataaatgtgggtgggaaaaggtaggctttgatctctttgagaatgagatattcaagcacaaatactactaagcacaaataactgaggtaactaagtaccaatttggatttctgcgaataaattgtggatgatatatggatggtgtttcattgttgttactgttatccaaaggcataagaaagctaaatttgctggaagaatcttatcttgaaatattcttacaactatattctattcttcatgctattcttaacttctctttggcctatcacagaacagtatttgtttaaagcgcaaccatttcttttgaccatgtagcagcagcactcattaatgccatgttcaaggttatcaatcttcagacaggcttccttctcaaagcactccccatctctcatattgcttccttattctcacagtacttattttactcatttgttgtctgtctttctattagaacaaaaactttgtgagaaaagggatttttttgtgccattactgcagtatccgcatgcttggcattgtctgacacataaaaagcacttgatacatggttgaataaataaaagcggtaagtaagaattagttttagaaaagaaccacagtgtagaaaatcattaggatactttcacaattaataaaggcttgaaatttagagatttaatatttgcaacttcaactacttaagagaaattctaaaagtatgtgatgtgcactaatttgtaatactgcagaggctggtgagtgggagcaaatcactcagctagtgagtgcatcctaccaagctgctcacataacatgaggctctgtcattctctactgacgactgagcatacggctacgcagcaagttatttgctagaatggtatgaaaactggagattcaagatcccaggatgcagtcctcttgtatataaaagcctttgatatacttgttataattagagaaaatattttatataataagatgctgattcctaatctaacagtatagaggtagcctgatagagtagccagagtacagaacggggttaggaaatttgtgcagatttgtcttaagctgagtgagtgacctggacagatcacttcatgttttcatgattctgttttttcatagataaaatggagttacaataatataagtaaataagagtacctatatttcaccatattagccttaggaccaaaatgaaatgttctatatttaactgctttataaattgaaaaagatttttggaaaaatataatacttgtcaaaataaaaactatgcttttagattttatttagaaaaatttcaggtttatgaaatttatttatgaaatttctattcatattcatatttaagtgtgtaattctggatgattcatttctgatgtctagttagctctataatcatgactaaaaactgtgtattaattaaaaactactctgtgtgtgtgtgtgtattcttagatgtcaacattctctaggagaaaaataagacaaaacaagaaaatacctaaagatcaaatgtacacatggcacaaagatagacatatggattaatggaatagaattgagagctcagaaataaatatatacatccactttcaactgattttcaacaaagttgccaaggccaaccaatgggggaaataataatcttttcaacaaataatgtttcaacagctggatagcaatgtgcaaaaaaatgaagttcaatccttacctcacaccatatacaaaaattcactcaaaatgaataaaaggcctaaaagcaagacctacaattttagaactcttagaagacaacataggagtaaaacctttatgatgctggctttgacaaaggattctcagatatgacaccaaaagtataagcaataaaagcaaaaaatagataaattagacttaatctaagttaaaaaacttcctgcttcaaaggacaccaacaagaaaagtaacagacagcccacagaatgggagaaaatatttgcaaattatatctctgataagggacttttattgataacatataactcttacaagtcaataataaaaatgacttaatttaaaaataggcaaagaactgaataggtatttctccatggaagatatacaaatggccaataagcacataaaaagatactcgatatcactagtcaatagggaaatgcaaattaaaaccacaatcagacatcacttcacacccactgagatggctagaattaaaaagtcatactaacatatactggtgagaatatggagaagtgagaaccctcaaatactgctagtggtaatgtaaaatggtaaatggtgcagccattttggaaaaaactctactagtttttcaaatgattaaacacagttaccatataactcagcaatactactattaagaatatactcaagataactgaaaacatatattcccacaaaaacttgtacacagtgtttacagcagcatcagtcataatagccaaaagatagaaacaacccaaacgtctatcatttgatgaaagaataaacaaaatctggtatatccatacaatggattatgatttagccataaaaaggaataaagtactgaatgcatgatacaatgtggatgaaccttaaaaatattatgctacatgaaaaaggccagtcatgaaagaccacatattatatgatctcattcatatgaaatgtccagaacaggaaaatctatagagatagaaagtagattagtgattgcctagggctgagggtgaggtgggaagtaggcaaatgatagccaaaaggtatagggcttgtttttgaagtgatgaaaatattctaaaattgtggtgatggaaaccactgagctatatgtttttaaacaagtgaatcatattggtatgtgaattacacctcaataaagctgttaaaaatcacatgtatagaccttgctcaatttttacacaaagattttcttattttcctttttaaaaagacttctctgaaagaattaaattaccagacaggccacctaggtaattataaaacaaaaaagatgttcttacattgacttgtatttcgatttcataaaatgtgactaataataataataatacttaaacgtacttaaagctacatgtgtctacatcatattatgtctatttttcatttatcacaaataaggccactgaaccttgaaaccttggccagtatcatactgtttaagagtgcagagtatcattaaatagtgataattataataacctctattacaagagtgacaataatgttagctaacacttattaagtattcactatgttctagaaagtttacataaattatctcacttattcttcacaataataattccatgaggtagatatcattattattacaattttacaaatgaagaaactaaagttttcaaaggataccacacttgccaagagcaaagctactgagtggtggaggtaggatttgaacttagatagataacagaacccagggtcttttttattattattattattattattattattattattattattatttttaaattgagatggagcctcactatgttgcccaagctggtctcaaactcctgggctcaagtgatcctcccgcctcagcctcccaagtagctgagtctaaagtgtatttcaccatgcccaacagcacccagggtcttaaccactttgctatacttgttggttcctattgtctacaaaaataaaaatcatgtaccacatttcccagagctgcaactttcaaaactgcacattataactctaagccatataaaggtaaaaggaaaaggtataattcaccaaaagtactaaaagtttactcagccaaaattcagaattttagagttggaaggagaagcataaatcatttagtttgatgacaacttagtgcaaatgataaaactgaaagactttggcctaactcttcaggttttaggaaataaaggaaattcaatgatgatgagttttccacaggtatgactgatatagaacttattaattcattattaattcattcacctattcattagttatttttcatctcagtcaacaaatatatactgaaagtcaactacacaccaagcaccctgctaggttacaaactccagaaagtaaaaaatgagtatgacggtcccattcttcaaggggcttatggtctggactggtgggggtgggggaaaaggtgtaaaataagaattcttattttatatatcactatataacgtgataagcaatactcaataaacatggcagggagttattctgttggaaacatccgggagggctttaccaagaatatcattaaattaagagataagcaattatttccaagaagatatcttccctccaggaagagggtagaggaatttagccttgagtggttggaaattcaagtcatttagaattgcttggagcatagccagtgagggtaagagactgtgttaagcacatctttttattctgatgttttaacatctggggccttattgaccctgaggagactgtccctcccaaggccagccatcttctagagataataaagggctcccctgtgagattgcctttcatatgcaaaccaaccaggtcagaccccatccactccaacctcctctatcaggctcttacaatctggatcaatattcccctgccctaatttcctcagggacagggtcagacaacttagaacagccctgtacaccctacagtccactgaaattattcaaactagccaatcctgaacttgttagcccttcctcacccattccttcccaaggaaatcacaatagaagctcttgcccatatttccccctattcttctgtttcctgacccaccctcatgtttccctgtgtggccctgcatgtgcagtgtgcactgtcctcttggggattgtagctatcttttcaatggcaatcatctgatgcattggcctcaccatccctgaatgataataaaactgacattataaacaaagattcaagcctgggtgccatggctcacatctgtaatcccagcactttggaaggctgagacaggaggatcccttgaactcaggagtttgagaccagcctgggcaacatagagagaccctatcgctacaaaaatttaaaacatgggccaggtgtggcggcacgcacttgtagtcccagctacttggcaggctgaggcaggaggatcacttgagtctaggaggtagaggctgtagcaagctatgataatatcactgcactccagcctgggtgacagagcgagactgtctcaataaataaataaataaataaaacaaagattcagtaaattctgctacatagacagaaaggggcaagaccatgtaaagtgttgtctgaggagttttaactactcaggagacattgggagccacagaacagtgttaagcaggggcataatatgactagatttacattttaaaaagattactcaggcagcagtgtggttacagaattgcagtgaagtaattctgaaggtatggagactaattaggaggttatggtataaaacagtcgggaagtgatgaaaatctcaattaaggtaggggaactggaaatggacagaaaggaatatttacgagatggtgagaaggtatcttgaaggacttgattgactataatgggttggggaaaggcaaaagcaaagacacacttcaaggtttctggcttagctgactgtggctggtaatgaatttatggagataagaaaagaagcacagaagcaagtttgcaaggaaggagaatgggatctgcttgcctgtaggattgttcttgtagagatactaatagccagttagaaacatggatctggtgctcaggaggtgttcttagactggaaacaagatttgagagttaccagcctactggtggtggttaaggtcataaaagtggatagaattatcaaaggaagacatgcagaaaaatatcaaagttcaggttgaaaacagaattccaagaaacaccacaacttaaaaggcaggtagggaaatggtgtttgcaaaagaaaatggatgtggtaagataatctggggagtctggcagcagcagcagcaacaatggcataatcatcaccatcatcaccagatggctaatatttcttcagcattactatgtttcccacattatgtcatgtgttttacatgtatagttcatttgctgcacatagtaactgatagtttggatatttgtccctgcccaaatctcatattgaattgtaatctccagtgctggaggtgaggtctggtaggaggtgtttgaatcatgggggcagatccctcatgaatggcttgggccatccctttggtgataagtgagctctcactctgagttcaaaggcgatctggtggtttaacagtgtatggcacccccctccccaccaccaactcctttgcttgctcctgcttttgccatgtgacatgcctgctcttgctttgccttttgacataacagtaagcttcctgatgcctccctataaaaccatgagccaattaaatctcttatttataaattacccagtctcacgtatttctttatagtaatgtaagaacagcctaacacagtaactcagtgaggtttaagagatgatgacataggcctacagaagttaagtaaggcctataaaattgttctcctttgcaatctctctaaagcatggcttcttaaactgctataatgtgtccattgaagaatgatgaggttaataactttgaaaaggagagcttatttctcattaagggttgtagtctgaagggtggccataccaacaggctaggaagcataatctctggccagaagccagaaacatgcaattggagggaggggtaaagggaacagaaatttatgctgagcagtttggctaagtataaatattcaatgggttataggaggagctatgaatattcatgaagtaatggcatgggtatgcacagtaggccaatgtgtatgaaacatgtgtcccattgagagaagagaaaggaagaagctggtcaggcaggcgggcagggagggtgggtcctcagttgaatcctttcaaacaaaagaacagcctgcaggcacaggtaagggaactgcacaggatggcttgcctaagacatgcccacagccccactgataagaaaggctacacaagtgacttgcccagtcaggcttgcaatggaaaattccatcccctgacacatgtgcagtaaggggaacaaagaaatatggagtaagtcaagctaaagcctgtatgcacattaggaggatgagctggagctaccagaaattcatgccttatgcaaatgagacacccagccctcaatgttttcttataaaagtctttgtattcaactgtacaaatggtaaccctcttctgggccctctctccctgtcagagagctttcttcttgtgcttattaaactttcactccaacctcactctttgtgtccacgctccttaattctcttgattgtgagacaaagaattctgggtgatacctcacaatgagagactgctacactgtggtgcactggtgagactgcaacaccatgttcactctagggtgaagatttaacatttgaatgtattacaattaggccttataaatcaaaaggtaaagcagaggacataaaagccctctgtgctcagtctccgtagaatggccagaaccattctgtggttggtggtctctaatcaggaaggaatgctggtgggttgccctgtcaaaactacagaagggagggcagcaatggtttatatggttgatatcagcagtggagcaagtttttcaaaatggctagtttctctttaacccttagggaaggctaatgatggttagcaaaggagtaggtataatgagatgtgtctgatcccgcatcccctcatggctgggaactcgtttattttcgtgttttgtttttgagacagggtcttgctctgtcaaccaggctggagtgcagtagtttgatcaaagctcagtgcagccttgacctcctggactcaagtgatcttccttcctcagtctcccaagtagctgggactacaggtatgcaccaccatgcctggttaatttttcagtttttgaaaagacaagatctcacaatgttgcccagttttgtcttgaactcctggcttcaagcagtcctcccaccttagcatcccaaagtgctgggattgcaggagtgagtcaccacaccaggccagggaatttagcttttaaggtttctctggggtccccttgtccaagtgagggatctgttcagtcagtagggagcttgggattttatttttatttctcaaatgcctcagtactggctgcctctcctcctaaactttcactcaatccatactagatattgtcacataactcttactttgatcacatgacagtgctactttgtcagtaaccttcaatggtttttcatgtttattaagtaacaaaattcccagccttggactcattatgatgctaatatctctctagctttattgtctactattatactatatccaatgcttcaaactaaattactcagccttgcaatctcaatgcctatgtgacataatctctcattttaaaagtacagattcccatttcagattatagaaattctaagtattccacagggttcaccttctttcagatgtcgcactctctcggaaaccttacgcacttactccagagatgtaagcactttccttgaaaatcttattcacaacctgtatctctcttaaagcatttatcttactgtcagatttattttgccattgtctgtaaacttatcttttcttacaacagtttgcaagcaaaatctagtaatgccttgactaccactacatttcaataaataattattgactcaattttattcaattttgaactcttatcaaagctctcaaatttgctatctgtgttctttgggcaagcttagtatctttacagatggtgtaattccattggaagtttcttttctttcttgaaggtcataaaacaaggatggcccaacatctcatactgaaaacagttttccatctaattttttgatcaactataagattattctataagaccaaagcaggaagcctataaatatatatttactattgtcacactaataattagtctagcaaaatagtatgcttatgttattgttctttaggataaactgacaatgtaatgttgcagtttacttaaaaaacaatacttactattataaccacacttttagttttttcatttactaattcactactttctataatcagagtcagtgtcaattgttttcccatgatcttatgtaatttgagctttagcaccatcatcacatatatgtatgaaaagaataaggttccagatctaaaggcaacatctggtgcttcctttcctcaattactctcctaaaatcaagacataggaacaaggttgcccaaaactcattcaagtcttcccatcttgcccattatgtgtcaaatagttgtgtggtaccctcacagcatgtatcctaggctctgagaaaagtaagaaaaatccatatttatggaatattctaagaagtttgcccatattagctgatataatcctcacaaccggcttattctttttccgttttattggtgaagaaacagattatattttacagatgaagaatctcaggcggcctggctctagagcccactgcaaagcaccacatgtcaagtactggcattcattattcattcttcctgcttctgctccggccccactttgtctattcaccacatggaagccagcattattgtgttaaaacatgttaggttatgttggtcctctgctcaaactctgcaatggtccccttcttactcagagtaaaagctaaagtattttcagcagctttccacgctctatgtgatcttctttcccatcctgtatctctttgacctcacctcacacattcactccactctggccacactgtcctcctgacttcttccaatatactaagcatactccagctttggcacttgctgttcctccagcctggattgctaggtgactgtcaccctcatctccttcaagtctgtatccaatgttaacttttaaatgcagccttctctgtccattctacttaaaaactataaatccctcccttttctggaaaaccctatttccctcccctgctttattttcccctacacacttaccatcatattatatattttacttatttattccgctcctgatctgtttccccccaactagaacgtcctctgtgaagatagattttattgtttgttcttttgccactgtatttctactgtatctagaatagtacttagtatgtagtaagtccccagaaaatatttgatgaattaactaattaattaattcaaatatctatatggaagttggagctgatgttgagagactgaaaaagaatggatggctacaagtcttacaaggaggaatacctcagaggcctggaacacggagggtagggaggattaatactaggacaaggaataaaaaggaagaagctgtcttgggttaatgcttggtcttcaactccagggattcttatttgacctttgtgtatcttcctttaggactagggttcataattttgtcttatgcaaagacaaagttaagaacctcttttggcagcctgatggagcctatgaacccttctcaaagcaatgtttttaaatgcataaaatacatagaattgcaggaaattaattactctaaaataaaattatcagaatattttatattttgtgatataatgtacatatttattaaaatgtagcagctgatttaataactcttataattttaaaatagcaatgactgtaaatgatgttttaagatatgtacaattgtaatgcaatgtgaaaatgtttgcaatttctggtggttgctaagttaactactatattaacacatagctataacagtgattagttgtttatatttatggaattctaatattcagtcagatattagtgaaaataaacacgattctttttttctcatccaagttcacagaccccttgtcttagtccgtttgcattgctataaagaaacatctgaggataggtaatttataaggaaaagaggtttatttggctcatggttctgcaggctataccagaagcatggtaccagcatctgcttctgatgagggcctcaggctgtttctactcatggtggaaggtgaaggggaagtggcatgcagagatcacagggtaagggtggaagcaagaggaagaagggaacgatgccaggctctttttaacaaacagttctcaaggaaactaacacagtgagaactcagtcattaccctgaggatgccaccaagccattcatgagggatctgcccccaggacccaaatgcctcccactaggccctacctccaatgctgagaatcacatttcaatatgagatttgggggagtcaagcaaaccaaactagagcacccctgaattctattcccaaaagccataggggtctgtagacatcaggataagaaccttgctctaggattagtctcagggtacacccaagggggaagaggatcaaaattaactacaccttcactatcacagaagcagaaggaaaaaaagagacaacaaagaaaaacaaaacaaaatgatttttttccaaattcctttaactaaaggcaatctttttcaccttataactagaaaatagtctgaaaaatgcaagtatttatgagttttggtgtatcagtatgaataagctttaataacaggacaatgttactttctaacattgatgagaaattcaaaagcaggaaagcatagaagcctccaaatcagtgcaaagatctgatgcggtggggaagggagggtgctggagtgagtagtctggaaataaagaaaacaaaataatgaaggctagatttatggagtcctgtttatcttttttctcttccctaaaaagtaaaagctatgtttcaaagttctttatgttctcttcaaggtccctgaaagcagcttagcaagaattatggtcaggaatttctccttatcctggttgtcatctgtaacttttggcaacaaaattggaaaatacttcataccagatgccctcttttggagattcacaatgcatgtcagcatttgacatgttctagagtcctttagtacacaaatctgcttaacttcatttaaaccagtatttctcaatcttatttgatcgtaaatttttttccatttaatatatgtctattattgcaattataagactttattgcaattattgacaatacaattcttttcttcaactaggacataaattcctctggctcagcaaaggtgtcttgttcatgttttcattgctagtactaagaactattaatacttcatatgcactttgaaagtctgtaaatgtttggttggttagtggttggtgggttggctgactgaataaatgaataaatcagagacaaaaatacttcaggccaactttactgtgtatattatctctgtaacatgtcaggaacctttagaagccttttgaagtaagtttaacagtgaaaaggataacaaagaaaaaatggctgttaacagctaactccccagtggaaatctacatacatacttatgtttaaaccaaaataatagtaaaactttccagaagaaaggtatatttctattctaatcatttctgtagctctgaaagtagagattatagtgttaataattcaaagagccatttcatttgcattctgtgtagtaataagtgtaacatctcagcaagtgtcacaattcctagaagtaaattatgttaattaattagtaggaaggcttaaaggccaaaactggaaataatcccaaaaagtctctaaatgttgcctttaattacttagatcaagtttatgggtgataataaagtaatacaaagatccatagatttacaggtttggaaaaatacatatatattggttggatttcgatcctgtaaggttataaagaatgtgtttccatagtccatctgtttttagattttagtcaattaattccatccacacatgaatctccacagcagaactaataagaaagcaacatctgctggttatagtagggtgaaatatagcattttttgtttttacaaaacttgagtttttaaaaaatctacaaaattaaaattaacactgaaggagcagcataagacctcattattgccacaccactactttaagaacaaaaccagacatactcaagacctttttcatcaaagactagggggttccaaatttactaaaacctaatagatgccaaagttaaaatagtttaaattcaagattgcatgcatttttgctatttctacctcctgcttttgagagtaaaagctatttatatgtacgtgatatttaaatctctggaaaagctccagagaaacattgaaacaatgaataaaggctttggtgttttaattactgttactgtatatattccaaaataaaacaaacatttctatcaagaatttcttcatctatagtaaataaactatgtacttgcttgtgcccatgtccaaattaccaagttcttccagttctccttccaaaatatatttcaaaaccttccactgttaccatccaagcccaaggtcccattatttctagtccgatttcctttattttcctccaacaaattttccacatcatagccacagagctttttaaaaatacaacctagatgtcattaattctttatttaaattttccatggagcttcctgttgcactcagagtaaatataaactagttaatgtggccttcatactctggcctaagcaatctctttagttaccttgtaggctactttcctctttgcattgtaggctagagccaaattagacttccttgaattcctagaatatgctaggttctccccagatttagggcctctacaggcttcagaataaatgaaaatctttcaggaattcctctacttcagctaagctagagcctcctgttattaatataatttcttgcacaattatcagattcttctaaaagacttggcatagttgtaatatatacaactatgtaatcatttgtttaataacaatattcctcactagactataaattccatgtggacagagccaatgtctatcatgctcagtcctcaatacccaacacccacagtgtatttaataattttagtcaaataaaactgagtaaatctcaatctaacaaaaatggaggtaaaagggcaaaaatcccttaaagtgaaatttatttctagtttacccaagtctgtataccacagggaatctctgagagttttattcctaagacttttctatattctccactacactagaagatatgcctgaatatatgaaagtattgttgatattattccaattattgcttgagactgaagcctccattccagaaatgtatgtgtcaacctagaacctagagagcatcccaatgcttggttcctaagtgaggtaatagtaaacattatcgtggcaaaataattctgtatcagatgtgttggtgccccgtgggggttggaacattggtattcatctagaaactatgttctaagtttgttgtttagatagtccttctgtggtagtttcagatgctctagaacaaatcattcataatatttaaatacacacacacacacacactccatcagaataaaggagtacactgtaaatgcaatgtgccaaaacaagaacaatatgttactacaaaatgacagttactacaaatttgccagttacgtcataatcacaaataaaatggggaaaaaagaaagcaggggatggggaggaggttctgtaatcagaggcaatataatacctctagagaatcacacactgaacaattatcagctaccctgccccagtcgttctctcccgtttctgcttcattcccctggcctcatcggggcttccttcccctttgtttgcaggccacattaaataagacttttaggtatattccaggtcacgggactatcatattcctaccatagtctattgaatccctcatatagatcataagctctttttttttttaatttttcttttgcaagctccagttcagctccagatcattagttctttcagatcaaagaacatatctcatgttttccctttcttttttaaattccagtttatcaaagcataatgttttgcttggaagactgtatgagaggatacaattaccatatttggtgaactatatgatgaagtaatatttaaaataaatctggaaacataataaacatttttgtaaaataatttaccacagcactatttatcatgtatctgttaaaaatgctgtttaaatggttttataggggaaaacattattttgttcctatatttacagtatgtcatacctaggaggctgagatagtataaagttctttttgcctttaatccaatcagttaacgtttctctgggttttgactttctatccataatacaagtaatcatgatataggaaatataaggtaaaaactgtcatctatcttgttgcttttggatcagcttacagctaaatcacctggaaaaaatattatgcaatctctacttttaaaacttaacagagaatacttttctatttaattttcaaaagtcattagatttgcacatgttttatgccctggtaatattgtgataggatcacgaacatgtaataaaacaatatgatataatggttaaaggcatgaagttgagagcaacaatgtgaagatttgaatcccagttatgatacttaatggcaggaacaaccagaaaagagaaaaatcttcatttaaaaaatttagttaaaaaatccacgcattacaagaaaaggatatataaaattccaaacctctgacttgtaaatttgaattacatcttctgctttttcaggaaaagattgccgttgattcaatactattatatttgaataaaattttaattttcatagaaaaatatgatacaatattgttttatacagtagtttaatgtcaactgctgtttgttactctcttactaggttgcaatgtttcttctttttatattcacagagagagtaattattttcaacaaatttggggattgagcattatttaacaccaaagcaaaagaaatccaagacacacagttattctgaaatctaagtattttctagtatgtaatttttactaattgtattaaacccctttcagccacctcctcttcaagagaaattcttttctttagccagaatattttattaaatgaaaatatttattttaaaaattagttgctatttactttgctatttacttaataaatttgttttacttaataactttacttaataaattatttaataaattgctattaaatacttttaaaaaagtcatttaaattcattgttaaaaaacatagaaaatatagtcaatccccactgtttgtggattccatgtttgtgaatttacctactcactgaaatttatttgtaaccccaaaatcaatattaatagcacatgtatggccattggtagacatgtgcagagcagcaaaaatttgagtcactcaaatgagtactcatgagtactcccaaatgagggtgaacaaggtgacactctctgccttcttattttaactctcacacttcacactttaaaacaaatgtccttttttttttttttttttttaagtcaaggtcttgctctgttgccctagctggagtgtagtggtactgtcatggcccactgcagcctttaagtcctgggctcaagtgattcttccatcttagcctcttgagtactgagtagctaggactacaggcacaggccatcatgcccagctaaggtttttttgtttttgttttcgttttaaatatttttagagacagggtctcactatgttacacaagttggtctcaaactcctggcttcaagtgatcctcccacctcatcctcccaagttgctgggattataggtgtgagccactatacctggctataggtgtcctttttgcagtgtacttggtgttacattttttgcatttttgtattttctgttggtgactttactatttaaaacagttcctgagcatagtgccgaagagctgtcaagagtcctaagtataacagtgctgtgatgtgccttataaagaaaatatatatgtaatgcaggcatcattcaggcatgagttacagtcatgctggccatgagttcaatgttactagatcaacgatatttatttagtgtctttaaacagaaatacacacaaaacaaggttatatattgatcattaatatatttgttgtgaccacaggctcacaggaacctaactctgtatttctcctaggaacaatagttcagtattcaccaagtcagtgttcatggtaactttatagaacttaactactgtaaataatgagaatgaactgcacaggagtaaaaaaaaaaatctcacccatagtactacagcctcgagtacctcttccaccacatggttgccaatgctggattttatctatttttttaaattttgccaacctcactggtttaaaaagttgtattattcccctttaatatgcatttccctgatcaataaggctgaacatatatgaaataggcatctttcctgtgtatcactccccattaattttttctcttttttgtctttcttaagtacagaattataaccaactaatctttaaacatgccaaatgctaaaggaaggaagagaacaagaactgaaaaattttcctggtctttagctggttgattgtccaaagagatttgggtcagtgtttagctctggccaaaagagacccatcctggtcagacagcagttgagctgtctcataaaaacaataatcttgggaaaaaatataaaaataaaataaataaataaatatatatatatatacacacaaacatacacacacatacagggtgtaagcttgttaagctaatttccagttaataggtgctccagattacccagtgctatacattcattctctttgtaatacatattgattggtggtaatgagcccacagatgtccacagcagtaagctttctagtatgtacaagcatatcttttgaagatctatacagttaattatactgatcttggaatttcaaaagtgaattatgagaaaggaaaaccttagtcctcttcaggctttgtagtttaggggacaaaccaagtataaagaatgagaaagtgctcttcaagataaaacgtaggaagacatgttagaagcaagtggtttggaaagggagcttatatcatggattaaaattagatgagtagacatccaagaaaaaagtctcaatattgatctccattgttagcccctttgaaaagactggtctttcctttcctaacctgctctctgagcctgctgaagaaaagaagggaacagccttgtttgaaacatgactatagaacccgtgtggctcttctgagtcccctgagttcctttattgatttcaaaaccatgaaggcttttgtttgaatttttgccatttcaaaaaatgataataggtccaagttattgttaaattctcataagaacatcaaacattttctgactagaagacactaaacatctggtataatttgcttcttaggataactttatttaaaaagagaggaaagagaaaagaaaaaggctttgtaactttctccaggaccatgtcaagaaacaaaggtattgataatgcaggatattttcttgatcccttcatgagacccatgacagcggtgccccatttactcagcctgccatgctcaatgccttgtgggagggcatgcgtaggtgagcaaatgcaggaaccagctggccactttggcaccggcagaagcaaactccatgcaggccctgtggcagcatccaagtgggggtgcctgcaatgccaagaccccagagggtgtgttacaatgctctcttagctccaccacctgtggacagcagtgtgttaccagctcagtgggccctttgccttatgtggggcagctgccctccgccagtgagggcaaagggccagtgtgacagcctttttgggtattcacacttggtgggccccgaattcttgtctggtgcccaagaagaatgaagtcacacaaatgaattgaaggatggtgaatgcggataatttcactgagcaatgaaagtagctctcagtggaaaggggagctggaggggaagggaagggcagatctctcccctgaagtcaggttgcctctctccctctctccttgaagtcaagctgcctccttctgacatccagccatcatctctgaagtcaactcacctcttctagatatccagctgcttctcccctctactggctgagtctggggtctttataggcacaggatggggggcagggtaagccataggtagttttgaaaaaggcaacattcaatttgtaaaaagacattattcagaaagaaccaatcaggaaagaccaggcaaatagggatagaagttctcactttgggccacgggtttcaggttttttggcttgaaggtgaggcttcaccagggactcacccctgtctgcctagagtttctctgcctcctacctctattattatttattttgttgtaaagagaagtgacaggtactaatgtcaaaatgaaacaaaaaaaaaaggagaggtgactcattttttcaaggttgctaaatactagcttagcatcttatttgagctttagaaagcaaggcccacctgggaagccagaaaacagttagttttaaaggtaggctaaggcagatgaatggataagtgatgaatggttaaagaaaatgtggtatacatatacaagagaatattattaaatcataaaaagaaggaaatcctgccatttgtgacaatatgaacatggaggacactatgctaagtgaaataagtcagagaaagacaagtactaaatgatctcacctatgtgtgcaatctaaacaagtcaaattcatagaaattgagagtagaatagtagttgccagggcttggcagatggaagaaatggagagatgatggtcaagggtataaactttcaggtataagataaaaaagttctaacttctgggaatctaaagtagagcatacatactgtacctgaaatttgctaaaagagttgtgatattgtgaaatatacatttgatctttgtctaaacacatttggtcttagtcctgggatacaactcctagaatctttggaatcttcaaagtgataagtacctttttgtatgctaatgagtttactgatggctgacaccacccaggtagcttcagaatgagagctgttcaccagaaagatcaatgtatgatcagaagggactttcagctctacttcctaacttttcgggagggaagagaagctgaaggttaaagccaatcatcagtggccaataatttaaccaaccatgactatgaaatgagactttcataaaaatacaaaaggacagggttcagagagcttccagatagctgagcaaatgaaagtccctaaagggtggtgcacccagagacagcatggaaactccacaccccttcttatacatttcctttgcatctttatatcctttgtaatatcctttataataaagcagtaaacgtgtttcccttagttctgtgagttgctctagcaaattaatcaaactcaaagtgggggttgtggaaactccaatttatttatagcaagtcagtaaaagcacaagcaaaacaatctgggaattgcaattagcacaggaagtgggggcagtcttgtggaattgaaccctcaacctatgggatctctaggtagataatgtaagaattgaattgaattagagggcaactagctagtgtctgttgaagaatccgctacagaattgattggttgttggtagggaaaaatccccacacacttcttggtgaccaaaagtcacagaggtcttttctgttgactgttgtgatataaaagcagaagaataacagattttttttgtttttgtttttgtagagagtagctcttcaatgtcctcaccacatacacaaaagttgtaactgtgaggtgatggatgtactaaataacttgactgtgataaccatttcacaatatatgtatatcaaatcatcatttgtacaccttaaatttttatagttatatttgtcaattttgtcaataaagttgaaaataataaaccagagagaaatatatgcaaagaaatcaaaactaagcaatattatactttattgtttattctgacaacaaacccaagtatagcactccaataataacaaataatggagaagacttctatattcctaagcaatgtctgttgaaatggtctcgactttcactgtccaatatggtagccacatgtggctattaagcatttgatatttggctagttagaattgggatgcactccaagtgtaaaatgcatgacagacttcaaaggtttagtgcaaaaaaggaaaaagattataaaatattccattaataatttttgtattgattatatccttaaaatattttggatatattaaattaactatattgttaaaattaatgccatctgtttctctttgatgtggctactagaaaatttcaaatgtattacattatatgtagcttgtattacattcgtattggatagtgctgactgaaaactatccaaattgtaaaatctgttctatttgcagccccccttccattgtattcctttagtctcagaacttaacacaacagtaggataaaaagtcatataagaaaaacgtcaaagaaaggaaaagtatttaccccattgccttctcccctttgatatatttaggaaaacaagactgttacgtacatttgaatcaattgcatggtgtagcctttttgtgctggttgcggcttcactgtttacttcctcacctgccacagcttaaagcagcactataagctgcactatgcttttcaatatgatgccactccttcctctaggcaccagcagtagtggtaaatgtgttacacatttatacttcccttttctacccacaccaccaccacccaaagctttaatatgtactaaatttccttaagttttgggatatagaggatttatgccccagaaacacaaatatctcagacttaaattttagaaattatgttctgaaaattccttcacccacccagatgctaaattctctttccccaggctcagcctctgctggtggcttaactgcttttttcccttttatttcttatgtagaacagtttagctacacttttagtttcttaccgtagtacaacttattcccctagagcctcacctacttccctctgtatcctaaatgactttgcctacatttctctatacaaaacttttcctgcttgaaaagaactactggaccaggtgcagtgactcatgcttgtaatcctagcacaccggatactgaggcaggaggatcacttgaactcaggagaccagcctgggcaacatggtggtacctcctctctacaaaatattttaaaacttagccagccatgtagcacatgcctatagtcccagctactcgggatgctgagatgggaggattgcttgagatggggagattcaggctgccactgcagtccagcctgggtgatagaccaaaaccctgtctcagaaaaacagaaaaacaaacaaacaaagcaaagcaaagaaaaaataatagtatttcctgttaaggcatttaaaaaatttttccaattttgaattttttttttttttttttttttttagtaatatagcccaatgccaatcaatgcagcctgccaaaagtcttcatctacagtagccctgggaaagaggaaaaatcctttgcagagaatacccattcccattagaagtaatctcagtgtttatcattaattccactggaagtaggaaaaaacacaaaaataagagactaagatttcagatgacgtgagataccacttttgaatgcaactccatccttaagataaatgccctggatcttaaatacaactttttctcctataagggtgaaacttcttgctgaagatccagactttccttagggaaacttgaaggcagatgggaggagctttaatttcctataagtaggagctcttcatttctctggaactttccttctttgccaagccaaatttaactccttctttaaattatagctccaggcatcatttcctcagggaagccttttctgaatagcctattccctaggcctcagccccaccccactcaacacagactgggttgggttccttcagagtaaaatcagtcctccatatccatgagttaatgcatctgcaaagtcaaccaaccacggatcaaaaatatttggaaaaataaaaaaattgtacaaagttgcaaaaagcaaaacttgaatttgccatgtgctaagtactacattgaatccacacaaattaagtgatgtgtaggcattgtattaagtagtaatagtaatctggatgtgaataggttccacgcaaatactataccattttatataagggacttaactatgcgcagattttggtgtctgagggggtactggaaccaagcccccaagataccagaggatggctgtatttcctgagcattctgtacttctcactaagataacctttatcatatcttataattattatgacttgagataggatctcactgtgttgcccaggctagtctcgagctcctgagctcaagtgatccttacacctcagcatctaaagtagctgggactataggtatgtgtcactgtacccagcctacaatacattattgcaatttatttgtctgattctcccagtatactgagagcttcttaagggtctcaactcctctttgaatccccaataaataaacatgatatcaggttcatagcaagtgtttaataaatgcctgaatttatgaatagataatgacagttgaaataaataaatatttactctaaatctcctattctgaaatgcgttccaatataccttatatgatgaagaagctacagaaacttgatggaaggaaggctaaggagaccttccaagacagctttttcctcatttttttatcattttggtttgcctccttcatgaaagattttcacaaatcatgagtttgaacacggacttacatttcagttacgcatgttttccccaacctctatactttagctttcaacccatatgttgttttgagaagtgggcctgtacttaatacctctacctgtaaataattccaatgaaaggataacttataaagcaaatgaaaagttaattaaaaaataaatctaattgaccttttgtggatgtgggtggaagtagtttaactgtacttctaagcttttataacttaatataacatctatttaaaaattataagtgaatataaataaactttattacagttcaattttaagaggtatacaattaaaaggtaaattatttagagtgattaaccatcccacttttcctgggattgggggatttctcaggatgctggtctttcagtgtgaaacctgtgacagtcctggccaaattgggaacggtgttggtcatccaactaatatacgacattgagatgagggttttctttctttttctcggttagacaaatgtttcttcattaaacacatgatcattttctccaggattattttgtaatcactgaatcacttaataggtattacaagttattgcatgcaaatcacttcaaagaaaataaattactaacacataactttttttatatatactcactgtacttggattactttcaattttcttatgttaaaatgcatttaaaccacttaatactttcctgaaaatgtatttttaaattatttttacatttgctaaagttaacaaaatgcttataaaataaattaagttgattacctaagaaaaatgtttcttttactataaactagtaatagaaatgcttggcacatgttaatctgtggatatgcctgttatctctggttaggtataaatgccttctctaagcgttgttatgtactaaattgacaggcaggaatatgaattcaccttccattttctcatcaatagagtgagataaaatcataatagagtagagagaactctgttttattccatttctactccgtagaactaaggattcttccatttccctttttctatttcatcaatttaaccttcatctactcatccacttaagataaagagaaaaaaggtaaacacatggtaaataacacccgactatttctcaccatgtctattaccaccatcctggtccaactcaccatcatcttgtacctggattataacttccactcttgtctttagactattctcaatacactagtaacaatgattcttttaaaatcaaattatgtcactcttctctccaaactcttcaataacttatggtcccagttagagtaaaagctaaagtcattatgaggacctatgagatctgccctgtccctcatctctctgaccttatcttctaccttgctcattacatggtgtttctagattacctcaagcaagctcctctcccaaggcctttgcactggctgttccttctgcctaggatgctcttcactgagaaatcagcatggctggctttttcaagagctttatatgtatatatgtttacatatatttatacatattcaagtctttatatgcatacaaatatatggaaatatatttgtatacctatatactgtgtgccaggtagtatatgtgccagtagaatatataaatatatttatatatatttatatacacataaacttgaacacacatgtgcacacacccaaatttttttgagacagagtctcactctgtcagtcaggctggagtgcagtggtgcgatcatggctcactgcagccttaacctattacaggcatgtgccaccatgcctggcaacttttgtattttttgtagagatgaggttttaccttgttgcccagtctggtctgttgttgttgtttgtttgttttatttttgtttgtttgtttgtttttaaatagagacagggtcttgctatattgaccaggctagtcttgaactcctgccctcaaacaatcctcccacctcaaccttccaaagtgctgggattacaagcatgagccactgtccctagctaaatgttttcttaaatatcactttcttagtgagcccttctctgatgactccaacttataatcaaatcctatctacacttccttaactcaggttgcttcctttcttcattttccatcatatgaaatactatgtattctattttttatttgtttattatctgtctccaactagaatgtaagcttggtgccctgtgaggagattttatctctctgtctctctcactttctcatttgttttgttcactggtgtatccttggtgcctagaatactgcctggcacacagtaggcactcaaacatttatgaatgcatgaatgattgaagggcaactatgaagtcctgtaagtcagcttttcttagcttcctggaaactaaaattccaaagttgaaattttcttttaaaataaaaataatgaaatctgtttaaaaagtaaaggaaaaggaaaaaaccccaaggaaatggtaatatattgattctgaatagtaatttgtgtctcagtgtgaccaaattgaccagacctgcttagagactttgttctgttaagacaatagaggaaccccgggctgagacctcaggactatggcgaggagaggaaggagctaaacaatataatctatttctttcacattttcagtggagctggccttgacttcacagacaatgacattttatttatttacttatttttgagttgtaaaaacttgacattttaagttttattttgaaagaactgtaaatttatagaaaagttactaatagactacagataatttgtttttgctatgaatcgttcaaaaataagttgctaatctgatgctccactacctccaaatattttagtttatatttcttaccaacaactacagcctcctatataaccacaatacagtcttcatacttagaccctggtgaggtttcactaattatctcaataatgtcatttatggccaaagtatcctgacttggaatcacatgctgcatttagatatcatgtctcttcagtgtttttcagtcctgaacagttcctcagtctttattcaactttgtgacctttatatttctaaagattagaggccatgggcatgtcatatttctgtataattgaattcagttataaatatttggcaggaatatcacagaaataatgttacattctttttatttcatcctatcttgtggtatatgatttaattttcctccaatctatgatattcacttttatcactacatttttttaatatttcttattgtctgccagcctatgttaacattattaactataatgttaagggtttttttttaattaataaatattttgtgggaagggattttgaaactatatatatcccattttaaacaaaattttgattaattaattactatttgtctaaagtcttggtttcctattttagtaacaatgaatagattataacgtgttgctatcatgatttacttagatgctcaaattggtttcgattcaactagtggaaccccttcaagctggcttctgtgtcctattgatatgtcaccattactttggcataaaaagattttccaagatcatattgtattttgcttcccctagttctggaatttgccatttcacttctctgaggatcttcatttcgtagagtgaagaatggtatttagaagtcaagatctggaaactaggtatgttctttgctatggaatatgtgtatgggaatacatgcatatatatatatagagagagagagagagagagatgtatttttctgagtgtgtacacatacacacatttatatcttttatttctacatttaatctgtgtatattgaaagccatgccttcatatcatatctccaatttcaattcgaacacaaagttcattgcagttttctcattttctgtatttgtatatctctcctctgagagaaatctggctcctattgtctttaatttatctagttatttgatgaattctaccacatataaccaacctcccatatctgtcatcatctattccccatgaagatgctcttctcatctcacacaggcttcaatatcctgacccaggcgatgcctctcacctggatgccttggtcatgccaatcaggctctgacacaccaggccagatctcccttctgtatcaatgcccatctggcactgggctgcctccaagtgtgaatgctctcttcacctcactcaggttctgactccccatgccaggctgctccccaggatcacaggccctcctctctgtgcataagatcgggcaccctatgccaggccattccttctacagggaaaccatgcttaccccacctgggctctaaaaccccatactaggttgtctttccaagtctgaaccttcctcatcttacgctaagctgtcttcaggtgtggatgctctcttcttctgagatttcctgtttaatagattttggatattcatatatgtatatatatgaatatatacatatatacacacatttatacatatatatttaacagatctgtaatattttacatatcatgtcatactacaatatgagtggtgaaaacaaggcaaattcaaaagtctgggggaaatcctggactttttttctttaataggaccatattctatttcgaaaaatctattcatttgtccagtacatgactctagatgtattcttccattcatttgttccaccatcaactatttatcaagtgttttccacattcgaggtactctgctacatgctagaaatactaagatgaataaaacatgatcttggggaacaatttcaggaagtagacagacggtaaataaataagtacagtaaaatttaacaggtgatataaaaatagtatatatagggtaaaataaggccacaaaagaggaagtagccattctgtctgagggtggtgggaccaatatttaattctcaggtgcttgggcaaagtttcaatagctgaggaagtttctctgtcaataagacaataagagaaggatatagaaacagaagaaagaagaaagacactggtttattaaggaagaataaatagtgtgatataatatataatttttttttctttagacagagagagtatcacttttttgtccaagctggagtgcagtggtgcaatctcagctcactgcaacctccacctcccgggttcaagcaattctcctgcctctgcctcctgagtagttaggattacaggtgcccgccaccatgcctggctaatttttatgcttttagcagagatggggtttcgccatgttggccaggctgatcttgaactcctgacctcaagtgatctgcctacctcagccttccaaagtgctgggataacaggtggaaccaccctgctcggtccagtttgacgttagtggagggtaaagtgcaaatgcagaggacagaggaaaggcacaaaatgcagcaagaaatgaggctagaagtaggaatggctgtttcatggaggactttgaaagccttcctatggaaggtaatagggagccactgcagggctttaagcagatattttaaataaattatagaaatgcagtcttatcagtccacacattatattttattaaaacttaatctcattattactttgtagatagtaaatagaaattgcaagtctaatatttcccccctccctaatgaattgtcttgtgcaccctctcctctttggacaccacttctagagagaccgaaaaaaattttgttaatacataatgagcattccttccagctataagaactggaaggggaagaatatgccaaaagcacagacatcaatgatgaaatcatgtcaatctgcaacatatatagttacaaactgatttaatggtcactgttaggctgaactttcttgtgaatcactttataaaatagctctatatcttagaaaataatttgtaagaagcaggacccatttcgatagaaaaaatatttaaataataagttagtaccaggtgttaggtatatatatataatatagccagtttattcattagttcatcaaatatttattgcatggccattaggtacctggccatcttccaagcactaattatatttgcacatctcatcaccaagggtctttctttagatatgggagtgactaggcaatgaagaaatgaatttctaaattattttaagataatataatacatgaatagactggcacatctgcactttaaggtgagattactatttaattatcaattctatctcttcctagagctagatcatacattcttcaaaaaacaaacctgtattggtttgatcattaatataaacttagtagcacctagcagttactggcatgcagtaagcattcaatatccatttgttggcgaggtggagagaaaagggggaaagaaaagaatggagaaaaggaatcaaatggattttgaaattctgagaccaaagggaaagagccattttattgtcctcaaaacatagcttgattgtaactactatagtatttcttctgatttgaaaacccccatcaaaggcatacagtcctgcctgacatcctggatctccacttagaaacagaatgtaactcaggagtctgagacacaagataatcagttcttagaagtatatgcctcctcattcaaaagttcattaactttcaggttttaagataaaaagtatttttgttattataaaagtaatataagtactttaaagaaattttgcaaaatataggaaaacagaactgaaacattatcatatttccacctcctaaagataaccactgttaacattttacacgttaaatcagttccaaattttaaaatccctgtggtgcaactttctataatgctatgaggaacttatagacaactaaaatgaaccaaaaaaacacagtagagtaatgccatccatacttaatgagacaagattcagggccctgaaagagtttcaagattgagctatcatgaggttacgaggtccttaaggaaatataacgtattctagtcatcttttttatgccccagcaataggacccaggagtgagccttgcacatactattcactcagtaaatgttccttgaataaatacttagaaaaaaaatgggaatcagcattgttttcttttcgagactcttctttctatgatcgtgaacctgctcactccccagctcctcccgaatgaccccatcctttatcattccttgcgctgaacattagttccagcagtaataaagagcttgctgtagccccaaagtgttgttgttttaggcattcaaaactttaaccatatcatttgccaccttcatcactaagataagttctaattccttacaattcagctcagaagccatgtctcccctgacatttgtcacatatcttagtccattttcttttgctacaatatctgagactaggcaatttatggagaaaataaatgtatttctgctgggtgagagcatttgaaaatattttttaaaagttatttctgtaagaaataactaagttctgaaggctggaaggtctgagagcacggcactagcatttggtgaagaccttactgtgtcataacatgatgcatgatatcacatggtgatagggcaagagtgtgcatgtcagctcaggtctcccttcctcttctcataaagccactagtctcaccatgtgggcctcaccatgatgaccttatctaatcctattacctcccaaaggccccacttccaaataccatcaacatatacacatggggattaagtttccaacacatgaacttttcgtggacacattcaaaccactgtgtcacacattcccaggctgagctaagtgctatatttctgggttcctagagtacccgcaaatatctaacaatgcaattgccatattgcatggaaattagccacttacagttgtttactcacaggctaagatctttgaggcttatattatatcaactttattacataatatatatatataacaaaaataaagatagaaaaaaatatataattatgtgtgtatacacacacacacacacacacacacacacacatatatacgtgtaattttatagcaatagggtctcactatattgccaaggcaggtctccaactcctggcctcaagcaatcttcctgccttatcctcccaaaatgctgggattacaggtgtgtgctaccatgcccagcctgggcttctatatattcacaaatactgacatgggctcaataaatatttattgaataaatgagagaacaaaagaatgaatcatcttatttctttccttttttgttttagtttttatctctttaatttacttctgtttgttaggtcaagctgatcactcacagttttacttaccttaaaaaaaagtacaggccgggcacggtggctcacgcctgtaatcccagcactttgggaggccgaggcgggtggatcatgaggtcaggagatcgagaccatcctggctaacaaggtgaaaccccgtctctactaaaaatacaaaaaattagccgggcgcagtggcgggcgcctgtagtcccagctactcgggaggctgaggcaggagaatggcgtgaacccgggaagcggagcttgcagtgagccgagattgcgccactgcagtccgcagtccggcctgggcgacagagcgagactccgtctcaaaaaaaaaaaaaaaaaaaaaaagtacaaaaacccctcttgcccatcaaacagaaatcagaaatttaaaatgttaaaaatggcaaaaactgttacctttactcatctagccaaaaagcaatcccttcctaatttattataattaattttcaataaacagcatcattaccaatttctctcaatggcctttgcaacagagtcaccttgtaatcattactctatcacaaccacatgtgttatttaagtatctattctttctccctgaaaagatataaaggaggtcctgccgactttctctattgatgtcatcaggtctgtctctttctatttctagagcctctgactttaatctcttccaatttagtttgacctagttgcatcaaagtaacaattcagtatagtcaaaattaagctgcatacaaggaattccaatttcctatgatatgggattcaaattaaatagaattacaatttttatcctggcttctaaggctaaaatcacacccatctctaccagaattctctaccatatttcctctatctaagaaaatgtatttccttgtgcttccagctatgtatttcccactgaagtcaagaaaatattcttgctgtataccacagtaaatttgcaaattccttcattggtgtttttgcacatgctttagatcttttctcattctctttgtgccctaatttgtctttcatacccctgcttatatctctcttcctttaagttttcttaactactttcaggtcatattaactgctctgttgctacacaatccaacatttggattttactgaaataacaatatccttatttgcatgtggcactgtaaatgttctaaaagatctttatgtatatacttttagatcactgacaacaggagtgttgttctcccctactgggcttaatctagcagcactttgacacaagatgatttcttaatagatgctgtggatttattgtcttacatctaagggtgttcaataaatggccgggcatagcggctcatgcctgtaatctcaacactttgggaggccgagacaggctgatcacctgaggtcaggagttcaagaccagcctggccaacaggataaaaccctgtctctactaaaaatacaaaagattagccaggcggggtggcacacacctgtagtcccagctactcagatggctgaggcaggagaatcactagagcccgggaggtggaggttgcagtgagccgagattgcaccgctgcactctacactgggcaacagagtgagactccatctaaaaaaaaaaaaaattaaaaataataaacaatgccctgaataaaattaaattgaattggctgctcatcttcaataaactacttataaataatagtaaaatacaggaaacagtacatttacattaaggttagtatttaaatcattaatacttcccataatcctatcaagtttctaatatttgcatagagctttatcatagcgttctaatgctacttctacttgtcacccccctacacctatacacacatacatacatgcactgttaaatgtccaagaaaaagtagtttgctttaggaagaaaacccaaagcaaactgaaaggtatactagtgaataccaaatttcacataagtcttattgcccatatttatttatgtattggtatgttgccactgtattataaaagctttatttatggcccccctatgtcaaaggatatataataccttagataatttctattatgaagcttgcaaaatgtatttacctggacaatttagcaagaagaaagaaaaaaagaaaatgcgatagtaaatgcttctgcctattctatattgtcactaagttaacaaaaaaaattatctttcttggaatgttatgtaaaaataaattttatgaagtgccattttgaattaaaactttgtatattatattcatttttacattatttacttaaaggaacaaacgaaaaattttaaacctgttaaaatagtgaatagataacacaaactaggataatattttaaacaataacttacaggatcagcaggtccacaaaattctcgaaatgtctttgtagcattattctgttgaatctccattgctacacaagggccagaatacatttctgtcaccatgtcctatgatatgtaatataaaagaatgaaaagaatttaacaatttttaactctccccttttaattgtttcactgttccactaatgtccttaaagtcatctgtgacttcttccccacttatatcccacatatcaagcagttcccaaattctgtccatttttccttgaagaatattttttagatatgctctctcttctccattcctatcacattttaatataatgctttatcatccgacactttcattatttggaatgatcttctagtatatcttccttgcaaaggccttcttgaatacaatgttgttgaattcacattactaaatatatatatataaatttcaaaggttttatcctaaaaaaccttttaaaaatcataatgcattctagcaacaagaaataataggaccagatttattctcccatattaaacatctagaaactagataaaatatacgaaacaatagttttcatacactgggtgatgggcagcacaggtctatgacccctgaaagtatggaaacagattaggtgagctgtagaattgctctgtcttactgtctagaggcagtttccagaccagtagaccaggtagaggaaacacaacagagcccaacgttctctgagttgaaaagacaaagattgcacttcggggaggccaatgtagccttattttcaggaaagaatactggagagatgaggggagtatgcagaaaataagctacaggatctgcagaggagttcccatgagtctttggctactaatctgtcacatgtgtacagcaaactacttgaggctggggaaagaattgccagaaagtagaccaaacaactcagagacagcacaaggctgagaagagtttatgtttctaccagccagagtgaaaggcctttttatatgatatatggagcatcaaggagagtcctcagaagggtactgcaccatagcagttggcctaaattagccctagattgtaagatgctctatacccatcctacaaagattaaaagcaagactcaaaagtttcaaattgattccaagtgatttaactaggtgccagaccaaaattgagcactctttacaaatctaccatgtaacaatgtaaattttacaatatacagtatccagtaaaaaaattaccaggcaggcaaatatgtaggaaaatactaaccattaccagaagaaaactcaataaatagacccagcaattaaataaatgacataaaaaggatatccaaacagctattataagctccacattctcaaattatacaaggaaatataaacttggtgaggagaaaataaaaaatatttaaaagatccaaatacaacgtctagagatataatctaagacatctaaatttaaaaatacactgaatggggtgaacaggatacgacactgcagaagagcaataaatttgaagacattcaatagaaactattcaaaaataagcatggagagaaagaaaaatgaagaagaagaaaaaagccctgctgtgcaaccatgtcaagctgtctattatatgtgtaattagaatctcagaagagaagaaaaggtgataaacataaatatattttttaaaataagtgctaaaaactttccaaatttgctgaaacccataaacctatagatccaacagaacccaaggataataaatgtaaagagaagtacattaggatgcaaaataataaaattagctaaaaacaaaaacaaaaagctttataagcagccagggtgttggggggggggcaggggaaagaacattatataacagtgggaaaaagataaggatgacaacaatgatgaccaaaaaatgtaaatctgtattctatacccaggtgggaaaatatttttcaaaaatgaagaaaaaaggaagacgttttaagacaaaaaagacctgatacaattcaccatcagaagcattatataataagaaatattaaaggaagttctttaggcagaaggaaaaaaatgccagacaaaaatataaatctatacaaagcaacagtaaacatgtcaagtataaacataaaatgcatttttattttttagttgctttatttttcttttttttcctttctgttgttttcttttctttttttttttttttttttttttttgagacagagttttgctctgttgcccagctggagcacagtggcacgatcttggctcactgcaacctcagcctccagggttcaagctattctcacgcctcagcctcctgagtagctgggactacaggcacccaccaccacatctagctaatttttgtattttcagttgctttcaaacataattgttcaaagaaatgcattgtattgttgggtttatagcatatatagatgtaaaatgtatgagaacaacagcacacagaataataggggaaaaatataagtatactgttttaagattcttagctctctatataaagctgtataatgaaaaacatgatccaagaaaaatgcctctcatagtgtctagaacactcaaaaataatttttttcaccctcttgaataggaaagaatactttaggcagaagtgaaaatggatataaagactttgaggcagaagtacagtagggatatatgaagatcagcttagaggctaggagctgagtgagactacgggaaagtagtaagagatgaggccagaccatgcagggtcatgtaaaccattttcatgactttgaggatttacgatacacaacatcaaagtaaaataatttattacagaatatatttgaatattgatccaaaagcagtcatctcagctaatacaaactacagaagctaaaagaggaggaaaaggacttcaaaatttatatggtactcataactctactcattagagttcctgagtgtatcccccaaagccattttgctatttcacaaaggtcatatgtaattgattttttatggataattatattgagtctgattttctgcctctgatattgaagtactgcctacacacaaatgtcaaagccaaattttcagaaggagcagaaggcatgaacaagttttccaaaaacagaagagtaaattttgtctgctcttctccctcccttccttgtttccttccttttcctctccctcctttttttcctttgtttctttctttcttctttttctctctccctccttccttttttctttctttgtctctctcactcattctctttcagtgttgattacagataccactgaaaatagacatacaaggctgtcaaaatgtataaaatggaaagaaaaaacatgttaaacaaagaacttcatcaaaagcataacatgttccttcaaaaattgactcagaatttttaagtcaccctagtttttaattaagtcacaaattttttaaacaaaaaaacaacctttctgtttcctttacagccttttgactgctgtccttaggtagctatgtgtaggatcatttgatttcatgtctatcttctccagagcataagctccataaatgcaggcagtatgttttttgttcatcactgattatttggcttatagcagatactcaatatatataataagtgtggatcatagtaacagcatgagataggaattatcacctttttatgactgtacatgttgaagcagaaaatacaggtgtaaataatcaacacggaatctactaccaaagaattatatcagactaaataataataaaaacaacaataatagcaggtaatatttactgagtacttttaatatgtgagacagttttacataatttatttcatttaattcccacaacaatctcataaggtaggtaatagcattattcccattttataaatgggttaatcaaggtttaaagaaggtaaataaattgtcgatggtcatataactagaagatttaagatctgaacctagcatctgactctacagagggggaagaaaaaagaagagaactgaatttaggaagctgcaggctggttgcaatgaattttgggagatatgaaaggtatacagtttgaagaatgtaatgtggaaataactgactggttaacatcaggttacctcaggttactttttgttgtatggatgaaagacagagaaaacttcattattataccaaacaaaattagcctgtttgggaaatttggctcgctctctcctgatttctcagaaggtcagataacaacctaggtcgttgacacagaactttagtatgaatgactctgtattgattttcagtctggccatttgggacctagtacaggagcttagtccaaaacactgcatcctatacttttcacttaacagtacaaatgttttacatttacttttatacttacatgatattcggtcactactcctttataaacttcatagaattcctcaacattaacccgatccatattgaactatattaaaaaataaaacaaaacaaaaccataaaccaaccaacaaaagggaaataaataagccacacttagcacttaacacttgtaatctcttctttactctaaaacataaactttacatagattactctttgaagaaaaagtgttattaaacatcaactcatcaagaataataatggataacagcatcactctaggttctatacgtgcatcatctcatttagccctcacaaccaccttactgcataggtagtattaatggctccaacttacagatgagactactaagactcagaggagtcatacaacttcctcaaactggcatcctatctcaagcagtctgaccccattgataatacttttacctactacactacacctctctctgaataaaacctcattcttgatacaaaagaagatttatatgcaatattaattatactattgatagattagtggcacaagaaagaaatattactaaagaaaagtagttcagacttttagaggaaacagaaaacaataccattttcctcccaagcattcggaaaaatccctagttagtctggtttgtgttaaagcatttatacaagtcatgtggacttcctgctactcttcaaaaagaactgtaaaagtgtgcttacaaagtaagtctagagggacttattcttatcaaggctgaatttaaatttagttaggaataaaatttcgttaaattctaaggttctcaaaaactaagaccttattttttttaaaaagtagcctcagaattcccagttttattttccctccattttgcttgtttattgttgccaggattgaagacccactgagaaatttctgccaatatggacaatcatttaagctaggaggatttatttttatgggcaacattactaccatagggaggaaattctgttggatttcagtgttttatccaacattcacatatgttttgctaaatgcaacaaaatactaatagaagatatcatttattaaatacttagaatttgagccagaaatgattattttatttaatctgctgagtaacccatttaggcagatactaatgctttcattgcctagatgagaaaactgagaataagaatgcttgacatttggccaaggccacatgcctagaaaacagctgacccaagattcagaaatagatctttctgactccacaagtccacgactgtgtttgctactacactaccatgccttacctataggctcaattaatcatttttaaaattatttttttcattagtacaaactatacccaatcaccaatcactatgctaaactgtagatctagaattaggtcagtgtttaaaactaacatttctatatttttttaaataggcttacatgtcatcctacaatcttgttaatatatcaccaagctaatacttttagaaagttttggctgacaattactttataattctaggtaagattcttcaaatatcagttttctcattagtctttaagttttgctcaatgactttgtaaactatttcccttttttttttttcttttttggcttattggcacaaaatagaactccagtttgtgtcctggtccttgattttgggtaatcttaagactttagaaagctgtttcttttcagaaaataaaatacaaataataccagtaagaaaattctcagcttcaaaatggctattttggtatttcactatcaaaaaagcacaaacttgctgggcttcaaacactgtaaaaaccaaattgtttatctgatttatataataatctgttgcccaatttctagtcaaatgtaccgatgagtacagcacaaaggtatgacctctaccaaagtgggtgttgtttctcactgaaaggtttcctaggagtgtatgaacaacgcaattttgaacaagcgtgggctctgaaggtgcagcggtacaagtgccaacagagttgctagaatacactaactccaaagacagtcttgagagaaagtccaaaaaccagcaaaaggcactggttagggaaaaaaaatctgaactgattctcttccttcattatttgtttagtgaagaatccagaagacagaaaactcatcacaatttctcactttgattctactttttgtttataagaacaaaatacagtttttggtccttatttattttgcaactaaagtttccagaattgtataaacttaccttataagcttaaattaggtgtatcattgaatattacttctctcagtaaaatattatatgggaaaaatcatttcaaaaaccattttttgactacaggaaggttactgagttcagtaagtatgtcttttatttttaatgtggttcatgagtacacagggaacattcaatgtaaagcattttataactatttttgaaaaaaatcctcacaaatattatggttcattgtaaactacctaccatctgcatagctgagatttcaaaacctgcatctcggatagccatcaggatctttcccaacagtcctgaaaatgaaggacaatgagtgaaaaaatacaaaattttaagacattttagtttcttagaaatgcaaattttttatagcaaagtactttttgtttatactctatatttaaaaaaacacatattttgcaagagaaactaaattaaatccctaatactgagcattaaatctaatcatttgatttcctttgtaagtgcttcaagaatatcaacaatggttctgaggtttatgcaaaaaacttttaagataatattttgcctttaaagcccctgaagtctaggtgatatagagaacataaaaatcaaacaattataaatggcattatttaatacaaagaaacgaaatgccaaagtaccagatacagaaggaattcaaacaagagttcaaagaaggagaaaaatcaaattgtaactgaagagataggaagaagcttcacggggaaatgaaaagcatgaatggtccttaaaggctgtggacagatgggcttatacagggataggagagaaggcacacatctgggaaagtatgagcatatttaaaagacagtaagaagacagaaaagaaaaacaaataaaaaaggaaaagagattgaattcaaatcgataaaggccttggataccaacatgaggaatatagtctttatcctacagatgagtggtttctatattggagtctatagtctctgggcaaatggggctgactttgagattccatttgtttcctataaaagtctaagtttctttttttcaagtcaactaaaactctgtctcttacacatacatgcacaaaggcacacacacacacacacacacacacacacacacacacaccatattctggatcatctggatcttaccgagtgaccctaaatcaccatgtactattagtgtctgaatgtgcattcgtatttactatcttaccatagccaagtagtgctattttaattgtagcaggctgaggggtgagaaaaagccagaggtggatctgtttctcaaatgatacatctgtaccaaatgaaggccaaatgatatcatagcatgctgtagaaacaaaggttctcagaagctcaaagacagaaaagtggtggattaactgagtcatcacagtagaacaggctcatgcctaactcagagtctgtactatattcacgttaagcttgtttttatggcaaataacatcttctgtcacattaatgctattatgttaaattctgttttatattttccttgctacgaatttgcaaattattttagccatgcacttgtatgtgcaaaagtttgtatttagttttatatttggacatatttaagttgtattactaaaaattaaaataatttatgtcaacactgagcgtccatgagaatagttttccttcaaaaagaaacactgccaaaagaaatgagaagtcaacaaaaatgttgagtgagaaaatacaaaactaaagtagtattttaggaaggtcactaatgcaatagtgatgagcaagctggtctgaagaaaagaataagtagtggaaagaatagcaaaagcttttgaaatcatttagaatgctgattggaaaaaaataggccatgatatatttaaatattttctctcttattttgagcttcaaagcgtggatggcagcagtagagaaaggaggtagtgaatataagatattttcacacaagaagcaatgggattaaactggatacagagtatgaagatgaaagaaggataaaagatgatttcaagattttgaatccaagtgaatggaagaatgacaatacttttaagaagaaaacaaataatgatgaaaccaaattaataaggggaaagacactgaattattttggacatagaaacccaaaacatactaaatagcatttatagagtaggaaactgatcagatcttgaggatgcagcatatccaatggctgaatgagtaaaataaactccctgcacaaaattagtgacatgggattgcataccaacagatagagttataaagacagaataagaggtacagagaggttagaactgaaatgatgccaagaggcatttggagacagtactttatataaagagctggagaagaatacatattcaaggcaaaaggaacattaagcaaaggtaaggagatgtaaaacaccatagttctggaataaaagtatcttcatcttactgaataatagagtggaaaggaaatgagacagaagagaagggagcagaggtggcagaagccatgatagaaggacttatggaccatatacagaggtttggattttatcctgtaggccagaagttctcaaacattttggtcacatagaccctttagctcttagatagtactgaagacctttatataggttatctctatcaatatttattataatataagttaaagtgtgcttattctcctttacttgacaagtggtagtttcttagcctttatataggttatctctatccatatttattatgagttaaaacaaaattttaaaatatttaaatataacaaaaatcctttaaatgttaacataaataacattttgtgaggaaaattataattttttaaaaatgtgatctaagccaaaaggtcaggaagagattatagtattttttttaattagtgagaagagagatattgttttacattttttaaaaatctctttaatgtctcatttaataaaaggcagctggactctcacatttacttcagctttcaatctgttgccatatgttgttttggttggagtatatttagttgaaaaatagtggaatattttaataatcttttacaataactgtgtatattttcctttacttgataagtggtagcttcttaaaagtttgttgcaatgtataatctaaaacctttatcaataaacttttttttaccctgttacattaaaatccactggtctatcttgtatgtacttcgaatgaaactatgatatgactcagacatgatttttaatatcacacattaatcatttggcaaataccagctcactgagttatgcagattttccaaatgctgattcatttcattatacgtcaaaaatcaattaaaaatttgttaatatcatcaccaatttcatcagaatagtctttctattctgttatacaatgtattgggaagttgtcaaactgaaagtggtgaatacagttttccaaggttctaagtttagttttcctttgtagtttatcttcacttggattttatctttggcaaaggctattgtcagttgttttctttgatatgataggcttacttaatttgaaagacaacgcctgccaaatacccaagtctgaataagcacaatttgtctgtcagtcattctttcaagtaaaaatggtattccataaaagaaaaagcatctaattgagctgacagtgcaaacaattgtgaataggattactcacaaatgcttttccttaaaaccattatatggagctttatgtgtacttcacattacttcacacagagtattaaaaagacctatatttgaggatcaaaaagtaataaaattatttttactgcatctaagatattcttaactaagtatggcttttttttccccctgcagatgcatgatggttaaaaatacagtaactactagcacagtttggtgccactgccttgattcgttctaaggcagtggcagttttgttcaccatcgcttttgcaccatcagtgcaaatgacaacacattaaaaaaggcaattaagtatgaaatcagctttggtcttgcagatccataaaagggtctcattaatgataataaaaaaatgattacatattaaccctaatctaaatatgaaatttaatctaatctaaatattaaacactatgcttcaatcaatatgaaaagaaatttataatctatatctattacaaattctaagaataaataggacaagttcacacgatatataggaagatgctcaccatagaattattagtaataaaaaaattttaagttctaaataataaaaaacaggaaaaagttagataaagaagaataagttcctacaactaactttttactcagactttaaaaatcacattttcaaatattatttaattgcatagaaaaaaattcaaagtacaatgttagtgcaattcaaaattgtatacataggataattcccaattcactttataaaactagtattatcctgatattgaaatcatatgaagacagtacaaaaaacgaaactacactccaatagcccttataaatataaatataaaaatactttttaaaaaattttaaaacaataatttatttacttaatatgagaaagggtcttactatgttgactagcctggtcttgaactcctaggctcaaacaatattcctgcctcaggctcctaaatatctgggattacaggcacataccactgtatctggctaaacataaaaattatttccaaatgttaaaattttagaaattttataatttccaataaattttaaattttataaatttagcaacatatacaaagaattatacaccatgaccaagagacgttaatttcagatatgcaagcctggtacattattcaaactatcaaccaatatattaacaggctaaggaagaaaaatcacatgaacacatcaatatatgttgatcacatatctatctatagatatatatctgcatatattgatacagaaaaaaacatttgaaaatatacagcactcataaatcaaaaaaactgtaagaaaaaaatagaaatagaaggcaacttccccatcttcataaacagcatctacagaaacctacaactaacataatagtgaaagactgaatgctttccatgcaagacagtaaacaaggcaagaatgtccattctcattgctctgattcaacatggtgctggaaaattcaagtcagtgcaaccagacaagaaaaggagataaaaagtatacagacaagaaaggcagaaatataactgtctctatttgtatatgacatgactgtctatatagaaaatcccaaatagcctaaaaaaaaatctagaactaattatttcagcaaggttgaaagatacaaggtaaacatactagatcagttgtatttctacacactggcaataaatacttgaacactgaaactaaaactataatagcatttataatcactcaaaaagaaaataaaattgggtgtgaatctaaccaaaaatgtatagaacttgtgtatgaaaactacaaaatgctggatgaaagagctaaataaatgaagagcatacagtgttcagggaatacttcacacaataaagatgtcaattctccctaaattgacaaataagtttaacaaaattgttatcaaaataccagcaagttttttttgtagcaatagataagattattctaaaattatatggtaagataaaggaactagaataactaaaacaatttcaaaaaagaaaaatgtgaggtaatcagtctactcaatttcatggttcattattaactgcaataaccgaaagatggtgtagtattgtcagtgatagagatcaatggaacagaacaaaaaaatcccaaaatagaaccacacaaatatgtccaactgattttttacaaaagtgcaaaagcaattcaaattagagagataacttttcaacaaactcagtaaagttaggaaataaagtctccaagaaaaaagagttacttcccagaaggaagtctacacaatgaaaggataacacaaatttggggaaacagctagttttttctcatctatacatggtgtaagctagtcacatattattacacataatcctcacaacgctgctatggactgaatatttgtgaccctctgaaattaagatcctaactcccaatgtgataaaggtagggcctttgtggggaagaggtgattagatagcaagaacaaagcccatgtgaatggcattagtgcccttataaaagaagctccagagagttctcttgcctctttcaccatgtaaaggcacagtgagaaggtgtcatctatgaagaaaaccatgggccctgacctgaaactgaacctgcaggacctgatcttggacttcccactatggagaactgtgggaaatacatgtttgttgtttaagacatccagtctatggtatttatattgtagcagctcaaatgaactaagataatgcctatgaggaaagtactagtataatcttcattttatagatgttgagtatctatattcaaggattaaacaatatgccttaataactagtaagtgatagaactgaatttcaaacccagttttgcttgccccagagcctaagattatattataataaaataaataatcaaaatatttagttggcatatgtatgtacctcaattaaataatttatgtatatgcaaaaatatacatatgtgtatatatgtgtatatacagctatgaaacatctgtttgatcttctgaatatatactataaaatctttaacagagatggttatagaatgtatatgtagtaaattctgaattgttcagaggatcatcacttaacttactgattattcagactttaagatttctttccttcttaccattctgattcttatcaatttggcagaaaaaggaggaaaaaaagatcactttattgtttattaatagttctagaaaactgcttaatagagagaacatcattaaaaattaagttgttggccaggtgcggtggctcacgcctgtaatcccagcactttgggaggccaaaggtgggaggatgatgagatcaggagatcgagaccatcctggctaacacggtgaaacctcatctctactaaacaaaatacaaaaaattagctgggcatggtggtgggtgccagtagtcccagctactcgggaggctgaggaaggaggatggcgtgaacctgggaggcggagctttcagtgagccgagattgcaccactgcactccagcctggaccacagactgagactccatctcaaaaaaaaaaaaaaaaaaaattaagttgttaaaaagtagatgcatagtattcttcaaaattctaacaaaattggttttcatagttaataatctaatagttttattttgccacatgtatctatatcaaaaatatttcttgtgaaaataacttattctgatgttaaggtctttcctggcatcaatattttcccttgatatcacaatatctaccacctgggtgcggtggctcatgcctgtaatcctagcactttgggaggacaaggtgggtggatcacttgaggtcctgagttcaagcccagcctggccaacatggagaaaccctatctctactaaaaatacaaaaattagccagacatagtgccacatgcctgtaatcccagctacctgggaggctgaggcacaagaatcgcttgaacccaggaggcagagcttacagtgagccaagattatgccactgtcctccagcctgggtgacagaacaagattctgtctcagaacaacaacaacaaaaataaaacaaataaacagaaaatcatagtatctatcatctataatatacctcacagcaatcttgcagccaatgagccccttacactgtagaaacacttgaaaaatatcgttaccatgaatgttaaacttactggatgtaacagcaagatacagatgacaacaaaaccctactcacgagcatgagagcccatgaaaaggacactttggtgagcaaaacaacttacaaaactgaaatttaaagaagcgaccaggctgttgtacaagataattcactatcacctgtatgctttgcttcacaatccatataataaacaggggtggtgggaaataaaacgaaacgatttttaaaaatgaaaaaatgtcaacaaggaaatcttgcagtttattttggaaagaaactgaaagaaaagttttaatcgtgatgtagccaagagtacacgaactaataaaactggtgcctaaaatagacatgtttaatattaataaccataaccaatttaaatcaaattggaaggatatgatttcctttaaaatttaaatctagtgaaataaaattcaaagccattttaactaaaaaatagacgtgtatctttaaaacatgattagtgtaaagacaaatcaaaaaactagagattatgagagtttaatgttcaatgctaacatataaaagaaatcacaagtgttactaaagtcaacagaaggaatttaatactaatcttggcaaacatgcataacaaataaccttaggcataaaaaccaggtggaaaagctttctgtctcctagagagcaatatgttactaggcaataccacttcactgataatcttcctgtaatttttaatggaagcactcagattggtttaagctacaaatgtctatggttttctgccttgcaataaggaaaaatattgtagaattatattaaatcaattgcagacaagagtctggattccagaccatcctgggcaacatggtaaaacttcatgtctacaaaaaatatgaaaaaaaaaattagccaggtatgatggtgtgtgcctgtagtcccagatactcaggaggctaaggtgggaggatcactagggctcaggaggccaaggttgcagtgagctgagatggcacaactgcaatccagcctgggtgacagagcgagaccgtgtctcaaaaaagtaaaaacaaatcaaaataaataagagtttggattccacagaattgttaaattgggaaccagtaaggcacttaggtcttaatggatctcaaattaatccatcaggtgatcataaaacccacattagtagaaagtagcttttaaaagacagatttaattcatccaatagatttctgatcctccactaacaccacatacccaaatctgaaattcacatttttccttaccaatttcctaacaagaacaagctgtacattccttacaaggtagtaaaaagagtaaccaatagaactttattttatttgtatttttttttagaggtggggccttgctatgttactcaagctggacttgaactcctgggcttaagtgattcaactacctcagcctcccaagcagctaggactacaggcatgtgccaccatgcccagctaattattaaaaattatttgtagagacagggtctcactgttgcccagactggtatcaaactcctggcctgaagtgatcttcccacctgagcctcccaaagtgctgggattacaggcataagccactgcatctggtccagtataacaacacctttgtagatatacctacaatatggtgactttgtgtactgaaattcatcaagatgcaattaagtgagtagaaaataataaaaacaggctccataccatcatagggacagcagagaagacctatgggaatgaagatttccaggaaagagtagtcaggggttcctcctcactgtgaagaaagacaggctcagcatgcaaaggaagctaagaacagctataccttggttgaaataagatcacagttttaaaacaaggacagtctaagaaaaacaaaataaagtacggtactgagtagataggctggaaactgaaaactgtgtaagattgggtaaataggtcatatgaagtctaaagtcaaagtcaggttaatacagaaaagttaaccacacaatcacaaagtaaaattaagtttctacagcacagggtactgccagctatggatagagtgagctgcttcctaatcttaagaggccagtctctatgtggttggagtaagcaaatgtcccattagaagccaaatccatgtttctaggagattttcatgaatgttattatgcaggggctattctcattatatgaaaatctcagtttttaaaatttttttatttcaatagtttttggggtacaagtggttttggtcacacggatgaattatatagtggtgaagtctgagattttagtgcacccatcatccaagtagtgtacattgtacccaataagtagttttttaatccctcacccccctcaaccctccctcttctgagtcgccaaagtccatcatagaattctgtatgcctttgcatacccgtatcttggttcccacttataagtgagaacatacggtttttggtttttccattcctgagtacttcacttagaataatggcttctagctccatccaagttactgcaaaacacattatttcattatttttatggctgagtagtattccatggtgtatatatatcacattttctttatccactcattcgttaatggacacttagattggttccatacgtttgcaactgtgaattgtgttgcaataaacatatgcgtgcaagtgtctttaatataatcacttattttcctttgggtagatactgagtagtgggattgctgaatcaaatgacagatctacttttagttctttaagaaatctccatattgttttttatacagtttgtactaatttacattcctaccagcagtgtataggtgttcccttttcaccacatctatgccaacatctattattttttgactttttaataatggctatttttgcaggagtaaggcagtatctcattgtatttttaatttgcatattcctgatgatcagtgatgtttagcatttttcatatgttctttaccattcttatatcctcttttgagaaatgtctattcatgttatttgcccacattttgatgggatttttttttcttgttgatgtacttgagttcattgtagattctagatattagtcctttgctagatgtatagtttgcagatattttctcccactctgtgggttgtctatttattctgatagttatttcttttaatgtactgaagtttcttttatttaattaggtcctatttatttatttttattttagttgcatttgcttttggggtcctactcacgaattatttgcctaagccaatgtccagaatagtttttcctaggttatcttctataatttttatagtttcatgtcttagatttacatctttgaaccatcttgagatgatttttgtataaggtaagggataagcatccagtttcattcttctacatgtggttatccagttttcccagcattatttattaaataaggtgtcctttcctcagcctgtgtttctctatgctttgttgaagatcagttggttgtaagtatttggctttatttctgggttctctattctgttccactgctctatgtgcctacttttataccagcactatttttgtaactacagccttgtggcaaacatctgataatgtgatgcctctacgtctgttttcttgtttgtttgtttttttgcataggattgctttggctattcaggttctttttctggtttcatatgaattttagaattgttttttctaattctgtgaaaaatgatgttggtattttgataggaattgcactgaatcagtggattgctttgggtagtatggtcattttcatgatattgattattccaatccatgagcatgggatgtgtttccatttgtttgtgtcatctatgatttctatcagcagtgttttgtagttctccttgtagagatcttttacctccttggttaaatatattcctaggtaatttatttttttccagctgttgtgaaaaggactgagttcttgatctgattctcagcatggtcattgttggtgtatagcactgctactgatttgtgtatattgattttgtgacctgagactacggaattcatttgtcaaatccaggagtcttttggaggagtatttagggttttctaggtatacagtcatattattcatgaacagcaatagcttgatgtcctctttttcaatttggatgccctttgtttcttatccttgcctgattgctctggttaggacttccagcactatgctgaatagaagtggtgaaagtggcatccttgtcttgttccagttctcaaggggaatactttcaacttttccccatttattatgatgttagctgtgggtctgtcatatatggctttcattagttttaggtaaagttccttttatatctgtttgttgagtttttttatacggggatgctggattttatgaaatgctttttctgcatctattcagatgatcatagagtttttctttttaattccttttatcagatgtatcccatttattgacttgcatattttaaaccatccctgcatccctggaatgaaacctacttggtcatggtgtattatctttttgatgtgctgcttgaattagctagtattttgttgaggatttttgcatctatgttcatcaggggtattggtctgtagttttctttttttcttatgtcttttcctggttgtggtatcagaatgatactggcttcatagaatgagttagggaggatccctctttcttaatcttttggaatagtttcagtaggattggtcccagttctctgaatgtctggtaggattcagttgtgaatccatgtggccccaagctatttttttttcttggcaattgttttgattagtgattcaatcgcactgcttgttcttggtctgttcggggtttctatttcttcctggcttaatctaggagtgtttatgtttcctggaatttatccatttcctctagattttttagtttgtgtgcatagaggtgttcacagtggtctcaaatgatcttttttatttctgtggggttggttgtaaagtctccagtttcatttctaattgaacttactttaacctctcctggttaatctagctaatggtctatcaactttgtttatctttttgaaaaaccaacttttagtgtcattgatctttggtatttttgttgttgttgttgctgctgtttcaaattcatttagatctgctctgatctttgttatttcttttcttctgctagctttgggtttagtttgttctttctctagctccttgaggtatgatgttaggttgtcaatttatcatctttcagattttttaatgtaggtatttagcactataaattttccttttagtactgcttttactatattccagagattttgataacttgtgtcaatattatcattcctttcaaagaatttttaaaattccatcttgatttcactgttaactcaaaaatcatccaggagcagattgtttaatttctatgtatttgtatagttttgagggttacttttggagttgatttgtagttttattccactgtggtctgagaagatacctgataacatttcgatttttaaaaatttatagagacttgttttgtggcctagcatatggtctattgtggagaatgttctgtgtgctgattaaaagaatgtacaatctgcagttattaggtagaatgttcggcaaatatttgtcaggtccatttgttctagagtgcactttaggtccattatttctttgttgactttctgtcttgatgatctgtctagtgttgtcggtggactgttgcagtctcatactattattatttcatgtctatctcatgtcttaggtctaatagtaattgttttatgaatctgggagctccagtgttaagtgtatataaatttaggaatataatatcttcttgttggattgatccttttatcatcatataatgaccttctttgtctttttttactgttgttgctttaaaatctgttttatctgatataagactacctactcctgctcacttttggtttccatttggagtggaatatctttttgcactcctataccctaagtttatatgaatctttatgtattaggtgagtctcttgaagacagtatatatttggtttgtgatttttaaaatccattctgccaatctgtatcatttaagtggagaatttaagcaatttatatccaatgttaatattgagatgtgaggtactgttccagttatcctgttacttgttacctagatactctggtttctttttttttttttctttttttttttattatactttaagttttagggtacatgtgcacattgtgcaggttagttacatatgtatacatgtgccatgctggtgcactgcacccactaactcatcatctagcattaggtatatctcccaatgctatccctcccccctccccccaccccacaacagtccccagagtgtgatattccccttcctgtgtccatgtgatctcattgttcaattcccacctatgagtgagaatatgcagtgtttggttttttgttcttgcaacagtttactgagaatgatgttttccagtttcatccatgtccctacaaaggacatgaactcatcattttttatggctgcatagtattccatggtgtatatgtgccacattttcttaatccagtctatcattgttggacatttgggttggttccaagtctttgctatggtgaataatgccgcaataaacatacgtgtgcatgtgtctttatagcagcatgatttatagtcctttgggtatatacccagtaatgggatggctgggtcaaatggtatttccagttctagatccctgaggaatcgccacactgacttccacaatggttgaactagtttacagtcccaccaacagtgtaaaagtgttcctatttctccacatcccctccagcacctgttgtttcctgactttttaatgattgccattctaactggtgtgagatggtatctcattgtggttttgatttgcatttctctgatggccagtgatgatgagcattttttcatgtgttttttggcagcataaatgtctccttttgagaagtgtctgttcatgtccttcacccactttttgatggggttgtttgtttttttcttaaaaatttgtttgagttcattgtagattctggatattagccctttgtcagaagagtaggttgcgaaaattttctcccattttgtaggttgcctgttcactctgatggtagtttcttttgctgtgcagaagctctttagtttaattagatcccatttgtcgattttgtcttttgctgccattgtttttggtgttttagacatgaagtcgtcgcctatgcctatgtcctgaatggtaatccctaggttttcttctagggtttttatggttttaggtctaacgtttaagtctttaatccatcttgaattgatttttgtataaggtgtaaggaagggatccagtttcagctttctacatatggctagccagttttcccagcaccatttattaaatagggaatcctttccccattgcttgtttttctcaggtttgtcaaagatcagatagttgtagatatgcggtgttatttctgagggctctgttctgttccattgatctatatctctgttttggtaccagtaccatgctgttttggttactgtagccttgtagtatagtttgaagtcaggtagtgtgatgcttccagctttgttcttttggcttaggattgacttggcgatgcgggctcttttttggttccatatgaactttaaagtagatttttccaattctgtgaagaaaggcattggtagcttgatggggatggcattgattctataaattaccttgggcagtatggccattttcacgatattgattcttcctacccatgagcatggaatgttcttccatttgtttgtatcctcttttatttccttgagcagtggtttgtagttctccttgaagaggtccttcacatcccttgtaagttggattcctaggtattttattctctttgaagcaattgtgaatgggagttcactcatgatttggctctctgtttgtctgttattggtgtataagaatgcttgtgatttttgcacattgattttgtatcctgagactttgctgaagttgcttatcagcttaaggagattttgggctgagacaatggggttttctagatatacaatcatgtcgcctgcaaacagggacaatttgacttcctcttttcctaattgaataccctttatttccttctcctgcctaattgcccgggccagaatttcaaacactatgttgaataggagtggtgagagagggcatccctgtcttgtgccagttttcaaacggaatgcttctagtttttgcccattcagtatgatactggctgtgggtttgtcatagatagctcttattattttgaaatacgtcccatcaatacctaatttattgagagtttttagcataaagggttgttgaattttgtcaaaggctttttctgcatctattgagataatcatgtggtttttgtctttggctctgtttatatgctggattacatttattgatttgtgtatattgaaccagccttgcatcccagggatgaagcccacttgatcatggtggataagctttttgatgtgctgctggattccttttgccagtattttattgaggatttttgcatcaatgttcatcaacgatattggtctaaaattctcttttttggttgtgtctctgcctggctttggtatcagaatgatgctggcctcataaaatgagttagggaggattccctctttttctattgattggaatagtttcagaaggaatggtaccagttcctccttgtacctctggtagaattcagctgtgaatccatctggtcctggactctttttggttggtaagctattgattcttgccacaatttcagatcctgttattgttctattcagagattcaacttcttcctggtttagtcttgggagagtgtatgtgtcgaggaatttatccatttcttctcgattttctagtttatttgcgtagaggtgtttgtagtattctctgatggtagtttgtatttctgtgggattggtggtgatatcccctttatcagtttttattgcgtctattagattcttctctctttttttctttattagtcttgctagtggtctatcaattttgttgatcctttcaaaaaaccagctcctggattcattaattttttgaagggttttttgtatctctatttccttcagttctgctctgattttagttatttcttgccttctgctagcttttgaatgtgtttgctcttgcttttctagttcttttaattgtgatgttagggtgtcaattttggatctttcctgctttctcttgtggccatttagtgctataaatttccctctacacactgcttcgaatgtgtcccagagattctggtatgttgtgtctttgttctcgttggtttcaaagaacatctttatttctgccttcatttcgctatgtacccagtagtcattcaggagcaggttgttcagtttccatgtagttgagcggttttgagtgagattcttaatcctgagttctagtttgattgcactgtggtgtgagagatagtttgttataatttctgttcttttacatttgctgaggagagctttacttccaactatgcggtcaattttggaataggtgtggtgtggtgctgaaaaaaatgtatattctgttgatttggggtggagagttctgtagatgtctattaggtccgcttggtgcagagctaagttcaattcctgggtatccttgttgactttctgtctcgttgatctgtctaatgttgacagtggggtgttaaagtctcccattattattgtgtgggagtctaagtctctttgtaggtcactcaggacttgctttatgaatctgggtgctcctgtattgggtgcaatatatttaggatagttagctcttcttgttgaattgatccctttaccattatgtaatggccttctttgtctcttttgatctttgttggtttaaagtctgttttatcagagactaggattgcaacccctgcctttttttgttttccatttgcttggtagatcttcctccatccttttattttgagcctatgtgtgtctctgcacgtgagatgggtttcctgaatacagcacactgatgggtcttgactctttatccaatttgccagtctgtgtcttttaattgcagaatttagtccatttacatttaaagttaatattgttatgtgtgaatttgatcctgtcattatgatgttagctggttattttgctcgttagttgatgcagtttcttcctagtcttgatggtctttacattttggcatgattttgcagcggctggtaccggttgctcctttccatgtttagcgcttccttcaggagctcttttagggcaggcctggtggtgacaaaatctctcagcatttgcttgtctgtaaagtattttatttctccttcgcttatgaagcttagtttggctggatatgaaattctgggttgaaaattcttttctttaagaatggtgaatattggcccccactctcttctggcttgtagggtttctgccgagagatccactgttagtctgatgggctttcctttgagggtaacccgacctttctctctggctgcccttaacatttttaccttcatttcaactttggtgaatctgaccattatgtgtcttggagttgctcttctcgaggagtatctttgtggcattctctgtatttcctgaatctgaatgttggcctgccttgctagattggggaagttctcctggataatatcctacagagtgttttccaacttggttccattctccccatcactttcaggtacaccaatcagacgtagatttggtcttttcacatagtcccatatttcttggaggctttactcatttctttgtattcttttttctctaaactttccttctcgcttcatttcattcatttcatcttccatcactgaaaccctttcttccagttgatcgcatcgactcctgaggcttctgcgttcttcacgtagttctcgagccttggttttcagctccatcagctcctttaagcacttctctgtattggttattctagttatacattcttctaaatctttttcaaagttttcaacttctttgcctttggtttgaatgccctccagtagctcagagtaatttgatcgtctgaagccttcttctctcagctcgtcaaagtcattctccatccagctttgttccgttgccggtgaggaactgcgttcctttggaggaggagaggcgctctgctttttagagtttccagtttttctgttctgttttttccccatctttgtggttttatctacttttggtctttgatgatggtgatgtacagatgggtttttggtgtggatgtcctttctgtttgttagttttccttctaacagacaggaccctcagctgcaggtctgttggaataccctgccgtgtgaggtgtcagtgtgctcttgctggggggtgcctcccagttaggctgcttgggggtcaggggtcagggacccacttgaggaggcagtctgcccattctcagatctccagctgcatgctgggagaaccactgctctcttcaaagctgtcagacagcgacatttaagtctgcagaggttactgctgtctttttgtttgtctgtgccctgcccccagaggtggagcctacagaggcaggcaggcctccttgagctgtggtgggctccgcccaggtggagcttcctggctgctttgtttacctaatcaagcctgagcaatggcgggcgcccctcccccagcctcgctgccaccttgcagtttgatctcagactgctgtgctggcaatcggcgagactccgtgggcataggaccctccaagccaggtgcgggatataatctcgtggtgcgccattttttaagcctgtcagaaaagcgcagtatttggttgggagtgacccgattttccaggtgctgtccggcatccctttctttgactcagaaagggaactccctgaccccttgcgcttcccaagtgaggcaatgcctcgccctgcttcggcttgcgaacggtacgcgcacccactgacctgcgcccactgtctggcactccctagtgagatgaacccagtacctcagatgtaaatgcagaaatcacccgtcttctgcgtcgctcacgctgggagctgtagaccggagctgttcctattcggccatcttggctcctccccctctggtttctttattgttattgttttataggccccattagttttatgctttcaagaggttctattctggttcataattgcctttttcttttaaagtttaaaactccttttagcattttcaatagagctggtctagtagtaacaaattctctcagcatttgtttgtctgaaaatgactttaattctccttcatttacaaaacttagttttgttctggatacaaaattcttgactgacagttattctctttaagaaggctaaagataaaactccaatcccttctggcttaaaaggtttctgctgaggaaatctcttagtttttcaagcaaacacaatgaaagaagactgaaatgataattcaagaccatggatccattaactttaacatgaacaacacaaagtaaataaatgttgttccttacctataattagtttgagtgtttgtttctattttaaaaagacataggcctggcacagtggctcatacctataattccaacactttgaggggccaagtcaggaggactccttgagtccaggagtttgtggccagcctgggaaccatagtgagaccctgtctctacaaaaaataagaaattagctaggtgttgtggcacgtgtctgtagtgccagctgctctgcttgggaggctgaggtggaaggatcacttgactgcaggaggttgtggttgaggttccagtgagctatgatcaggtcactgcactcagcctggatgacagagtaagaccttgtctcaaaaaaaataaaataaaataaaataaaacatatatatatatatatatatatatatatatacacacacacacacacacatacacacacacatatatcttctcattctcaaagttagcctttgcacaacattttttttaataaacaggtacgttgatttttacttattctaactttccaaagtcacagttaaggaaattcacaaatttagacatcttattataagaacactgtttcttttgtttgttttaaatggctctgattccctcagcactggcaaggcttatattgccattcatagatagacttaaaaatagactaataccacaacacggatcacaaggtatataattcttgctccttttctgttgtaagcatatactatatacactgaatatgggcctccattttcttctgttattccccagcatggttctatagataggtacagctttgctatctggtgattctcaaagtgtggtccatgcaaaaatatctttagcatgacctgggaacttattacaaatgcagattcttgggctctaaaccagatattccaaatcagatactttggagtcagggcccaggaatctatatttaatccaagtgatcctgatgcacactaacgtttcagaaccattactgcgagtaaggtctctgagaacaacaaagcatcacaactactcctttggccatggaaaaggtgatatagctgaaaatttttatattttaaattgtaaaatattgaatacattttacattgtaaaatataaaatatacttttatggtaaaatatataacagatatgctcagattaaataattttaaagtgaacatctacagttatcatcacccacatcaaaagcccaccctcgaagccctctatatatgcctcccaatcatgaccctttcttctcttaggggagacacctacctgactttggaataaacttttctttatagtttaccacctacatatgaattcttgaaatatgtggttgatttttgcctatatttgaactttttgtgattagagtaatacagcatatatgcttcatgtctttcttattttgctcaagttcattactatgaaattcattcattttgttgtgtttccttctatttgaaagggaaggaagaaaatgcaacaatgtaaacagttagaatctctggatggtaggagtaagtgatttttaaaatagacatttgtctgtatttctaaatttttctactaagatgaattcctgagtaaaacttagcatttcccacctctgtatcaaataatttgaggtgcatgttttgaatcacattaacagattaaataaaaatctatgatgcaaagccaaaccttgtttcatttattaaactttcatttcatatatgaaacttcatattctgattcagcccaatacttaaataagatttggcttaaagattttctgacctcaaattcaggatattctgaagaataacttttaaaaacggagaagaaagtctgtggcacagacctgtaaccacaatttcaagagtcatttttaagcacactagagtcactttagttccttccaatctgcttaaattgaaatccttaatattatcctagaagactaccctccctttgataacaaggctgttcttcaataaccaccatgaaactgctctggtgaaataactgggatgagtaactcacttcctattttgcacacatagaagtcacagtacgtatgctaagtgttaaaagagacatagtagatgtaagttggtgataggttagaaaagaactaataactaaaataagttagaactttgaaccataggttttctagagtaagtaagatgtgtgaatatatagaaaagcaaagaagggtaccatttattaatccattcaaaaatcaattacactgaccatgtcccttcaatatttttcatgtcaactcctcccatgttttaacttattatttggaaacccaagcttttcatagacttttctgaaagatactaccttttctttagaaatcgtccctctttcttcctcctaagaatcaattataattatcttgccagaatgtcagcatttataatctgccatgtaacttgaatcattttttcaagtcttataaaatgagatcatgctactttgggttttcatgttttaaaacatatcttgataaagtaacatcatgtgttctgaatcctggatcacagattcataaagattagcccagctcttgggtagaagaaaaaaaaaaaagcctgaaaagcagaaccacagcatggtaggaggaaactcttgtcttccttttgtcattgtgcaattacgcagatgtttaatctgcagaggaaagggttaggaggatacatagaaaaccagtactagaggatcctccaaagcagaggagtgggcacattctatctttgctacaaactcttttttaagatatgttttcctcaggtctaaatcatgtgtagctatgctcagcattagttaccatgagttctaaaatggcatggtcctctaacagacaagtgaatgaaaaacaggcaagaggagtggcactgtcatcaaaattctgcataaagcttacattaatgttgttcttcctagaagtatctgtgcatacatagaacctactgggtcaacaaatgaatattccaaaggcatgtgtgtcaggttgcctcaataacatcattccctgaatcaccgtgactctgaatcttaaaatagaaaaaaaaaagtgaaaaacaggaattatctaaatttcttttataaatgtttactgaaacaaaacactgaaattaaatattattcaaaataaaaaactgaaaaggtataaagaaacttagataattaagcttataagtgatatttattgtttgtggtatttatagttctgaagttattaaagcttaaaactgtgctatgacttttgagaaaaccccatgttacatttttgccagtgctatttctttccatgaaactgggtttcattccaatctcactagagaaagatcaatctaagcactgtctagcaacagatcaagatttaccgttattttcattaaacaactgctataaagaagtaaacgtgcattagagaagctacttgtgtaaagcagagtgtcccaactactcacattttccattactccaaaaaattctcaccaacctaaaatccagcacagggatctgagttataagaacagctgaaaatcaaaaggtgactcttccctaaccatctccttggttgctattgacctgccatagtgaacaaactaggaatcttcaatcatgtatcaacttttataaggcttgactctgatgatggcagattactaaaggaaatgcaagatggtccctgcccagaatttctcataagtggctcttgtactgggtgtttatcaggaaaacccagggattcttttaaaaatgcatattcttgggctctactccagatatactgaaaaaagattctaaaattagggtccatgaataataattttaaacagtctccccaagtggttctgttgcacactaaagtttgagaagcactatctagcatcttagtgtcacaatactactggttcaggttctagtctcacgtcccaaccacatgaaggacttaagatgccttataccacttgaggtagaatgatacattggtggtccagtgaaccataattcctggtattcatgtgcttgtagagtctcctcctatactgactctggacctggccatgtgactttccttagctgtgatgcaaacagagacatgatgagcaatttccattgaggattatcttggaatgttactcttagaagccagaaaccatccggtaaagaagctcaggctatactactgaatgatgagaggccacatggaaagagtcttttgagaatgagattcagtcttgtacactccagctccagtacagctcccagatgaatgaagccacatgaataactcaagcaaggcatagcacagaagaatcatcaattgataacccacagaattgtgaaaaataatacatcatttttccctttttctttttagcctctatttcttaatgatgagataaatcattgtttttaagaaactaagtttttggatatctgggggcagggctaagatggtagactggaagtagttcatgtgtgccactcccagggggagaaaacaaaagtgctagtgaacacgggttctgcaggctgatcatctgagaaaccatgatgagatacatcaaggcagcaggggaacacagagaacaaagaggggcaaagctgggcaccagtctgtcggggctcagtgcagagccaggaaaacctcttcaacacgggaaagggtgagtgagtgacagcccccagggggactcacccttaccacatggacccatgcaagactgagaaggagagaatcaacctggcttccccacaattccccaacatacttctagattgaggcagtgagccactcagatgttttgcagaggcaactcccatgtccccccaggaagcacacagatagtagattagggcaacttggctaggatagggcttgtcactcaactgcagccccagtctgagggagccccttggaccagaataaccaacaaaagaaatgcagacacaaaggcagtaataactggggcctcctgcaagacccaggagcagactagaattgaagccagacaaccaaacccaccttataccacaatcaaacccccaagggcatcaaataaaaaaaaagcaaaacaatccatccagaagacatcaacttcaaaaactggaggaatatcagcccacacaaatgagaaagaaccagtacaagaactcttacaatggaaaaagctgaagtgccttctttcttccaaacaaccacactagttctccagttaagggttattaactgggttgagatggctgaaatgacagaaacagaattcagaatgtggataggaatgaagatcatcaagattcagaagaatgttgaaacccaatccaaggaagctaagaatcacaataaaacaatacaggagatgaaagtcaaaatagctcatatagaaaataatacaaccaatctgatagagctgaaaaacacactacaagaatttcataatgcaaccacaaatattaacagcagaatagaacaagtggagaaaagaatctcagagattgaagactggctttctgaaataatacagtcagacaggaagaaaacagaacaaaaaggaatgaataaaacctctgagaaatatggaattatgtaaaagaccaaatctatgactctctggcatacctgaaagaaatgggaagaaagaaaacaagttgaaaaacatatttcaggatatcatccatgagaatttcctcaacctagctagagagtccaacactcaaattcaggaaatgtggagaaccaccacaagatacttcaagatcacccccaagacacataatcatcaaattttccaagttcaaaatgaaagaaaaaatgttaaaagcagctagagagaaaggacaggtcacctaaaaagagaagcccatcagaataatagtgtacctatcagcagaaaccctacaagccagaagagactgagggcctatatgcaacattctttaagaaaaggaattccaaccaaaaatttcatatccagtcaaactaagcttcaaaagcaaaggaaaaataagatcctttcagacaagaaaatgctgagggaattcattaatgctagacctgccttataagagctcctgagagaagcactagatatggaaagggaagaccattaccagccactacaaaacacacttaagtacacagacaagtgatactatgaagcaaccacacaaagaagtctgcataattaccagctaagaacataatgacaggatcaaattcacacatatcaatactaaccttgaatataaatgggctaaatgccccaattaaaaggcacagagtagcaagttggataaagatgcaagatacatggtatgctgtcttcaggtaacccatctcacatgcaatggcacccacaggctcaaaacagaaatagagacaaatctaccaaacaaacggaaaacagaaaaaagcaggagttgcaagcctaatttcagaccaaacaatctttaagccaaatagatttttaaaagccagagaatgacattacataatggtaaagggtccaattcaacaattcttaaatcctaaaaatttaggattcaactatcctaaatctataggcacccaatacaggtgcacccagattcaaaaaacaagttcttagagacctatgaagagacttagattcatacacaataatagtgggagacatcaacaccctactgacagtaatagatcattgaggcagaaaattaatagtatcaggatctgaactaaactcttgaccaaatggatctaatagacatctacagaactcatcaccctaagaagacagaatatatattcttttcattatcacatgtattagtccgtactcatgctgctaataaagacatatctgagaccgggtaatttataaaggaaagaagtttaattgactcacagttcagcatggctagggaggcctcaggaaacttacaatcatggcagaaggggaagcaaacatgtccttcacatggcggcaacaaagagaagtgcagagtaaaagagggaaaagccccttataaaaccatcagatctcgtgagaactcactaattatcatgagaacagcagtgtgggggtaactgctaccaagattcaaatatctcctaccaggtccctcccatgacatgtcagaattataggaaccacaattcaagatgagatttggttggggacacgccaaaccatatcaccacatgatacatactctaaaatcaaccacggaatcagacataagacaaccctcagcaaactcaagaaaactgaaatcataaccaaccatactcttctgtgcaattaaaacagaaatcaaggccatgaaaattgctcaaagccatacaattgcatggaaattaaacaacctgctcctgaatgactcttaggtaaataatgaaattaaggcagaaatcaagaagttctttgaaatgaatgagaacaaagacacaacaaatcagtatttctgggacacagctaaggcagtgttaagagggaaattatagcactaaacacccacatcaaaaagttggaaagatctcaagttaacaatcaaacatcacaactagtagaacttgagaaccaagaacaaaccaaccccaaagctagcagaagacaagaaataaccaaaatcaagagctaaaatggaggagatagagacaaaaaatcatacaaaaggttaatgaatccaggagttgtttttttttttaaagtaagataaattgacagctagacaaataaagaaaaaagatacaaataaacacaatcagaaatgacaaaggagacattaccactgaccccacagaaatacaaagaaccatcagagactactatgaacaccgttatgcacataagctagaaaatctaaaataaatgagtaattcctggacatgtacatcctcccaacactgaaccaagaagaaattgaatcctcaagcagaccaatagtgacctctgaaactgaatcagtaaaagcctaccaatcaaacaaaaggcccaggaccagacggattcatagccatattctaccagatgtacaaagaagagctaggatcattcctacagaagctattccaaaaaattgaggaggagggaatcctcctcaactcattctatgaggccatcatcatcctgataccaaaatatgacagagacacaacaaaaaaagaaaacttcaggccaatgtccttgatgtacatctatataaaaattttcaacaaaatactcgcaagccaaatccagcagcacatcaaaaagtgaatccaccatgatcaagtaggctttatccttgggatacaaggttagttcaacatacacaaatcaataaatgtgactcatcacataaacagaactaaagacaggaaccacagatgcagaaaaagcctttgataaaattcagcatcccctcatgttaaaaaccctcaaataaactaggcattgaggaacatacttcaaaataataatagtcatcaatgacaaacccacagtcaacatcatgctgaatgagcaaaagctgaaagcattctccttgaaaaccaaaacaagacaaggatgccctctatcaccaaatctattgaacatagtattcgaagtcctggccagagcaatcaggcaagagaaagatataaaaggcatccaaatagagagaaaggaagtcaacctatccctgtttgaagatgacatgattctatatctaaaaaacctcattagtctctgcccaaaagcttcttgagatgacaagcaacttcagcgaagtttcaggatacaaaatcaatttataaaaatcagggccaggtgcagtggctcacacctgtaatcccaggactttgggaggccgagacaggtggatcacttgaggtcaggagttcgagaccagcctggccaacatagtgaaactctgtctctattaataatataaaaattagctgagcatggtggtgcgtgcctgtaatcccagctacttgggaggctgaggcacaagaatcgcttgaacctgggaggtggaggttgccgtgagccgagatcatgccactgcactccagcctgggtgacaaagtgaaactgtgtctcaaaaaacaaacgaacaaacaaaaacaatttataaaaatcagtagcattcttacacagcgcccaagctgagagccaaatcaggaatacaatcccatttacaattgccacaaaaagagtaaaatatctaggaatacagctaaccaaggaagttaaagatctctataatgaaaattacaaaacactgctcaaagaaatcagagataacacaaacaaatgtaagaacattccatgctcttagatgggaagaatcaatatcattaaaatggtcatactgcctaaagcaatttacagattcaatgctattcctttccatgtaccagtgacattcttcacaaactggaaaaaaactattttaatgttcatattgaaccaaaaaagagcctgaattgccaagggaaccctaagcaaaaagatcaaagctggaggaatcatattgtccaacttcacactgtagtacaaggctacagtaaccaaaaacaacatggtactggtataaaaacagacacacagaccaatggagcaggatagagagcccagatataaacccacacacctacaaccatctgatctttgacaaagctgacaaaaacaagcaatggggaaaggactccctattcaataaatgattctgggataacgggctagctatatacagaagactaaaactggaccccttccttacaccatatacaaaaatcaactcaagatggatgaaagacctaaatgtaaaacctaaaacctaaataaaacctaaaacctaaataaaaaccctaaaggataacctaggaaatatcattttgtacataggaactggcaaagatttcatgacaaaaatgccaaaagcaattgcaacaaaagcaaaaattgataaatcaaaaataagctaaagagcttttgcatagcaaaagaaactatgaacagagtaaacagacaacctacagaatgagagaaaatatttgctaactatacgtctgacagaggtctaacatccagaatctatgaggaacttaaacaaatttacaggaaaaaaataaaaacaaccccataacacagtgggtgaaggacatgaacagacaattttcaaaagaagacacacatgcagccaacaaccatgaaaaaaagctcaatatcactgatcattagagaaatgcaaatcaaaaccacagtgagataccatctcacaccagtcagaatggctattactaaaaagtcaaaaaataacagatgctggttaggtggtggagaaaaaggaacacttatatacctgttgggggaagtgtaaattagttcagctattgtggaagacagtgtggcgattcctcaaaggcctaaagccataaataccatttgacacagcaatcccattactgggtacatacccagaggaatataaatcattctaccataaacacgcatgcaaatgttcactgaagcactattcacaatagtaaagacataaaagtaacctaaatgcccatcactggtagactggataaagaaaacatggtacatatacaccatggaatactctgcagccattaacaaaaaaaatgagatcatgtcctttataggaacacgaatggaactggaggccattatccttagcaaactaatgaaggaacagaaaaccaaataccacatgttctcacttacaagtggaagctaaataatgaaaagacatggacagaagttgaaaaacagacactggagccttcttaagggtggaggattggagaagggataggtttggaagaaaaaaaatacctacagagtactgtgcttggtaatggggtgacgaaataatctgttaactaaaccccgagtcaagagtttgcctacataacaaaactgcacatgtacccctgaacctaaaatagaagttaaaatatttttaagagttaaattaaatttaaaaaatattttaggatagtttgttatacagcaataatatctaaatttcactatttgtaaatgatttttcttaagcttaatacatacttacctcttcagggccattaaatgcaatccttcctcaaaattaggattcttttgtagggactaacagaactcttgagattccttctaaatcaataaatcaccagttttatttaaagtccctaaaacttacagatccttaggatattttcactgtctataattttatgtttcaaaaatgtatgctaagctctgtgcattcaaagtcagggtcctaacatgtagttcagtgtacttggtgcaattgataaaattccatccaactgtttactttttcagatagaacagaacacattcacaaaactccaaaatggtgacattctaagcaaaactgggaccacttctggaatttttgttaaaactgagttaaatatacgatgtttagctctctttataccaaaaaatgtcatgcctctttcacagtatcctagtggatgaactgcatgaaggaaatcaaatatgaaaaagctgagcacttaactgattcaatcggcccaaatttaggaggttgcatgcatctaccagggctcttggcttacacagcaccaaagctaccattacagtggatagtaaaactctgaaagaggctctgagtaagaataacccaatttctaaaagtgaggacatgataaataagacctagcgcctaccagtctcattttaattcttataccagagccaattctgatgctaaatttacaaattggtcaatattctaataaataatttgcttcctagtaaattaaatgcagacaaccacaaaatatctaaactttctttgaaacattctccatgaaaatagaattattttttacaaccaaaacacaacatcaaggtatagaatacaatttccaatttatttatttttctctatctctctctctttttaatatagacagggtcttgctatgccggcctggctgatttcaaacccctggcctcaagcaatcctcctacctcggcctcctagagtactgggattactggcatgagccaccatgcctggccaaaattttcctttataagaattttctacacagtttcacagaataatagaataactgggtttaaatgctcagataaaactttaaaacaatcttaactcattttactgatgaaactaaacttcaaaaaggactgttataaacaatgcagtaaaattgtttaatgcataaatctgttataaggaaaatttctaacaaaatttcagggttctactactcaataaaaagactaaattgtttctccattacaagtataaaagccactctcccagatttggctacctcctcttgcccagtgtcaaccataataggcaatcaaaaaatagctactgaatcaaccagatgtaagcaataaacctacttcatgcacttaaatcagacctaggctttaactggggaaaaaaattaaagcactttattcctttaacaatgactacatttttctccctgtagatgatgaatgtaaatgttggatttttgttagcattataaaactattactttgttacaagacagtcattcaactttgcttaaaaattaaaagataatgatattagtggcagcagcagtagtagtagtaatagagtagtaatcataatactaacaatgtgtaacacttatacagcactaaactacgtgctgggaactgtctagagcaccttccatacactaatgcacttaatccttagttaccccatgaaaaatgtatagaattattctcattttagaaataaggaaacaaggtagaaagagatgaagtaattaatccaatatcccatagctagtaagtggcagagccagaattcaaacctaaacagcctgatttcagagtaaaagtaatttattttatggatggaattaataactataacctataaacaatactgagaacataataaacacattgcataatttttaaagtaaaaagaacacaagaacattcaccttgtttttctttccttttaaaacctgagtcctaaaatgacaatatattttaatctgcatatctaaaaagaccacagatgcctcaaatataccttatttttcccacaatttatctcacagaccaagaactctttatgttctagctctcttagaaatgagaagtgaaaccactgcatccacatagattaactataggtctatgaactaaggccgcctacatacacatgactactacttgtgccaagaagtttcttgcccagaaagataaggcagtaaatcagtaaataacttcactgttggcttcaggaacttcccaaaaatccatttaccccaacaatagagtactcaaacagtcccctttcacagtactccctctactgctcaaacaactcatttatcaaacaactgtgtatttacaagacttggttaagatccttagcctgctgttgctacaaaccttcaaccattattatatcatgaacgctgtcgtctcaatcagacgactgcattgaaagctcttaaacatctcaaggttttgcaatatctacccctgaactctcccttgcagagtctactaaggctctatcaaggttgtgcttgccctttattgtattaaggaataaacttagctttgcttcatcaacaggatattctggcctttttttgggaagtcagcagtcaacagaagggataatcctattccatttcagctgctctcttatcagcaactccttttttaaaataaaaatctttaaaaataaaaataaaaatctttcatgcctatactatattacaggtaatattaaatatattaataccaggagatgggattattatagaaacagataaacataaaccagcaaatgaaagggggccatgtgaacctaataataaattcaatatgagacttcaaactatatttcattaaaatggcagtttaatctgaactgggttaattacatacttcaaaatggtcttaaattattccaaaaatacaggtttagaaataaaaggaaaaaaaagccttgggttgccaaagtttattctgccatctgagtagatttttacaaaaatttctttgccttaattaagttatatgacctaatgttatatatcaaatataaatatataaaatataatctataaatagctctaaaaaccattaaatcctgtataaacagaaaaataatatattaaaattattaatagttattttgatatcaactttcacttacatacagtattttttggttttagttacatgtgcaatttttattcttcaacttttattttaacttctgggacacatgtgcatgatgtgcaagtttgttacataggtaaatgtgtgctatggtggtttgctgcacatatcaactcattatctaggtattaaccccagcatccattagctattctttctgatgctctccctccccccgccccccatgacaggccgcagcgtgtgttgttccctgaccatgtgtccatgtattcctattgttcagctgccactggtaagtgaaaacatgcagtgtttggttttctgttcctgagtcagtttgctgaggataatggcttccagctccatccatgtctctgcaaaggatatgatcttgttcctttttatggctacatagtattctatcatgtatatgtaccacattttctatatccagtctatcattgatgggcatttgggttgattccatgtctttgctattgtgaaccgtgctgcaatgaacatacacgtgcatgtatttttataatagaacgatttacattcctttgggtatatacccagtaatggcattgctgggtcaaatggtatttctgcctctagatctttgaggaatcaccacactgtcatacacaatgaaggaactaattttactctcccagtaacagtgtaaaagtgttcctttttctccacagcctcaccagcaacggctgtttcttgacttttcaatgatcaccattcgaactggcgtgagatggtatctcattgtggttttgacttgcatttctttaatgatcagtgatgttgagctttttttaaaattattatactttaagttctaagttacatgtgcagaatgtgcagttttgttacataggtatacacgtgccctgctggttagctgcacccatcaacctatcacatataattaggtatttctcctaatgtcatccctcccctagcctcccaccccctgacaggccccagtgtgtgatgttcccctccctgtgtccatgtgttttcattgttcaactcagacttatgagtgagaacatgcagtgtttagttttctgatcttgtgatagtttgctgagaatgacagtttccagcttcatccatgtccaatcaaaggaaatgaagtcatcactttttaaggctgcatagtattccatggcgtatatgcaccacactttcttttctatttttttcttaatttttttttattattatactttaagttttagggtacatgcgcacaatgtgcaggttagttacatatgtatacatgtgccatgctggtgtgctgcacccattgactcgtcatttagcattaggtatatctcctaatgctatccctccccactccccctaccccacaacagtccccagagtgtgatgttccccttcctgtgtccatgtgttctcattgttcaattcccatctatgagtgagaacatgcggtgtttggttttttgtccttgcgatagtttactgagaatgatgatttccaatttcatccatgtccctacaaaggacatgaactcatcattttttatggctgcatagtattccatggtgtatatgtgccacattttcttaatccagtctatcattgttggacatttgggttggttccaagtctttgctattgtgaatagtgccgcaataaacatacgtgtgcatgtgtctttatagcagcatgatttatagtcctttaggtatatattataccagtaatgggattgctgggtcaaatggtatttctagttctagatccctgaggaatcgccacactgacttccacaatggttgaactagtttacagtcccaccaacagtgtaaaagtgttcctatttctccacatcctctccagcacctgttgtatcctgactttttaatgattgccattctaactggtgtgagatggtatgtcattgtggttttgatttgcatttctctgatggccagtgatgatgagcattttttcatgtgtcttttggctgcataaatgtcttcttttgagaagtgtctgttcatattctttgtccactttttgatggggttgtttgtttttttcttgtaaatttgtttgagttcattgtagattctggatattagccctttgtcagaagagtaggttgcgaaaattttctcccattttgtaggttgcctgttcactctgatggtagtttcttttgctgtgcagaagctctttagtttaattagatcccatctgtcaattttggcttttgttgccattgcttttggtgttttagacatgaagtcgtcgcctatgcctatgtcctgaatggtattgcctaggttttcttctagggtttttatggttttaggtctaacgtttaagtctttaatccatcttgaattaatttttgtataaggtgtaaggaagggatccagtttcagctttctacatatggctagccagttttcccagcaccacttattaaatagggaatccttttcccattgcttgtttttctcaggtttgtcaaagatcagatagttgtagatatgtggcattatttctgagggctctgttgtgttccattcatctatctctctgttttggtaccagtaccatgctgttttggttactgtagccttgtagtatagtttgaagtcaggtagcgtgatgcctccagctttgttcttttggcttaggattgagttggcgatgtgggctcttttttggttccatatgaaatttaaagtagttttttccaattctgtgaagaaaggcattggtagcttgatggggatggcattgaatctataaattaccttaggcagtatggccattttcacgatattgattcttcccacccatgagcatggaatgttcttccacttgtttgtatcctcttttatttcactgagcaatggtttgtagttctccttgaagaggtccttcacgtcccttataagtcggattcctacgtattttattctctttgaagcaattgtgaatgggagctcactcatgatttggctctctgtttgtctgttattggtgtataagaacacggtgaaaccccgtctctactaaaaaaaatacaaaaattagccgggcatggtggcgcgtgcctgtagtcccagctacacaggaggctgaggcaggagaatggcgtgaacccgggaggcggagcttgcagtgagtcgagatcgcgccactgcactccagcctgggcgacagagcgaaactccgtctcaaaaaaaaaaaaaaaaaaaaaaaaaaagaatgcttgtgatttttgtacattgattttgtatcctgagactttgctgaagttgcttatcagcttaaggagattttgggctgagataatggggatttctagatatacaatcatgtcacctgcaaacaggtacaatttgacttcctctttccctaattgaataccctttatttccttctcctgcctaattgccctggccagaacttccaacactatgttgaataggagtggtgagagagggcatccctgtcctgtgccagttttcaaatggaatgcttccagtttttgcccattcagtgtgatactggctgtgggtttgtcatagatagctcttattattttgagatacatcccatcaatacctaatttattgagagtttttagcatgaagggttgttgaattttgtcaaaggccttttctgcatctattgagataatcatgtggtttttgtctttggttctgtttatatgctggattacatttattgatttgcgtatattgaaccggccttgcatcccagggatgaagcccacttgatcatggtggataagctttttgatgtgcttgctggattcagtttgccagtattttattgaggatttttgcatcaatgttcatcaaggatattggtctaaaattctcttttttggttgtgtctctgcccgactttggtatcaggatgatgctggcctcataaaatgagttagggaggattccctctttttttattcagtggaatagtttcagaaggaatggtaccagttcctccttgtacctctggtacaattcggctgtgaatccatctggtcctggactctttttggttggtaagctattgattattgctacaatttctgagcctgttattggtgtattcagagattcgacttcttcctcgtttagtcttgggagagtgtatgtgtcgaggaatttatccatttcttctcgattttctagtttatttgcgtagaggtgtttgtagtattctctgatggtagtttgtatttctgtgggatcggtggtgatatcccctttatcagtttttattgcgtctattagattcttctctctttttttctttattagtcttgctagcggtctatcaattttgctgatcctttcaaaaaaccagctcctggattcgttgattttttgaagggttttttggtctctatttccttcagttctgctctgatcttagttatttcttgccttctgctagcttttgaatgttgtttgctcttgcttttctagttcttttaattgtgatgttagggtgtcaattttggatctttcctgctttctcttgtggccatttagtgctataaatttccctctacacactgctttgaatgtgtcccagagattctggtatgttgtctctttgttctcgttggtttcaaagaacatctttatttctgccttcatttcgttatgtacccagtagtcattcaggagcagactgttcagtttccatgtagttgagtggttttgagtgagtttcttaatcctgagttctagtttgattgcactgtggtctgagagacagtttgttataatttctgttcttttacacttgctgaggagagctttacttccaactatgtggtcaattttggaataggtgtggggtggtgctgaaaatatgtatattctgttgatttggggtggagagttctgtagatgtctattaggtccgcttggtgcagagctaagttcaattcctgggtatgcttgttgactttctgtctcgttgatctgtctaatgttgacagtggggtgttaaagtctcccattattattgtgtgggagtctaagtctctttgtaggtcactcaggacttgctttatgaatctgggtgctcctgtattgggtgcaatatatttaggatagttagctcttcttgttgaattgatccctttaccaatatgtaatggccttctttgtctcttttgatctttgttggtttaaagtctgttttatcagagactaggattgcaacccctgcctttttttgttttccatttgcttggtagatcttcctccatccttttattttgagcctatgtgtgtctctgcacgtgagatgggtttcctgaatacagcacactgatgggtcttgactctttatccaatttgccagtctgtgtcttttaattggagcatttagtccatttacatttaaagttaatattgttatatgtgaatttgatcctgtcattatgatgttagctggttattttgctcgttagttgatgcagtttcttcctagtcttgatggtctttacattttggcatgattttgcagcggctggtaccagttgttcctttccatgtttagcgcttccttcaggagctcttttagggcaggcctggtggtgacaaaatctctcagcatttgcttgtctgtaaagtattttatttctccttcgcttatgaagcttagtttggctggatatgaaattctgggttgaaaattcttttctttaagaatggtgaatattggcccccactctcttctgacttgtagagtttctgccgagagatccgctgttagtctgatgggcttccctttgtgggtaacccgacctttctctctggctgcccttaacattttttccttcatttcaactttggtgaatctgacaattatatgtcttggagttgctcttctcgaggagtatctttgtggcattctctgtatttcctgaatctgaatgttggcctgccttgctcgtttggggaagttctcctggataatatcctgcagagtgttttccaacttggttccattctccccgtcactttcaggtacaccaatcagacatagatttggtcttttcacatagtcccatatttcttggaggctttgtttgtttctttttattcttttctctctaaacttcccttctcacttcatttcattcatttcatcttccatcactgaaaccctttcttccagttgatcgcatcgactcctgaggcttctgcattcttcacgtagttctcgagctttggctttcagctccatcagctcctttaagcacttctctgtattggttattctagttatacattcgtcgaaatttttttcaaagttttcaccttctttgcctttgatttgaatttcctcctatagcttgcagtagtttgatcatgtgaagccttctctcaactcgtcaaagtcattctccatccagctttgttccattgctggtgaggaactgcgttcctttggaggaggagaggcactctgctttttagagtttccagtttttctgctgtgttttttccccatctttgtggttttatctacttttgatctttgatgatggtgatgtacagatgggtttttggtgtggatgttctttctgtttgttagttttccttctaacagacaggaccctccgctgcaggtctgttggagtttgctagaggtccactccagaccctgtttgcctgggtatcagcagcggtgtctgcagaacagtggattttcatgaactgtgaatgctgctgactgattgttcctcttgaagttttgtctcagaggagtacctggccgtgtgaggtgtcagtctgcccctcctgtgggggtgcctcccagttaggctgcttgggggtcaggggtcagggacccacttgaggaggcagtctgcccgttctcagatctccccctgggtgctgggagaaccactgctctcttcaaagctgtcagacagggacatttaagtctgcagaggttaccgctgtctttttgtttgtctgtgctctgcccccagaggtggagcctacagaggcaggcaggcctccttgagctgtggtgggctccacccagttcgagcttccaggctgctttgtttacctaagcaagcctgggcaatggcaggatcccctcccccagccttgctgccaacttgcagtttgatctcacactgctgtgctagcaatcaacgagactctgtgggcataggaccctccaagccaggtgcgggatatgaccttctggtgcgccatttcctaagccatcagaaaagcacagtatttgggtgggagtgacccgattttccaggtgccgtctgtcacccctttccttgaccaggaaagggaactccctgaccccttgcacttcccgagtgaggcaatgcctcgccctgcttcggctcgcgcatgatgcgctgcacccactgtcctgcgcccactgtctggcactccctagtgagatgaacccggtacctcagatggaaatgcagaaatcacccatcttctgtgtcactcacactgggagctgtagactggagctgttcctattcggccatcttggctcctccccacattttcttaattcgtctatcattgatgggcatttggcttggttccaagtctgtgctattgtgaatagtgctgcgttaacatacatgtgaatctgtctttacagcagaatgatttataaccctttgggtatatgcctagtaatgggattgctgggccaaatggtatttccaattctagatccttgaggaatcaccacactgttttccacaatggttgaactaatttatactcccaccaacagtgtaaaagcgttcccatttttccacaacctctccagcatctgtcatgtcctgactttttaataatcaccaatctaactggtgtaagatggtatctcattgtaattttgatttgcatttctctaatgaccagggatgaggagcattttttcatatgtctgttggctgcacttcttttgagaagtgtctgttcatatcctttgcccattttttgatggggttgtttgtttttttcttgtaagtttgtttacattctttgtagattctagatattagccctttgtcagatggatagattgcaaaaattttctcctattctgtaggttgcctgttcactctgatgatagtttcttttgctgtgcagaaactctttagtttaattagatcccatatgtcaattatggcttttgttgccattgcttttggtgttttagacataaagtctttgcccattcctatgtcctgaatggtattgccaaggatttcttctaagatttttatggtcctaggtcttattaaagtctttgatccatcttgagttgatttttgtaaaaggtgtaaggaaggggtccagtttcagttttctgcatatggctagccagttttcccaacactatttattaaatagggaatcttttccccattgcttgtgtgtgtcaggtttgtcaaagatcagatggttgtagctgtgtggtgttatttctgaggcctacattctgttccttttgtctacatatctgttttggtataagtaccatgctgttttggttactgtagccttgtagtatagttagaagtcaggtagcataatgcctccagctttgttcttcatgcccaagattgtcttggctacgcaggctcttttttggttccatatgaagtttaaagtagtttttttccaattctgtgaagaaagtcaatggtagcttgatggggatagcattgaatctataaattactttcagcaatatggccattttcgtgatactgattcttcctatccatgagcatggaatgttttcccatttgtttgtgtcctctcttatttccttgagcagtggtttatagttctccctgaagaggtccttcatatcccttgtaagttgtattcctaggtattttattctcttagtagcaactgtgaatgggagttgatgcacaatttggctctctgtccattattggtgtgtaagaatgcttgtaatttttgcatactgattttgtatcctgagactttgctgaagttgcttatcagcataaggaggttttgggctaagacaatggggttttctaaatatacaataatgtcatctgtaaacagagacaatttgacttcttctcttcctatctgaataccctttattgctttctcttgccttattgccctggccagaacatccaatactatgttgaacaggagtggtgagagagggcatccttgtcttgtgccggttttcaaagggaatgcttcaagcttttgcccattcagtatgatattggctgtgggtttgtcataaatcgctcttattattttgagatatgttccatcaatacctagtttattgagagtttttagcatgaaggggtgctgaattttattgaaggccttttctgcatctattgaggtatgtgttttttgtcattggttttgtttatgtgatgaattacgtttatcgatttgtgtatgttgaaccagccttgcattccagcaatgaagccacttgattgtgatggataagctttttgatgtgctgctggattcggtttgccagtattttattgtggattttctcatagatgttcatcagggatattggcctgaaattttctttttttgttgtgtctcttccaggttttggtatcaggatgatgctggcctcattttatgagttaggaaggattccctctttttctattgtttggaacagtttcagaaggaatggtaccagctcctctttgtacctctggtagaatttggctgtgaatctgtctggtcctggactttttttggttggtaagctattaattattgcctcaatttcagaacctgttattggtctgttcaggggttctacttcttcctggcttagacttgggaggatgtatgtgtccaggaatttatccatttcttctagattttctagtttatttgcgtagaggtgtttaaaatattctctgacggtagtttgtgtttctacaggatcagtggtgatatcctctatatcattttttattgaatctatttgattcttctctcttttcttctttattagtctggctagcagtctatctattttgatgattttttcaaaaaaccagttcacggattcattgattttttgaagggttttttgtgtctctatctccttcagttctgctctgatgttagttatttcatgtcttctgctagcttttgaatttgtttgctgttgcttctctagttctttcaattttgatgttagggtatcaattttagatctttcctgctttctcttgtgggcatttagagctataattttccatctaaagactactttaaatgtgtccctgagattctggtatgatgtatcttcgttctcattggtttcaaagaacatctttatttctgcctttattttgttatttatccagtagtcattcaggagcaggttgttcagtttccatgtattttgtgcagttttgagtgagtttattaatcctgagttctaatttgattgcactgtggtctgagagactgttataatttccattcttttgcacttggtcaggagtgttttacttccaattatgtggtcaattttagaataagtgtgatgaggtgctgagaagaatgtatattctgttgatttgaggtggagagttctgtggaggtctattaggtctgcttggtttagagctgagttcaagtcctgaatatccttgttatttttctatctcgttgatctgtctaatattgacactggggtgttaaattctcccacttttattgtgtgggagtctaagtcactttgtaggcctctaagcatgtactttatgaatctgggtgcgcttgtattgggtgcatacatatttaggatagtcagtacttcttgtgcattgttccctttaccattaatgtaatgcccttctttgtctctttttatctttgttggtttaaagtctgttttatcagagattcggattacaactcctgctttttttgctttccatttgcttggtaaatattcctccatccctttactttgagcctatatgtgtctttgcaagtgagatgggtctcctgaatacagcacactgatgggtcttgactctttacccaatttgccagtctatgtcttttaactggggcatttagcttgtttacatttaaggttaatactgttagttgtgaatttgatcctgtcattatgatgttagctggttgttttgcccattagttaatgcagtttcttcatagtgtcgatgttctttacaatttggtatgtttttgcagtggctggtactggttgttccttttcatatttagtgcttctttcaagagctctcgtaaggcaggtctggtggtgacaaattccctcagcatttgcttgtctgtaaaggattttatttctccttcacttatgaagcttagtttggctggatatgaaattctgggttgaaaattcttttctttaagaatgttgaatattggcccccactctcttctggcttgtagggtttctgcaaagatatctgctgttagtctgaatgggcttctctttgtgggtaacccaacctttctctctggctgcccttaacatttttttgttcatttcaaccttggtgaatctaatgattatgtgtcttggggttgctcttctcgaggagcatctttgtggtgttctctgtatttcctgaatttgaatgttggtctgttttgctagtttggggaagttctcctggataatatcctgaagagtgttttccgacttggtcccattctccccgtcactttcaggtacaccaatcaaacgcagatttgtcttttcacataatcccatatttcttggaggctttgttcatttctttttattcttttttctctaatctggtcttctctttttatttcattaagttgatcttcagtcactgacatcctttcttctacttgattgatttgactattgatagttgtgtattcttcacaaagttcttgtgctatgcttttcagctccatcaggtcattcatgttcttctctgcattggttattctagttagcaatttgacttcagctttttttcatgtgtttgttgggtgcatgaatgtcttcttttgagaagggtctgtccatgtcctttgaccactttttaatgaggttgttttttcttgtaaatttaagtcccttgtagattccagatattaaacctttgtgaaatggatagattgcaaaaattttctctcattctgtaggttgtctgttcactctgatgatagttcattttgctgtacagaagctctttagtttaattagatccaatctggcaatttttgtttttgttgtaattgcttttcacattttgttcacaaaattgttgcccatgcctatgtcctgaatgctattgactagattttctactagggtttttatagttttgggttttacatttaagtctttaattcatcttaagttaatttttgtatacggtataaggaaggggtcccgtgtcaattttctccatgtggctatcagttctcccagctatatgtgcaattattaaggtatacaactagtatttattctagtaccactttattttatttcactctccttgcaacatatttttccttgaaaaggattagatcaggtaaattgaataaaacattttagggtgtcaaggataagctttttaaaaagttgatgcctataaacaagaactttttcaaaatgtgagtgtactatgtgtgtttatgtatatatgtatatgtacacaaatatacacgggtgtatgtatgtgcatgtgtgtgtgtacaggttgaatattccttacagaaatgcttgtgacaagcagtgttttggatttcaattttttttttgattttgaaatatctgtagatacgtatttgtggagcatacccaattcaaaaatccaataaacataaaccagtggttgaaaatgctacaacgaccatttcctttgagcttcatgtctgtgctcaaaaagttttggagtttggagtaatttgggtttcagatttttggattagggataccacacctgtgtagacactcacatacacatacacaatctctccagctaagaaaaatgagtgaaacataaaatcccaggtttttttccataaattttcaacaccagccatttcaaatattactatcacttcctatggaattgttactaatcatgtgccatgtgacttttttgtggctattgctattagggcaatagagtatagagggaacagaatggagattaaaaacaaacaaacaaacaaacagggtttgcatcctcaatttccattccaaattaggagaaacaacttaatctcatggaaccttagcttgcctatctggaaaagagcaacaaatttacctacttgacatacttgctgtgaagattaaaaataatgtataaggaaccagtctgccacctggcacataatggtatattctccataagtgtttgttatccatgctgcatgttagttacttataatcatggtcctaaggatttacaatatactaaaatacttcctaaaaaattaaagaagtattaattatgcagcaagatctttaaggctcatatccttccaacaagtaattctatttctaggaaactagccagaggaaaagattagagatatcatcaaatatttacgtataaagatattcttcaaagttttaattttaatatcaaaacactgaaaacaacctaagtatccaaataccatactacatctatacaattgctgttaaatattaaagaatctattaaaatattaatgaggacttaacagcagccagaaatgctcacaaaaattatatttaaacaacagcctatagacctacatctcaaccattacattcatgtgtagcagtgtacacacatgcacatacaaatgcagaaaaaaatgatttggaggaaatgcatcaaaacattaacaatgactatcttcaggtgatgggaattcagtatttttttacttcatttttaatggttttttatttccaattttctactatatacatggattacttggatacttaggagacataaaattttaaaatccaatcacttctgtatattatttagtatattctagttttttaagggtgatctttttaaccataccccatcttacttccaaaaagatttgagatacctaacaaaaatatatataccagactaaaataaataaaataaagaaattgagacaaaaataagaaaagaacttgcaaactctttctctttatatatgtatatatatgcaaacatgtatatacatacatatgtcaaagaactgtttcagatacaaagaactgaaggaaatttctccagccttctcagaaagggtatactagaggtatggcagacattgttttaatttgtacaacaggagtgctattggctgggcacagtggctcatgcctataatcccagcactttgggaggccgaggtgggtagatcatctgaggtcaggagtttgagaccagcctgaccaatatggtgaaaccctgtctctactaaaaatacaaaaattagctgggcatggtggcatgtgcctgtagtcccagctactcgggaggctgaggttgcagtaactcgagatcatgccactgcactccagcttggacaacagaactagactctgtctcaaaaaaaaaaaaaaaaagtgctattgaagtaaattaagtgaatcacaatttgtgattagaaagagagaaggcagactaaaagtcaattagccaagatctgtaacagtatgactgagcctgagcatgatcagcaactcaaagaacacctcctaaaaatccacaaagaaaagacaaatagagatttagacagattttcccttatattttgtcacctttactcaagtgccttcaaagaaaaaaaatggaaatactaaaagtatactttattttctatacataaagtacatcaagaaaataaacattgctctcctattaacaaaatgtactgaatatagtgtattcaacataccttcactgacagcatggggtttaacaatgcaacaggtacaattagtaaatttagcagtgtttgccggcccacaacctccacttgaaggaaaaaacaactccatttcctaaagacagagagaaatgattttgacaaatgtgatctcttatcttgaacttacaagatatttctgtgggggaggagaatcatgcaattacttttagagtttcatcatataaattttttgtttcagattttctaaaaatgagttttacaaagacacactgattaaattaaccctgtttcaagacttagaaccagaagagcatataaagaagtatcaatcaaagcaatgagaatatgtgtcattttgttccaggaatatagtggacaaagatttaataaattttgaatattggaaataccaatataaagttcttattctccccaaagcattagttaattagacacaaatttaattttaaatttttcattaaaatatgtaaaataaaatttaaaactaggaaattttataggaacagagattaatatcaggaatctgagaactacagctacttaaaactaactataggcctagtataaaataaaatcaaatgaaccatgttttataaacagattcaggctgtgttattcactttgcatgtggttcactaaaatgacaacacaacaatttgaactagccacaaagatgttcacactaatcagttcttttaattatttagatgctttcctgtctctaagctttcactgctattatttctactatttcctataaaaccctctgactcaagctccaaagaatcttaccaatgtgtaaagagccacctcaaataccactttccactaggaggcatttcctgatgcctccttccggcaacctttgttcccccaaagttatggttatttgggtacttatcttccatcaaatcataaatttgaaaaagagggaactaagttgtatagctctgtaggacccctagcacctaaaacaatgtctggctcaatgcaaatagcccttggtatacacaagggattggtactcaaatccctgtgtgtactcaaatccatgcatgctcaagtcctgcagtcagccctgtggaacctgcttataggaaaagtcaaatctctgtagatgtgagtttcacctcttgcaaatactgcattttcaatccttctgttgaaaaaaatccacatataagtagactcgtgcagttcaaacctgtgttgtttatggatcaactgtatttatttttcattaaatttaaaatgaaaagattatagaatgtgttaatgtgccacactgatgagcatttttttaaacacaaggatgatgaggaattattcaaatagtagtgtatacacctgagcatttccagtggtaagacactagaataaaaagtgttctattcctaagataccaactgcctttctatcatattgctgccattatttattattctttttaatcaataacaacagcaactaccccttttagtcctataccagatgctttgattgcatggtccgagagaacctttatggtacagatgaaaattcaaatacctacagggacctggcagatgatcaatgaaggaatgaagtagaagtggtgtgacaagagaatatgatagagtagcaaactagaaagggcatgctctttcgagagttcccattggtctgttcccttcacaacaaaattcaaaagaaatgtctttcttttccatttccatttttacttcctctcctacagtctcttttaaatccacaaccaattaggttttcattccaccaaagctgctcattaaaatcccttactacctccatgttgctaagtccactggttaattattctcagccctcaccttacctgaccaacagtatttgacacagtttgtcacatcctacactctggaatgctttcattacttgcctttcttcctacctcactggctactccctctcagtctccttcgatggttttctcctatctagctgacctctatgtgttggagagcaccagggcttagtccatctttattacttgttcactagcagtttctcaatgaatatttgggaatgactgaaattcagcacctaataaattctgcatgtgctaaacaaaataaatatatccacagtgtacaaatgagaaaaatgagactcagaaagcttaagtaacaagcccttacaagttagcaagtggcaaagccaggattcaaatccaagtgactgtagctccaaaaaccatgtactttttctattatctgtctttccaaagtaaaaagcagtgataaattgttctgtctctagtttaacaaattatttaacaattaattgaccaattatttttgtctcaactttcctttgatttcttttctcgctcaatttttaaaaataaaaatgccagctttccaactacccagattttcaagtaccatatttacctatgctgaataaatatttatttataaagcataaagattttacataaatatatcttcttagtgaaacgtgaataagagcgcttttactaggtcattgttatggcaattaattcaaagtctttataaaacaaagtcacaaaaataatatccaggcttctttgggatttgaggggctaaaatattttgtataaagatcctgttcttccaaagattcctgctattactcttggccttttacattttcctaaattccctagtaggaaagaataaatatttatagctttacaaaaaattaaaaattcagactgaattcgaaagctttaggtatataatttttaaatttttaaacaaattataaagtatatagttgtactacttcataaattttcacgctgataggatttcctggtaatttcactaaagcatttgtaattaatctatactaataattttattatgataataaaagtatggctaaatggtggccagttaaaagtttctccaaaactttgtacttgtaatagtaatttaaaatgaatatcatttctgtaaatgtcccaaattaaaacagtatagatcaatggaacagaacagaggcctcacaagtaaaggcacacatctccaaccatctgatctttgacaaacctgacaaaaacaagcaatggtgaaaggattccctatttaataaatggtattgggaaaactggctagccatatgcagaaaacagaaactggaccccttcctttcatcttatacaaaaattaactcaagatggataaagacataaatgtaagacctaaaaccataaaaactctagaagaaaacctcagcaatatcattcaggatataggcataggcaaagacttcatgactaaaagaccaaaagcaatggcaacaaaagccaaaattgacaaatgcgatctaattaaactaaaaagcttctgcatagcaaaagagaaattatcatcagagtgaacaggcaacctatagaatgggagaaaatttttgcaatctgttcatctgacaaagggctactgtccagaatctacaaggaacttaaacacatttacaagaaaaaaacaaacagccccatcaaaaagtgggcaaagtatatgaacagacacttctcaaatgaagacatttatgcagccaacatatgaaaaaaagctcatcactggtcattagagaaatgcaaatcaaaaccacaatgagataccatctcatgccagttagaatgatgatcattaaaaaatcaggaaacaacagatgctggagaggatgtggagaaatagaaacgcttttacactgttggtgagagtgtaaattagttcaacctttgtggaagacagtgtggtaattcctcaaggatctagaaccagaaatagcatttgacccagcaatcccatttctggatatacacccaaaggattataaaccattctgttgtaaagacacatgcacacgtatgtttattgcagcactattcacaatagcaaagacttggaaccaacccaaatgcccatcagtgatagactggataaagaaaatggggcacatatacagcatagaatactatgcaaccataaaaatggatgagttcatgtcctttgcatggacatggatgaagctggaaaccatcattctcagcaaactaacacaggaagagaaaaccaaacactgtatgttctcactcatatgtgggagttgaacaatgagaacacaaggaggggaacatcacacaccgtggcatgttgcggggtggggggctaggggaaggatagcattgggagaaatacctaatgtagatgatggggtgatgggtgcagcaaaccaccatggcacgtgtatacctacataataaacctgcacgttacgcacatgtatcccagaacttaaagtataataataataataataataataaaaagaaatagacacagccacttcaacctttggcaaaaacaaccctgatcaatcagcagacatcaacatcaaagtaagatcagcaaaaagattatgactcgctgaaggctcagatgattgttagcatgcattttttagcaatgaagtatttttaattgatatattcatagttttttttagacacaatgctattgcatttagtagcctacagtataaacataacttttatataccaggaaactaaaaaattcatgggactccctatatagccatattcactccactgtggtggtctgaaccaaatctacattatctctgaggtatgcttgtagatgaatagaacacaacaaatcgctgaaattgacccagatatatatattcaatacattttcaacaaaggtgcaaaagcaattaattaaagaaataaggtcttttcagcataatgctggaagaatatatgtctaaagaataacaaattgtgatcataccttgcaccttacataaaaattaactcaaaatgcatcatagagttaagtataaaaactaaaactataaaacttctagaagcaaataatgaaatattggtgaccttaggtgtgggaacagtttgttagacttgacacctaaagcacaatacattaaagaacaactgatactggacttcatcagaagtaaaaattgctcatccaaagatattgttaaagaggatgaaaatgcaaaccacataccatgagaaaatacttgcaaatcatatctctggataaagaatttgtatgcataatataaagaactctgagctgagtgttaaaaggcaaataaaaattacctgggcaaaggcagaattggaattccaaggcagaggggtagaatgagtaaaagcaacagagtaagaatcccacagtatacagaaggtgaggcaggatataaggctggaggaggggctgggagacagatcactggaacgccttggaaaccatgtcaaggagcttgaacttgattctgggaataatggagtactttaaaaatttttaatagtcatgagattgacggattaatatttttagacaacttgttctgaagcctatgtggaagatatatttgaggtagaaaagtatattccaggactcttgcagcagcccaggtcagaactagaagagtgatggtaggaatacagagaaagggaataattcaagaaaatgttcagaaggaaaaacctacaagatcttttgctgattctattaaggggataaacagggcagaagaaagaatactggctcccaaatttctttcctagagatgtacagaatacaaaaggaatactttggtaaattataatcagtgcaggctgggcatgatggcttatgcctgtaatcccagcattttgggaggccaagaaggaggctcactggagaccaggagtttgagaccagactgggcaatatcacaagaccctgtctttagaaaaaataaaaaaaaatagctggacatggtggtacaggcctgtagtcctagctacttgggaggctgaggcaagtggatggcttgagcccatgggttcaaagttatagagaactattatcacaccaaccactgaactccagcttgggcagcagagtgagactcttgtctccaaaaaaaaaaaaaaaaaattgtagtcagttcagtttcaaatgtattatttctatataagtctgaaactctaaggagaatcctagatagaaacttaagaagttaatttacacttttccatataaaattatctcacacaatttattgactaatcaatctatcccttgtccactgatttataatggcaccaacttctcattatatttgggtcatctcttgagcactctagactgttacactgatatacttacctactcccatgctaataccacagtttttcctactaaagctttataaaaagtcatgatatccttaaaataagtctcaccttatcatcaccacatctttttctccctcttcaaaactgtcttaactgttttggacccttggctgtttcataagtttgttaaacttcatgaaaatctgtgctaagattttgaatgaaattacccaatttatagatcaacttggaaagaactgatatcttcaggatactgactcttcccattcataaacatggcatatatcttcatttatttatgtctttccttattctctaaaataaatatttataattttctccatacagatctcccacatcttttgttcaatttattctaggtgtcatagacttttttttaaccgtatgaatggaaatctcttctaaaattacattttctaactggttatttcaagtatatcaagattactattgatttttgtatactaatattacatccagtacaaattacagatacaggtttgggaagcaccatgcaagtaaaatattaataataaaagataacatccattcattaaatactatgttctaggtactatactaagcactgaaataatttcatttaatcctcaaagacctctataatgcaggttcaatcattatcttattttacagactaggaaactgaaaattagagcaagaaaagcagtaaaccaagaaaagaagcctgcacaataccagcatctgaaaggacaagtgaaggaagaaaaaccaattagtaagacacaagtcatggtctccaaagacagtattttcaggaatgatgaaaataatgctaaattttaacaattgctcacaaatgagtagtcaaagatagctgaggaatgaaaatagtgagtataagtctatgttttggtaaaatctggaaagatggaatgaaaaattagacaataactaataggaattcaaggtaaagaagaggctgtttggggctgcataagtttggggctgtgatgtttttcaattttttaagacctgtggtctttgcttcttcacataagctcattttccagctacaatatttttccttaattcctagagccacctaacataatgtcaacaacactcactcttccccagacaagggtaaaaaaatatatatcctaaagggttcatacaaataataggatatttcaggaactaatggcagaaagaggttaaaaaaattaaatgcacaaaatataaacgaatatgtttaagacatttctttaggtgaaatggcaatggtagctgctctggattggatgtttgttccttccaaatctcacgttgaaatttgatccccaatgttggagatagggcctaatgggaggtttggatagtaggggtaaatcccatgaatagattaatgccctccctccaaggtgagcgaattttccctctattagttcctctgaaagctggttgttaaaaacagcctgacacctctcccggtggcttgcttcttctcttaccatgtgatctgtgcacacgcaggctcccttttaccttccacctcaggcagtggaagctgcctgagaccctcacgagatgcagatgcccaatcttgatgtcccagccatcaggactatgagccaaataaacctttttcctttataaatgacccagcctcaggtattccttcacagcaacacaaaatggactgagacagtagctaacttaacaaaagttgctccactacaagatatgctaaaatctaacaagtatatttatgctcaaatttattaaataatctagtagaaataaaaaagaaatggatggcataaggtggtaatagggtgaaataggcaggaaatatcagtaaacatggtagtgactttcagttcagcctcaattatttccttcattaattagatatgtttattatttttataatgctttaaaatatgattggaaatttaactatacaaaacaataccacatttacaataaatgtctactactaagatatggtcaaagactataattgctctcttgcatgtatctttaacttccttaacacttccgtcacatttgtttcacaaaaccacagccatggttaaaagccagctctccacctactccttaccttcagccatgcagttgaacaggctggagaaccacactcatagttcatggccatgaacactacatgggccattaattcagtatagcaatcacacaccacatttccctgatctattccttttccagatcaccatttcacatattcttctctcccttcagaccaaccaataccttatacctcatcctcactttcagctgttttgatcttgcttcctacttaagaatcagcatctgtgttcacatattctcccttcccatctgttgctatagacgagtacctgagaggcacacctgcctaatctctccacctgggttctaatttccatttccttttgcctaattaatgaaattgctccaacaagtcttcctctttttcctacatcatcaattttttacccaatacctctcctcttaaaaaaaattgatactacttttcttgacagctaccacctcatctctttgcaggaaaactcctcaaaaaaactcctcaaaaaaaaagttgtctatattcactaactacaattcccgtcccacaattttcttttaagtctactccacacagggttttgcctccacctccccatcaacattcaccttacaaagttcaccaatgatatccacattgcaaaatttaacaatccattcttagtcctcttcttacttgccttatttgacaccactggtcattctctcattttagaatatttgattcacttggcctccaggacataattatctctcagtttttcctcttacctctctggtggctcctcttcaacctcctttgctgccttcttctccttaccttttatcaagatgtagcttcatctttggtcctctttacttctctatctataccttctccttggtaatctcaaccagtctcccggctttaaataccatttatgtgctgataactctaagctgtcacactaatttttttcatcagtctaattggaaaactaacaaacaggttaagtttataaatgtccaaaacgttaactcctgattgtccattcattctgactctagccacagttttcctcatttcagtttacgtaaattctatccttctgataatcaggctaagaactttggagtaatacttggtatctttttctcatactctacattcaatctagcagaaaatcttgtttatttgaccttcaaccgttaatatatattttaaaatatatttgtatacttctttcattattaccacccaggtccaagccatcatctcactgggttattccaacagactcctgattaggctccctgttgctgtttttgccctctatagtcattcttttttttttcccccgagatggagtctcactctgtcacccaggctagagcacagtggcatgatctcagttcactgcaacctccacctccctggttcaagcaattctcccaccttagcctctggagtagctgggattacaggtgggcgccaccacacccagctaatttttgtatttttagtagaaacagggttttaccatattggccaggctggtctcgaactcctggcctcaaatgatctgcccgccttggcctcccaaagtgctgggattacaggtgtgagccaccactcccagcctctatagtcattcttaatgcaacagccagaatgatccttttaaatggcaagtggaagatatcagtcctttgttcaaaaccctaaaatggctctctattttttcagagaaaaatctaaaagtactactacggcctataagaccatataatctttcccctaattacctctgtaacctcatcaccctcttcctccctctctcattcctatccaaccacactgtcctctttgctgttagttgaccattccagacagaaatatgctattcaaggaatagcgagatggttagtgtgcctggaacacaatgattaagatagagattgatcaaagatacagttagagatagatatgggccagactagatagagcattggaggccacaataaagactttagattttattctagaagagacagaaattcactgaagggttttcagcaggtgaatgttaatctgatttgtctttaaaagatcactgggcatagctgattttacttgggtaaggtaaaattttcattaattgagtgtaagaaaagaggaaaaaagaatttggaggctattgtagcagttctggcaaaatataatagtgattcagaccacaatgatcagattcagggtttattttgaaagagctgaagggacttgctgatgaaatggtaggaaaaagaaagaaatcaattataaaactgtctaatattgtttcattgcaaacacaaccagattaaaaactaccttaagtgagacacttctcacgatgctaaaaataaacttacacttctttaattcaacctcagtataaatccaataaatgctttatttatatggatttaaaaataaggagtagagaaactttcataaacactagctatatataggaaaataataggatgttaagcttgaaagcacagtgttacgtctgaatcaaaaggaaatatctcaaattatatcttctttttaatatctactagccataaactggtattcttacatgaattcaataattcaaacatttaggagcctcagtaatttaagtcttgggaacaagaaacaggatgagaagtgttttaattggagaaaacttacgttgatcatgatcaggttaccagttcacaaaggagacacactgaatcactgtttgatagtaggcaagatgtcaaaggttttctctactactagagcagcagcataaatccaccctaagtcaccagtgatagaaatgctttcctttgatataaaacatttaacagaactagaagagcattaaaatatttttaaaacaccttactctggccgcagaagcaaaagaatcagggccatgcgctgcatttcttatgccatctgttccaaagagggctctaatgctttcagaagcatctgtgcgtgccactccagagtttgcaggtcccagcagtcttttccattcacatatagcatcatctcttaaaatctccatggcaataataggaccagttgtaataaactggatcagctcactacaaaacagatagaagattagtttgcttcttttttctgtcaactaggtatttgtcttaacgacaggatatatttaaattggattatttcaacatagacatgaatattataatcttagaaccattaagcatagttaattttacatgggcaggagaaatttttcataaattgagtgtcttgcagtggctcaattcacttcaaatcactagtaatgtcaaattactgttaccagaaaaatcactgttctgttgaattaagactatttcatgacttaaaatgcatactgttgacctatgcttttcccagtgctctaacaggtacagaggattttcctttttatttacatgtgtttaccactgcagtcaagtacaatttcacaatatatagggatggatgccttgtaacatatttttagtaagaatttatttatttttgtgtaaaactattagaattcaaagactgacaaagaactctcttaatcaataaacactgagctggtttggtgataaaaaaaaaaatccccagcaggcttcaagaaatatccttttattagcgtaaaaactactctgggttatttctgtattaaattattaaagtgtacgcatcggttcttgactaaaaatccagcactgagtcacagtcccccaaggtataaaagacaatacttcattttattttctacttttatatgtgtacaggatgcaatgacaagtttaactatgaaataagtgacatcctccctctgactatattaagcagggacacagtactttttagagtaagcccatggttttctctcatccaaagtagagagaagagatcctcctggagaaaggagcatggtgtgacaggctcttttgtgcccactaacttatgactattttttacacacttccttccaccctgcatgttatatgtcagctcccctcagtacttcctttttaaaacactcccattcattttgaagaatatttctaaaaaacagcatgtacaaaaaagtattcttgtcttctatcctaagagttctataatacctcctcatacattttctgccagacctttgctgccaaaacaaacaaaacccccaagaccaaccactagatttaaaaaaacccaaatcaaaggagcaaaccatgtttattcactcaataagcatttaataattgcctataacatatcagcgtctgtgccacaaaaaagatcccccttcaagacacttacaatctaacgccctattaatacaaaattctcaaaacacacaattgaataagcctatgaatatggcatgtaacaatatagggaaggatgtgcctgatcatagatactgcttcatgaaaatttaattacttcacctagtcttttgttacatcattctcattaacaggcaactagttaattcattcctttaataaaatttactgcatgcaaatcacacataaatcattagactaggagttgtaagttaatgctataaacatatacaaagtttataccaaaagataatttccaccaattttctagaaaagtgtatatagctattctaagaaggcttaggaatattttataacacttgatttgaaataatctatagcataataattttcttacatacaaatttttttaaaaacccactactcagtgcaggatatcaaataacatgtctactgtggccatttagtttggctgatgtaacattctttcttattagaagtgtaaacagtctttggcaacagtaataataatatgagcatgcaaaatattcacttaaatttaattacatgtcaaatatttagaatacataaagtgtaacatatattatctgttctatgtcaaggaacaaaatatatatcaaactagttaaaatagaaaggttccatgaacattgctttatgtatacaagactaccaaaatagtttaaaagtacaacaggctacagtaaccaaaacatcatggtactggtacaaaaacagacacatagatcactggaacataatagagaacccagaaataaagccacacatctacagccatctgaactttgacaaagtcaacaaaaataagcaatggagaaaggattctctattcaataaatggtgctgggatacctgtctagccataagcagaagaaagaaactggccccttaacattaaccatatacaaaactttactcaagatggattaaagatttaaaagtaagacctcaaactataagaatcctagaagaaaacctaggaaacaccattctggacattggcctggggaaagaatttatgactaagtcctcaaaagtaatggcaacgaaaacaaaaattgacgagtgggactaaagagcttctgcacagaaagcttctgcactagcaacagagtaaaaagacaatccacagaatgagagaaaatattcacaaactatgcattcaacaaaggactaatatgcagaatctgtaacgaccttaaataatcaaacaagcatgaaacaaccccactaaaaaaagagcaaaagacataaatacacacttctcaaaagaacatacaagcagccaataagcatacgaaaaaacgctcaatatcactaatcatcggagaaatgcaaatcaaaaccacaatgagataccatttcacaccagtcagaatggttattattaaaaagtcaaaaaataacatgctggcaagactatagaggaaagagaatgcttatacacggttggtgggaatattaattactccagccattgtggaaagcagtgtggatatttctcaaagaacttaaaacagagctaccatttaacctagcaattccattactgggtatatacccaaaagaaaagaaattctgccaaaaagacacatgccctcatacactcattgctgtgctattcacaatagcaaatacatggaaataactcaagtgcccatcagtggcagattggataaagaaaatgtggtatatatatataacacagaattctacacagccataaaaaaataaaattatgtccttggcaataatatggacacaattggaggccataatcctaaacaaattaatccacaaacagaaaaccaaatgctgcatgttcgcacttacaagtaggagctaaacattaaacacacatagacacaaatttgggggtaatagacactgtggactactagaggagagaaggcaggtggtttgaaaaactacctattgggtactatactcactacctggatgatgggatccatactccaaacctcagcatcacacaatattcccacgtaacaaatctgcatgtgtaccccctgtatctaaaatagaagttgatttttttttaaaaaaaaagtcaaaaaacgacagatatgctggcaagtctgtagagaaagggaacacacttatacactgttgatggaaatgcaaattagtacctcaaccactgtagaaaatagtttggagttttttcaaaggacttaaaacagaactaccatttgaaccttaaatcccattactgctatatatccaaaagaaaacaaacctttctaccaaaaagatacatgcacttgcctgttcattgcagcactatacaaaatagcaaagacatggaatcaacccaggcgcccatcagtggtgaactggataaaaaaaatgtggtacatatacaccatggaataccatgctgcaataaaaaagaatgaaatcatggtctctgcaacaacatgaatggagatggaggccattatcctaagcaaattaacgcagaacagaaaaccaaataccacatgttcttacttataagtgggaactaaataatggctactcatggacaataatatctattgatggcaacaacagacactggggactactagagtgggagaaagggaagggagcaagggttgaaaaactaactattgggtattacgctcagtacctgggtaatgggatcaattgtaccccaaacctcagcatcacacaatatacccaggtaacaaacctgcacatgtaccccctgaatctaaagtaaaagttgacataaaaaataaaaattaaaaaaattaaaagccccacaaacacaaaagcataataaaaatattgaacatcaaatataattatcactccatttttaatcaaccaaaaattttaaaagttatccttcttgtaatgtaaacaaatctttctatttgcaactgattaaactttaagatttttaatgataaaatataggaattcttacttaataaaaagacagagaatataattcttagaattctgtgcagttgcaagatgttgctatggcccttttgacagattattctcaagtaataaattttacaaatgtaactccatagttttctaggatatcctcctttacataccactaatccccaaattaaggacctacttgaaaaagggtcttgactggtgatctacatgaaaatccaatgcttctttcctataaaataatcaaaaaggcaatagttaagaattataaaattaaacacttattattttagcttacattaataaaattaagataaaatcctctcaatttatactaatttatattttaattaataatttttcaccaaatattctgtcaaagccactcttttaaaatattttttaagtatgagtaatatcaatgtaaataaaaattaatgtaggaggcaatgtttacttttctacttatgttatatattgtctatcttcttctttttttttttttttttttttttagattgagttacccaggccagagtgcagtggcacgatcttggcgctcgctacaacctccacctcctgggttcaagcagttctcctgttttagcctcccaagtcgctggaattacaggcgtgtgccacaatgcccagctaatttttgtacttttactagagatggggtttcaccatgctggccaggctggtctcaaactcctgacctcaggtgatccacccacctcggcctctcaaagtgctgggattacaggcatgagccaccgcacctggccttatccatctttttacacagcatcctgaacgttctagaaacaaaggttaatatttgaccagtgagaatatttgttctttaaagtctaaataagttgcatcaaaaaaatgcaaagccatcttctaattaaaaatttgtcatttttttccacaggctttaaacttaagagcttaggctagaattttaatttaatgtttatagctttttttcttagctaggtctctccaaaggaaagactacagtcgtgtttttaaaagctgcctgagaaattatgtatcttaatatgtttttattttattggttactaatgctttaactgacatcactaaaaaaggggagaatatggaaacatttagaattcagagtttattaattgtaacagggatttatttttacatttatattaccactaaagaatatctacagcggcaataaaagaatgcattttaaactgattagctaaaaagtctaaaaaactttttttaaaagcaaaccagatgactctcctaacactgtgtagttttcttaaaggctttgaactgggttcacagtatgtgacaaatatatgtaaacattaactacttttaaaactggaaactgttccctagcaaagaatcaacctttcaggcttgagaattcatttgatatgcaatgcttttaagattttatcaggatattacaaaatgaatttacataacaagttatatcacgcatactctcattctaaccaaatgtacttaaacattcatttggctatgaagagattatgaaatatgtaatgccaatatagagaataaaattcatcccgagacatggaaaggagaaaaaaatcaaaattttctagagccaattatagccatgattaaattattatatttattccttacaacaatatattgaaataggtgtgatcacctttattttacatcggaaaagaataaagttcagcatggttacataagttgtccagttcacaaagctagtaaggacaagacaagaagatttgaacccaaagctctctgattgcaaatttctgactgcttatgctcttgctactactaactgtagaacaacattctagagggtaaagagaaaaactcacaaaaaaagagatacgtatatactgcattacagcctaaaatggggtaaaactgaataactgaaaaacttacatggagagtaaattagaagagttagcagaagaatactaaaacaaccaattctaagcttttcaaacgcaaaaaactgaactacaagaaaggaaaaagcaatcataatctttaacgtcattgaaaagaaaaacctcaatccattactaaaaatgtttcattgttttcatccaacatgtccctgattccatagttatctccattcaaaatctaaaattgaaaccacgatgagagttcataaattttttcccatcattcttatctaattctttgctttaaaggtttagaaggaaataggtattaacaagtgaatcactatctagagaagttttttgttgttttgttatgttttgttgtgtttttatgaagaaactaaccattctttcacaaagatctatccattaaccctttcaagaaatatttacttaatgccaaccttgattgaggcactgatccaagaactagaaatacaaagtcatacagaactcagcagctatcttctggatattgtcatcatggcggaaccgacatttgaacaaacaattttagaaaagatgcatacattgtgagaaattcctccaggtgagtttctctcttctaacttgtcttatcgggtatgccaagaatgcaaggacctgactgatcttcatcggtgtcgtttctcaggattgtgtttgcaacaagaaaccttgagggataaggtaaagcctctcttcagtataaagagtaggcttgtttattgcttgctaatggaacagctggtaacccaagctcactcctcctcagttgtgatgccaccctctagatacacagtatacacctgggcattggtcattttattcctgtaggatatggaggcaaggagaaccaatataaacacaatgctcatgctgcttgctctaccattataaagtcttttgtctctgacccagaagtctcatgtcatctgctaacatccatggaagagttacaggtaacttcctagcttataaattggatgaaatctcaagctcaacatactaataaaaatatatgaagtgatatgaatgattagataagcagttaagttttcttgggaattagtttccatgagacatttgagttggttctgaacgatgaataggaatggatgagacagaagacaaggcagagcattcaagacagtacaatattatgtacaagaaaactgagatgtgataaagcacaacatgttcagggaactgaaacctaagtatcctcttagagctattacagtaggtgagtacagatgactaagagtcttgtatactctatcaaagagcttgtctgcttgaccatattttcctgcatatgggaaaccactgacggatttaaggaagggaatggtaacatgttcaaattttcattttatgaggttcattctaatggcaataagaaaatggcatggagcaatcttgaggtaggaaatgagccatcaaggaatagaaggtagtaagtcaagaagtagacaaatcagtcagtagcctatgttgatacgttgaaagcctgaatatgagcctataaaatgcctaaactaaggggctgcaataggaattataaggagagaattgctcccagagatatacagaaagcagaagtaaaaatatttatatatcaggtaggtatgaggaatgggggagcagcaagatgaatctaggatcactttcagattgacagttgcagagagaagtcaaggctgaagatgtatttggaattcatctataagtaagtggtaggtgatcatatggacatgcatgggactactcaagtaaagttgtaaagaaaataacatacaacaagctggatgcagtggctcatgcctgtaattctagcactttgggagtacaaggcaggagactcacttgaggccagttcgagactagcctgggcaacaaagcgagaccacgttttttaaaaaaacaaaaagcaaggatctggaggaatacctaattgaaatcatagtgaccgtcactgagatgggaaagcaaatagagcagagccctggatgatcactgacagagatgttgaagtcatcccaactgtcaggagacactggaatagaaggagactataaacaaagtgcccaaatctttaacaaatgtggagtttgtgaactgtagaatggaaatgaggctcagtggatggtaaaacaactaaataacatgaatttccaaggatgaagaagagtatagatttttaggagagagctaaaatacgctatatcgtgaccctgtgacataagaaacatttgtgagtgagcagcctacagggctaaaaggaaaggaatgtccctggagaagggtcagatttcaactaaactaaaaatgtgcgggcaaagatacactctgttaagacactatggacatagggatatttgttcacaatgaaacttgatttccagaggggccagtgaaaatggtttggtaagagatttgtgttcagaagactatgggaaaaggaagtgcataactacaaatgaacaggtgtgtcaacaagtaattagaagggcttgcatctgtggtactccaaagaatgaagtatttcaaaaggcatgggtggaattaacaagacttaaggtttcaaagaaactagcaaatgtatgccctatggtgctcttgaagtgtttgctggttttagcatttttcttcatgtgctatagggccattatgataaacaagtagcatctttaccacaggaagttagataccaagtcatcagacactagaagtatagagacactaaactcatgtaaccctcacaactactttatgagataggtactattataaatcccattttaagccaggcgcggtggctcatgcctgtaatcccagcaatttgggaggctgaggcgggtgaatcatttgaggtcaggagttcaagactagcttggccaacatggcgaaactccgtctctactaaaaatacaaaaattacccgggcgtggtggtgtgctcctgtagttccagctacttgggaggccaaggcaggagaattgcttgaacctgggaggtggaggttgcagtgagccgaaatcgtgccactacactccagcctgggcaacagagcaagactccatctcaaaaaaaaaaaaaaaaatcccattttgcaaatgaagaaataaacacagtggtcaactgttcagtcacacacctagtaagtagcacagttacaagcaatctggtctaaatactgtgctctgaaatgtaagcctcctgtctctctagaaaatatgtaaactaggagatcatacataagggaaaaattccaattaaacatgtcattgtcagggtaaaatggagggttttgtgttaaagtttctcggaatcagatgtattgaagctgacttgaatgtctactgctccccattgtccctgctctcacagaaacaaaaatgcaactgacccatggaataaatccagaaatgaatgatttattgaagcattaagaagatatctgaccaaaaacaaacaaaaactagtggagaaacataagaacactattggagccagatctgcctaactgctacattcctgtccctagagacactctgtgttacactcagccaaccagagggtgatcccaggaaacaaaggcctctgtcctatactcatctcccttcttcatcttccagaatgtttcagtctttgctttgtccatttggtaggaaattttttaaaaacaaatgtccaatatcatggaaaaatcactagttttttttctaaaggatctctaaaaaaaactgaagagaaggttttccctatcctttgtttgtacgttgttaatattctccttgccattcttacggggttagagttacttacttcatgatagaaagggataagtaaatgtataagtcttattttcactaaataacttagaaaatatctggtcaaacaggttgtactgcttgttagataggtatatttacctatctaggtaaaaaataaataggtatatttgcctattatttataataagaagagctaaatgtaaacatttccaaatgcatcatctttggaaatctcaacagtaaatcctcttgtcaaataaaaataatcagacatcatttcctctattaattttatacagtgtgttatccttatatattaagaaatgattataattatcaagcactggtgttataaaagcagatggggttttgaaagacaataataattaaatgaggcatgcataatttgacaactcctaattacttagacttcagtggttatttatgcatctgattacttggtgtcttattgttcttttctttcttctttttctttttgttgcctggtgtaatgcctacatgacagctgaatttctaccctgtcctaactttgcttatctttaagaaacaggacttctgcaataaaaggttccctttacaaccagaccagttaagactggttagaaccaagatatgcaaccaaatgacatcaaaaagacctcgggcttcattataatctcattttcatactatatggcactcccaccagcaccatgacagctgaaaatcaccatgacaatgaccggaagaggccataaaaagacaaaaaggaaagcagcactgcgattcaccatcaattgtgaaactggtggaagttcaccaccaatttccagaaaagacatgcatattgctcctcttgcttttcatgtcctttattagagaaatcctttattttaaccccctcacccctcactagttgagaagttgatttgtgagccacactcctgtttctcaattccacagacactgaataaagcctgcactgcttgatactcactttcggttttgtatatgggcttcatgacactgaataggaaaagatcaaatcttttagggggccggctttgtcagtaacattctagatgaactcctgtcagttcccattttggttaagttactattctattctttgtcattcaatacgaggttttttaattttaaacaatgacaagaaagacagaaaatgattttttaaaaaggaatcagacattacataactgaaaatgataaaaaaattaccttgaaagcatcatcattttgagtttggttatagtaaatccagctttgtttattatttcaattatttctccagcctttgatattgcatctggtttaattagggctagcgttctataaggaaacaaaaaataagtttgcaaataaaaatagttcaacagtttttatttataattcccaagcagcagtattctcaacaatcatcctagatcatcaaaatttgaaattaattgtatagaaaagtgtattaaagacatcccttaaaaacttacacaaagtaagcttagtatttttcccatgaacatcaaaattagatactaaacttgggggagggagaagcttaggaaaaaaagcactaaaatttaattatttttaatatatccaaatgagaaaacacaggcatttagaatctccatttcttagaatacattttatacaaaggactaatctctaaaacattgcattaaatatattatgagcttggtttttggtctcttagacttcaacatatgtatgctatatagtcagttcaacattgatttggaaataattataaattcttctattgactctttattcataacatgggtgactgcatgaagaatcaaatgtcttcttatacaacaatgtatatgaatacgtaacaacatgctaacttttaaaatcatgtttttctccaggaggatacatcagaacaatgcattctccactctccccctctgaagattcagaattaagagaaatttggagatgaagatcacctgagtgtcctcattttactaatgatgaaactaggcctaccaaggtaacatgacaaaggttacacagctggtcagcaacattttcaggacaaaacacccagtttaccagactcctaggtctgtccttccacatcacaaataatgttactattaatattattaaaaaggggcatcatcaccaaatcctcaagaatactatttgcaaatgcaacataaaaactatattagctggagtaattctgcttttgtgataaagaattgctgctacttttccctctgcatttccagttgttcttataacactggcattaattcaaggaatccataaaaggagaaaggttggtcttttcattttggatttttttcaccaataagacaaacttagctcaggataaaattcaaatatcctggccgggcgcggtggctcacgcctgtaatcccagcactttgggaggccgaggcaggcggatcaagaggtcaggagatcgagaccatcctggctaacacggtgaaaccccgtctctactaaaaatacaaaaaattagccaggcaaggtggcgggctactactagtcccagctactaaggaggttgaggcaggagaatgatgtgaacccgggggtcggagcctgcagtgagccaagatagcaccactgcactccagcctgggcgacagcgagactccatctcaaaaaaaaaaaaaaaaaaaaaaatcaaatatccttacttaaattggatatagcttatggctgagttttaaaactgtaataacaaaagaaattgttcatcttagtgtgtttattacaaattataccagataatgtttttctttattttaaagcagatgagtcagttatattactttatattgtctggcttcattgaaaacacacttaaaactcttcactttttaattcatattatttaaatattttaatccagactaacctataaactgtttatgctaaactctggaagaacatttcactgaccatggctcttaaagaaaaaataaaacatggcagtagtcatcaatgtctataaacaagaagcaatgtgaaaagtctaaaattgacaaacagcttaaaatgtaatctgattttctcttaaatgcctacaagagacaaaggattgactatgtgataaataactctaaataaattcctctgtcatgtctttgctgcttaatttttcagtaagtaatagtaaattgtattttggagggaaaataagagagagatcagcatcatatgtgttaatttaaaaataaagacagcacatgaagaaacaatagggtgacaaagatatatcagtagtatctctgttatctgtaactgcataacaaaccatccacatatgtagtggcgtaaaacaacaatttctcaaggttctgtaggtaggctgtgcaatggtttcacctaggatcattcacacagctgtattcagctagtgggccagctgggggctgtgctcagctgagacaactaggcttttctttcctgtggtccttaaggaggctagagcaggcctcttcaaataccaccacacatcaaccaatgtacaggcaattatcaagtgtccccttgagtcatttttgctgacatatctttggccaatgcaagtcacgtggtcaagctcagagtcactgtgagagaaaaccacaaggtatgattcattgagagccatcagtgtaacaatctaccacttagtaatcctcttgcctgcactgaggcaagcactgtaagatgcagcgtgagatattctcaaaagaaaacaaaacattataaaaaccactatttaagattaaaacttcttagcaatacacggtaactacttcttgtgaaaaaacagtatggccagccttcacgaacccagaatatagatttccagaaaataacaattctcacagagctatgcaataaatgtcttcatataccatcaggttctgagcaaaaattgcagcaaatatatttctgagaaagatgactgattgcagtacaataaatgtcccagacagtatagtgctattgctatgtaataaagtcttagatagtacagtgctattaaacatcttagatagtgcagtgctatggactctttaaatgccattgaccaaaaagaataaatatgtaaactttaatctatatgggattcatatttgtcttaagtaaatattctattctaaacctattctaaaagtaaacctattctaaacatcaaggctaaatttttggtttttctcatactttgtttacaagcataaagtgtatatctgccccatggataaaggaaaactgtctcaaatgaggcacctgtaatttggtggaaaattcagtgatcaagacttttgcttggcaacaatagcaaaattattcagaacaattcttccaccaaaaactaaaaaagttgatatttttaaaaaatcttttaaaaattaaagataaattgactagatcataaataattactgggacaaaagtgaaaaaaaaaaaaaaacaaccaaagaatgaaaagtaagaatgaaagttgtttttgacttgacagcattgcctatctggaaaatctgaactttgatttgcagtacatcattgggaaagggtaacagaacccaagagatgatccttcctaaaataatttggacccaaaggctataccacccccgcttaaggtgaatcagaaacaaccaggtcttgaatggcaatacaagttcacatcatctaagcagtctcaaaacttagaatttttgaactaccaatcatacagactgctaatgcctatgggaaaaagacagaagcaaagacaattaattccctcctagtaggaaagtaatgtcatcctgtacctcaaataattcatatgaaaatgcatatctcacatatattatttacatatatgcaatacacccacacatacacacatggcaatcatatagaaagataatcacacagacacatacacacatacagggaaaaggccaacatgagggaaaaccaggagaaacaacagaaaagagagagacccacaaatacttcagatactaggataatcagagaaaaactgtaaagtatctgtgcaaactatggttaaaggactaaaagacaagctacaaaacattatcaggtaatagaaaactgtaagctacaaaatggaataagcagatctgaaaaagaatatattagaatatcttgtgatgaaaatacaataatgaaaatgagaactagataaagggtttgacagaagaaagcagattcagaatgaagcacagagaaacaaaaagatacaacagagataagaaaatagtttcatgaatgtaagtgaaataaagacattttcagatgagtgcaaactgagttttctattagtaaacacactcaaaaggaaaatattttttaaaaatgtaatttaagcaaaggtaaaataatcccaaacagaatgtttgagataaaagaaaggataaaaagcaaaaagtgaagaaacctaaatgaatactcattacataaaacaataatagtaaatcattaggttcatggaaaaaaaacaaaaaaaaatacacaacaaaaacagcatataattcagcaaaaatcccaacaaaaattgagctaaagtcttctgagattcttagattttaaagaaggaggttaaaatattaattagatttaagctttatcaagttaagtacatatgttgtagtttctagtgtaaatactaactgtatatagaaaaaaaatagatgaaaaaaatcctcaagcaatccgaacaatcaaaaataagataataaaacaggcaggagaagaaagctcaggataagatgtcagagttaaagccaagtatattagtagttacgttacaaataagtgctctacagtagatgcagattataaaactgtatttataaaaaaatttttttaaaaagataatctgattggattttaaagcctagatgataggttgaaaggtgcagcaaaccaccatggcacatgtatacctatgtaataaacctgtacattctgcacacgtatcccggaacttaaagaaaaaaaaagatataaaaaacaaacaaacaaaaacaaaaactaatgaaaggcacacatagaagagaatactgaaaatctaaagtaaaaagaatggaaaaggtataccatgcgaatgttaactaaaagaaagccagtgcagctatagtaatatcagagaaagtacagtttaaagtaaaaggcattgctagagatgaagatggtctcttcatagtaataaaagattcaatttaccaagaagatataacaatttaaatcacctagtaacatacccttaaaattataatataaagactaacataactacaagaagaaatagacaaatgataattacattagaaaattttaataaaaccttggcaattgatagaataagctgcccaaaaattagtaaatatgtgaaagatttgaacatcacaattcacagacttcacctaatgaataaatatataaaactatacaaaacaactgcagactaaacattcctttcttttctttctttcttttttttttttctttttttttgagatggagtctcgctgtgtcacccaggctggagtgcagtggtgccatctcagctcactacaacctccacctcccgggttcaagcaattctcccactcagcctcccaagcagctgggactataggcacacgcctccacggccggctaatttttgtaattttttagtagagacaaggtttcaccacattggccaggctggtctccaactcctgacctcaactgatccacccgcctcagcctcccaaagtgctgggattacaagcgtgagccaccacacctggcctaaacattcttttctaacacacatagatcattaataattgactattctaagccagaggcaaatcttaaccagtttgaaaggcaaaaatcatgaagaatatgtcctctagacacatgcaattcagctagattccaatacaaaaagagaaaaacaaatctccgtatgtttggaaataaacataattctaaataaataataaaccaaagaagacaacacaaagaaagtaaaaaatgtttcaaactgaataaaaattacatatcaaaaataataggatatagttataagcagttagaaggaaatttatacccttaattgcatatattaaaaatattaaaaattgatagaatatataattctgtaactactaatagcagaaaaggggaataaagaaaattggtcaataaccatcaacttagaattgtgtgtctagcaatagtatcattaaagaaagagggtaaaataaaaaacgtgcagattaaaaagaaacgggtagtttacaatgaagaaatgaagaataacaagaagagaaaatattctaaaaggacaggttgatatgcaagaaaaattggtgaacaaatgtttaggtaaatctaagcaaatgttgtttctatcaaaataaataaataaataaataaaagaatgtctaacatgcaggcaaaaaaactgaatgtccaaaaacaacaataataacaaaactatgtaagatttaagagagaagattagagctaaagtgtcctaatcttgttgtatgagttgggagagagccatattattatagaactgtaagttaaatatatgaaaaaatttcaagcctaaccaataaagaacaagtataaaaatcacataacctctaaagcaacagagaatatagtaggcagaataacactacccctcaaaaatgtccacattataatctccagaacgtataaatatattacctcacctgccaaaaaggactttgcagatgtgattaagattacaggccttgagatagtagagattattctggattattcccctgggcccaatctcatcacatgagtccctaaagtcagagaatctttcctagctttagagaaccagagagatgtcagtgtgaggaggactcaagcctgctattggtggctttgaagatggagaaaggtggccccaaaccaaggaatgtggatggcttcaagatgttggaatgtgcaaggaaattgattctttcctagagcctcaagagaaatgcagtcttatcaacacctgatctttacctgatgagatctgattggacttctgacagaactgtaagatcataaatttgtattgtttaagtgactaacttggtagtaatttgttataacttcaatagaaaaccatataatagaaaaaaaaaactgaagagaggaagaaaaatttcttcaactaatccaaagaaaaggcaagaagaaaaaaatagaaaaacaggaaaacagtaaaatagaaacatatacaaaaataacaataatcacagcatatttcaatgtacatgtattaactttaccaatgaaaatataaccattccagattaaattgaaaaaaaacctatatgttatttacaagagacatatctaaagcataacagggcaagtataaaagagatggcaaaaagatattaattaacccaaatacgctatcaatcaaaccctttctaaggaaagatggctcaagctggagctgaaaaggaaattcaactctaatctgttaactgaccaaggaccatatgactgagaattgtagaatggaaaggcagaattcttattttacagaaaaaaatatcaatttctccctgggaatttaataatgagaaggcattcttcattgtattatttgggaggcagttacactgttgttgggtctatcgtataatcaatagcatgccatcttagacaacgatactatagataagtaaagatgagaaaaagattgggggtgagtttttagcaaggcctctgttactgaactaaggtattcctctaaggcattagggtgcccttctgcagccaaaactcaactgctcaccactggtcctaggacaatatacaaagcaacagtaattggtattgagggaaaggtttcccaaaggtgagagcaagactaaactaatattcatctggtctgttccccgagaagtagccatagtctactagagcatggcagccaattggcttaaaggtataaaacccagaaaacaactaggaatgtgtactcttgctcctcatgagtaaagtaacttctatccctgttcccataagaaagtgctctctctctctacttcttccatttgcttctccatgtccggccatatttaagggtttctggttatttgtggcccgacctcttttttctcagacctgcagaccctcaagtaggggatagtgtacaagtaagggatagcgtattgttctcctgctttcacatgttaagcacattggaatcagagtccggcacctgcagtggaagcctgtttctctctagtgctctctctcctgtgctccatgggctgggaggcaggatgagaaccctgggcaagtatgcccttagtttgttctgtagatccaacttttcctcaggcaggcctcaagttccagatcagtgtaagggatagaggaaataggaatagaaagaaagcctcaaccattctcaaacacgctttcacaagacagcctaagtaaaattaatacttaatattttgatctacatctatctcctgtgttagttcttcatcagttagtaatttggagggaagaatggagactaactgagctcaagagatgacaagaagctgttttaaggaggaatgtaaaagataaaaaagagaagagaaataagagagatctatgaaggagacaagtaaattggtaagattaggtccccatgtggatttagggataaaatacatatggaactcaaggacagccaccaattttgtaagtatgtaattaggtgaatattgtgttagtgcatacagaagtaggtttttcaatgaaagagaattaatttaattttgaatttgtcaattaattcaattttggatttttaagttcctgtgaaaaatctacatggaaacgttcaggaaaaagcttaaacatatggttttacagctggggtgatgacataaatttggaaagcaacacattgttgaagtcatggagtacatagaatcccctgggagagtatatagaatgagaaaaaaagggccatgaacagaaccctggggaataccaggagtcttttttgcctctgagaaggaatgactctgagaaaaaatagccagagagatagagatggaagcagcggtgggggtagcggtggtgaagtgccataacaaccaggggaagacagaataataatttttaaagtattctaaacttaatttattccagttgggatggaagaacagaagaggtacattttttgtatttattaaaattaaatttaatttaattttaattttaattttaattttaatttaatttttaaatttaattttaattaaaattaaaatgtcttttaagtcattcatacattatgatatcccaatactgtaatcctgctaaactatataatacctgaacactgaagttgtttcaaacttgatatagccaagattttatgacatttccttccaatgaaatttcttcaaacatatatctgatgatactgccaaatcttcacatagaaaaaacgtatagttcatatgagtcaaattctaatattagaaaatgtatgttcatccataagaattgttaaactacataagtctagaaaacatataaagtattatttcagtaccttttaaaaaattatcaattaagcaaatgcttggaatttttgggctgtatttaaaaattcaaaaggtgatttagttcaaaaggttatttaggtcaatctccctacctccagggagaagtattcttaagccccttccaagcacaggtctcatctaaaatacggcttgtttttttatccatataccatttcagtacatctccaagaggacaggaaaatgcatactgtgactgagttcctgctgtgatggagcctcaaataacttgggcttagaccttgggatcaaagattatacacacagttgacttcataatttttcttctgaaaaacaggggggtcttcctttcactgaaagttaatagatgggcacaagaatttcatgtatttaacatctactataatgttgttcacccaacctactgatgcctttctccctttaatttgattagatggcttgctttctggctgagactcaaaaggaatgaggattgctcaatgtaaatatgtggctcagtacttaaaattaatggatttttaaataggatactagcattatttttcattgatttttataaacttcttactaaagatataagctatcaaagtaaacatttaatacctcacttatcacatggggaatagctgtctattcatataaaattcctctatcattcatacacatgcatacatatacatattgactcatcatatgaaaactttaattatttctggtttgaggtaataaatttttagaaagacacaaattgtatcgtgtctccaaatctaaacaacaatcataaagcaccaattaattactagctaaaattaaaatcaaagactgactcattgacaacttgtaacctttatccatttgattagaggatctttataaagagaggataaaaatgtgaatcaaatgtcagatttctacagtcaaagggaattggaaagctgaagctagttcatgagttaagctgaattatattaaattatctggataactgctccccaattagctgataggctccatggggatcaatttcactcatcctcctcactacaggctttactatagaaagaaaagagttgaaaatgtaattggttcaaaaatttttctcaacactatacaaaactgagaactagactaaatcggttgttacatagaaggtgtttctgtggaacgctgatagacatacacacatatttccatatgcttactttttgccatttaaataaaacaataaatttttgaaactcttcggtttggaagaagtttatttaaatcacccaaatggttgttggatttactaacccatatgcaattaagaaagaataagaagagaaaatggtgaatcaatttgagtcagtaaaatatatactacatatattttcattttcattaactatataaagcccaaatacttcaaatttgtttttacattaaaatagaattcttctgttcatcctgttttaaaatcagtcccattcaacagtatttgccagcatattaattagaggtttagtagaaagagaatgaattttagggaaaaacaaaacacggttttctggtttccctttactttctagctgtgttactgtggacaagttacttacccattctataaaatagatttaacaacattcacttcagtcaaatcatagttaaaatacataaattataatttttatggttgttattttatttttcttaggtcagactgttaaccctgactccctaactcacttattttgctagtttaaataaaaatttaaagcagtcttccagcctgggcaagaaggccaaactccatctctagcaaaataccaaaaaattagccaggaatagtggtgcatggctgtagttccagctacctgggaggcttagatgggaggatcacttgagcatgggaagtcaagggtgcagtgggctatgatcatgccacttcacttcagcctgggtgacagagccagaccccacctcaaaaataacaataattaaataaaataaagtagtcttgaactgaggtgtatgtaaagtgcatatcatagtgtctggcacatagtatgtgctccataaatgaatgctacacatatttatgagttttaaataaaggaattatggttggcatttctttaatcccaaagacttttacataagatctcataacattaaaagattcctatttatttatctaatacctgaaatttctgtcctatttcaaagagagtctttggtcttcctttttaatgaggcatgcaccacccctctgatccatcaccatttgtgtactaacacccacactaagaatccaatcacctcaagagctataaagtgcttatacagaaagactatggaagtcacagaaagagatatcatattactataagagtgactcagacgttaggcaatcagctagtcatttgagtagtagatctcaaaaaatagtttgattgatttgttttccctattgaattaaatcatttttggagccttttatacatatagccttaacttctacaaataatccctattttaattacagcaccaatcactctacaggaaaaaaaaactccccaaaccatacaaagtataagctacagaaattaaagccaagaaagatgacaaaggaattaaaatttcacttcaaatataattaattctagtctcagaaagttgaaattcataaatgtagagactgaaaattaaaatgtcatcttgctaatactgaaaatcagtattcagaaggaaaacatcaaaaatccttgttttcttgttttctataagtctaattttcagctgtatctacaagttgttctttctcttccattttttttcttagccccttttacagatgactgtatctcttctaaatcaaaactgagaaaaagaatgatgaatgcagctttgacaaacaatagagagaagaacagggacacatgtggaggcaccatgtcacagtttctctcacagaaagagccacatgcagtgggaggaagatagggaggcggggatgccagccagtgggaaactcttcctttagacataccgtacctccagacatttcgatgacataaatttattcattcatatatttaacaaacttttgtgggtcacactctgtgaataatttactgtttgaggtatcactacaacagtttttagggatacagttatgaataagatacatcagtctccctgtatcataatttctttatatggtttcttttttttttcctttttacaacactcacattgtcatttttcaattgatccgttggtcaacatctattagatataaatatatatatatatatctgttaacaaaacttgacaataggcagcattagttacaaacaatctaggcaaaaacctcctggtcaactagatcaaagatcatcatttgaaaacagggagaaagtggaaaaaggaaagaatagatcatagattttaaattgtgattcattaattcgttcagctaatacagacaaggtgcttgcaatgtggatggagatgtgctaagtgccacaggagacataaacatgaattaagtcagatgagacatgcacaactatggtattatcaatttttttttaaattgaaaaaaagaaaaagaatgaagacaaccattttccaggtcctatccatcctcatatggttacatactcccagtcttgattcagattgactttgaacccaaagttagagcatgtaaaaagattatataattgttttcttacttttctttcctactgcccagctggcgagctgtatattgatccccatagtcaattaataccagttgtcgagaaaagacattcactttgttgcctataaataaatcttccaagtgcaggttatcatatttggtccgctttaaaaaggtgcgatgattctttacatcatgctagaaccagacacaacaatataacaaacaaacaaaaaaagttatgaataaggaaagttaatctcatcataaggtagaaataattcttaattctgtcttatcaaagataggttatattctgtttcttttttgttacaaatataaatcataatttttaataacttccatatttcctaatccaatctggtaataacataaaagcttcttattacaaatttaatactcttaaaaacctgaatagaaagatttgtttattaccaaatcatttcagcaaagtagtccttacaaaatgctaaagaaagagtcatacacccaaatttctgctttcttgtgtacacaaaatcccaataccaaaaagatctacttgttaaaattgtgttgccagtgaaagaacacaaagaaacagaagtctcttagcttgagcctcttcaatttgactttttgtagcaataacagctttcaataatgaggacgtatttatgaccataataatccttatctataatcacttgtttatttcttatccaaaacatgaataatcccatttcagtcttttttttttttttttttttttttttgagacaagagtctcatgcagtcgcccaggcaggacaggcaggagtgcagtggcgtgatctcagctcactgccacctccacctcctgagttcaagctattctcctgcctcagcctcccgagtagctgggattacaggcatgtgccaccacacccggctaattttttgtatctttagtagagatgggttttcaccatgttggccaggctagtctcgaactcctgacttcaagtaatctgcctgggtcggcctcccaaagtgctgggattacaggcatgaggcaccgcgcccagcccccacttcagtcttctaacaacaacaacaaaaaattcctatttttgacattaaaaataaaggcacaagttaacttcttatattggaattataatgaataagtttaaaaagaatttccatatgtatatatacacacacacatacatataaatgtgtttttaaaaagcaattatataaaaggcaatggttcccatgttcaccccctttgccaacattcaagcaaagaaaggcttatttaccatttcaacagatccatcccctgggtaaaataaaagctcataacgtcgaagaagtgaagcatttggatcataccactctgcaatgaaaacgaatctttcactatgattctgcaaagaaagacagaagaattttaacactaacatataaagaacaagcactcttctgtaagtcacacaaaatgaaattaccaatatgcaagaaacaaaattacttctacctattatattgaatgtttctgcttttcaacaaagtatcagttatcaacacaccctcagcaatatttcctttcaatttctcactaaatacccttagatatctcaaagatgacttatggattgctttttactttacagccatctaatcatcctgagtaaattaacgttttctgagaacatgagctcctgattttactattgtaacaattcagtccttctgaaagcaagtttacatacagactatcaataaactaatataagaataaatttctgaggagagctctcaattatatgaagttttgacttccctaaatttgagaatctagtagtatcagaatattaccattaaaattatagcaaacatttttttttccttagtaatttcatatgatagtatctttttatagaaatagagaatgtgttagtctaggacctctgaaaatgaatgtgaagacaagattgaacatacaagaatttcattaaggaaaattcccgtaatataaaatgatgagggagccaaggaagactagaaaagccgataaaaacaatagaagtttgacacagagtggtggagagatgcaaggaaggttaagtggaatcatcccacattgctacaccctctaagaaaggttctgtaagcccatcaggaagtgctagagccaggtgactcccaaggacagggaggggccagctttagtatccctgctcctctcaatcagtggctgggagcagcctttgggaagcaagtgctcagcacaaaagcagcagtggatttcagagaacagcagctgggacccttggtcacttaggttgcctgtagttggaggtctgtgaagtacactcttagggctaccacagagagcaaaaaatgaaaaaaataagtcaaagatgggtccttttcccttgactattgagcaggacttcccatcatatatgttagtaaaaataccctcgccccaaagatcttcattataataagcaaataaaagcatagggaagaagggaatctaggagttttattgctaattctggatttgccatctgatgctctggttagggaaaatttgggggttctttttaagttaataattgacttataaattctaatggtagaagttgtgtgtctaatgatgtttataatatatccataaactataacgtagatgacacttttatttttaagacacttttatttttcccacaatcatccaaagacatatttaaaccatgctgattactcaagagaaaataaatgtaaaataagagacatactatgacatttgtaaaagcctttcatcatatatatttttcatattgattataacaatacagcttttttgagtttaggtttcactgtgcattctagtattgtactcacctacaaataaaaatttaaatattagtagattattaaaatttttactatccataataaaatatttatttaaatacataattgaaatgttgccttcactaaaataaatataaaatagaagaaatgacacatctaactaaagcaaatgaaaaatccacgaaacctggtacttccatttatccatgtagcctatccaccaaacctgccaaccacactctttaattctgaattgggcagcagaattttgcactatactctatccagaaaagagttttaatacaaagaaaataaactgaggaactgttgcttctggctatgacaaagtagctcacagcaaaccaatgctacttctaagaacaactagaaaagtaggatatcaaagatttggagagcttttaaggcagccaggatctgaggatccaagatccagaaagacaggaagcccattgaagtgaaaccaacattcattgcgttgtctttactcgtaagacatgtgctgagtctcaagtcaagcagacaagtgactgagaagcctaagaagctggtagagggagcccaccaagggacagagaaacaggtacaaaagtgagctgaaacctgtgcttgttcagtagagcttttggaaacgaactcccaagctagtgctgtttcctctgtgggaaaaggtttattactccaagtacaaattatattcaaacttgatttaaacttaactttctggtttacctttacagtaaaaactgtgtttacttcctagagttaaaagatgtacctggagatataacagtggtacatctggacttgggataaaacatcacagtgaggttggcctttcaactacctgcctgacacacatgcacatacacacaccatccagaccaaagccacccttaaaatttaaagaaaatttacttttcagctttgttgagccaaatctagaaaaaaggaggaacttggtttccttcctcaaatgctattaaagctatatatcattttgttttaactcttcactttatggataaagaaactgaactccagataatataaatgactagcataaggtcacagagctggttaataactgagccaaaactggaaactacatttcctatgactcagatatttccatatcactagccttccagggccaactcaagagagagaaactaacactttagtagcacatagatacaccttgagttgtctgtcacagatgctctgatgagaatgccacaacctaatgattacacagacaatcattagctccttcttccctgaagattccaacttctatcaaaagtactttatgaggaacatttaaagattacactgcatcaaaaagagactttcttaaagaagccaaatcatttttcctcttttgaacattttaaatataagttatacataataaaagagttgatccctcacacataatcacactttgttccagaaatcttaaagtcttaaaggaaaatgtgtattattataccagaagtcttgaagtgacttgaactggacaatgtggtattattatacccagaagccttagtatcttaaagtcttaaggtctctgtctatacagagagaactttcctagagcaccagtcttactcgatggtaagtaacgtaaacaatttttacactgcaacatgcatatatgtgtatataaatatatgttattgagtggaatgtaaaattcatataagttttataacaaaaaataggtgattttatggaaatattgaccaatattggaattgcaagtgaaattatatttgaagattaaacaagtctttggagaaataaatcacaccaccacctctctctgctactgtttaaaggaaggtccagctttacagtggatcatatgaaattaacaatcttttccatacagatatactttaaaaaatccaaactctcagttcaagagtaagtttaagcgtatgttaccaagcaaaattgtaccttggcctcatttcaataatactgatcagaaagctattccattcctgatgatactatgatcatcaatcaacaaataccaactgggcctggtactactagcatgctgagtgcaacgagcacaccaatctgataagtctgctgctgctggtgctactgctgctatcatttgctggcagcctacagcaagagacatggccctgaaatgtgttgcttaaagagaagatccaggaaactataaaggggttttttggagggggggattatggaggaatatttgtgagagtccaaaagacctgggcaagacttaatgtctctaactctcattttccccatttgaaaaatggaaacagtactttcttcataaggtagttttggggattaaatgacttagtttacatgaagcacttaggatttctgttgcctatgtctcccaaagcgatgatggtggcttataggtccacctgtgactttagaactgcattgtacacactcatctccctcactgatctttttctgacatacaagaagagcaactctggatttgtgatgatgcagcctcagctgcaactaaccctaggtaaatagttttttaaaggtctttgcagaaaaaaatcagtatgaaggaaaaagggatttatgatggacaaaaaaatgactaaaattatatttataaatgaaaataaaaactattgaacatataatactaggtaaatttttttgtaaaggatatatcatattaataaatcagagccaaagtacaattcttaccttttggggagttcaaacagttatagatctgtttttgtcaataaaaattttagtaacaattttctttttaaattttataacactatctgttgcacattcatcattagttttataatggacttagggtgccccttaaagcagatatagcttagatcataatacccaagacttttcaaatacatgtaaagccttcctaagaaggatgggtacaaacatgccaagattgcagactacagtaaatacctaacttttcagtgcccagacacagatgaacatccacaagtatcaagatcatccaggaaaatatgaacttaccaaataaaccaaataaggcacaagggaccaatcctgaagaaacagagatatgtgacctttcagacagagtattcaaaatagctctgctataggtttcaaaatcaaccctggctaggggcctgaagcaaaccagtttagtgctaacaacaacaaaaaaaaaatctgatctaatttttttcactttactttctctcccacatattccttatttctcactctaccgctccaagcttcaacttccttgttcctaaatattttatgaaaaagttcaaaacactttttcttctggataagtaatatttgtgttttcttaatgtcatgctgtggtttgaattttcaaatttcatgaaaatttgtgtttcctgaaaaaaaaaaaaaaaaaaacctctgctaaggaaacccaagaaattcaagataacacagagaagaaattcagaattccatcaaataaatttaacaatgagattgaaataattaaaaagaatcaagcagaaattctggagctgaaaaatgcaaaaagcgtactgaagaaggcatcagagtcctttaatggcagaattgatcaagcagaagaattagtgagattgaagacaggttatttgaaaatacacagaggagacaaaaaaagaataaaaaacatgaagcacacctataggatctaggaaataggctggaaagggcaaatctaagttattggtcttaaagaagaagtagagaaagagataggggtagaaagtttattcaaagggctaataacagagaccttcccaaacctagagaaagatatcaatatccaaatacaagacgattatagaaaacattaaacagatttaatccaaagaagaccacctcaaggcatttaataatctaactctcaaaggtcaaggataaagaaagaattctaaaagcagcaagagtaaagaagcaaataaacaatggagctccaatacatctagcaacagacttttcaatgggaactttacaggccaggagagagtgtcattacatatttaaagtggtgaaggaaaaaaagactgttaccctataatagtatatttagttaaaatatccttcaaacatcaaggagaaataaagactttcccagacaaacagaagctgagaaatttcatcaacaccagacctgttctatgagaaatgttaaagggagtacttcaatcagaaagaaaaagacattaatgagcaacaaataatcacctgaaggtaaaaaactcactggtaatagtaagtacacagaaaaacacaggatattataacactgtaactgtggcgtatagagaaatgcaaatcaaaaccacaatgtggtaccatctcacaccagtcagaatggctactaagaagtcaaaatggctgggcgtggtggatcacacctgtaatcccagcactttgggaggttgaggcaaaaggatcacgaggtcaggagttcaagaccagcctggccaacatagtgaaacccccatctctactaaaaatacaaaaattagccaggcatggtggcaggcgcctgtagtcccagctatttgagagtctgaggcaggagaattgcttgaacccgggaggaggagattgcagggagccgagatcgcaccactgcactccagtctggtgacagagcaagactctgtctctaaataaataaataaataaaatccattacaaatgttactggagaaattaaaaaaatctttagtggctactacaagcaactatatgccaataaactgaaaactctagaagaaacagaaaaataaccagatatatacaatctaccaagattgaaccaggaagaaattcaaaacctaaagagaccaataacaagtaatgagatcaaagccataataaagactcccagtaaagaaaagtccaaaaaatagaggaggagggactacttccaaactcattctacgaggccagtattaccctgataccaaaaccagacaatgacacatcaaaataaataaataaataaaactacaggtcaatatctctgataaatattgatgcaaaacttgtcaacaaaatactagcaaactgaattcagcaatacattagaaagatcattcattatgaccgagtgggatatatccctgggatgcaaggatggttcaacataagcaaatcaatcaatgtgatatgtgatatcaaaagaatgaaagataaaaaccatacaatcatgtccattgatgttgtaaaagcatttgataaaactcaacataccttcatgatgaaaactctcaaaaaactgaatatagaagtaacatacctcaacataataaaagcatatttgacaaatatgacagacccacagctagtatcatactgaatggggaaaaactaaaagcctttcctctgagatctgaaacatgacgagggtgcccattatcactactgttgttcaacataataatggaagtcctagctagaacaatcagacaagagaaagatataaagggcatccaaattgaaaaggaagaagtcaaattatccttgtttacagatgatatgattttatatttggaaaaacctaaagactccactgaaagactcttagaactgataaattcagtaaagttgcaggatacgaaatcatacaaatatcagtggtatttctatatgccaacagtgaacaatcttaaaaagaaattttaaaaagttatcccatttacaatagccacaaataaaataaaatacctaagaattaacaaaagaaatgaagatctctacaatgaaaactatgaaacactgatgaaataatttgaaaaagaccaaaaaaaaaatgggaagctattccatgttcatggaattggaagaattaacattgttaaaatgtccacactacctaaagcaatctacagattcaatgcaatccctatcaaaataccaatgtcgttcttcaaagaatagaaatagaaaaaacaattctagaatttatatggaaccacaaaaaactcagaatagccaaaaccatcctaagcaaaaagaacaaaactgaaaaaatcacattaactgacttcaaattatactacagagctatagtaacccaaacatcatggtactgacataaaaacagacacatagaccaatggaacagaatagagaacccagaaaaaatccacacacctacagcgaacccattttcaacaaaagtgcaaacaagatacactggggaaaagacagcctctttaataaatggtgctgggaaaactagatgtctatatgcagaagaatgaaactagaccccctatctccagccatatacaaaaataaaataaaaatggattaaagtcttaaatctaagacctcaaactatgaaactactacaagaaaacatgggagaaaatctctaggacattggtctgggcaaaaatttcttgagcaatgccccacaaacataggcaatcaaagcaaaaacggacaaacaggatcatatcaagttaaaaaccttctgcacagcaaataaaacaatcaacaaagtgaagagacaacccacagaatgggagaaaatatttgcaaactaccaatctgacaagggattaataaccagaacacctaaggaactcaaacaactctacaggaagaaatctaataatccagctacaaaatgggcaaaagatctgaatagatatttcttaaaagaagacatacaaatggaaaataagcatatgaaaaggtgttcaacatcactgatcatcagagaaatgtcatcaaaactacaatgagatatcatcttatcccagttaaaatggctcttatccaaaagacaggcaataaaaaatgctggtgaggatgtggagaacaggggacccttgtacactgttgttaggaatgtaaattaaaacaaccactatggagaacagtttgaaggtttctcacagaactaaaaatgatccagcaatcccactgcagggtatatacccaaataaaagggaatcagtatattgaagagatatctgcactcctatgtttgttgcagcactgtttacaatagctaagatttgaaagcaacctaaatgtccatcaacagatgaataaagaaaatgtggtacatatacacaatgaagtaccattaagccataaaaaagaatgagatccagtcatttgcaacaacagggatggaactggagatcattatgttaagtgaaataagctaggcaaagaaagacaaacatcacatgttctcacttatctgtgggttctaaaaaatgaaaaaaaattgaactcatggacatggagagtagaaagatggttatcagaagttgggaagagtagtgggaggctgtagggaaggtgggggtgaataacaggtacaaaaaaaataaaattaaaaagaatgactaagacctaatatttgatagcagagtagggtgactgtagccaataataacttaattgtacattttaaaataacttaaagagtgtaactgcattgtttgtaacaaaaggatatcaaaaggataaatgtatcaaaaggataaatgcttgaggggacagagcacattcaccatgatatgcttatttcacattgcatgcctgtatcaaactatctcatgaaccccataaatatatatatctactatgtacccataaacatttaatattttaaaaaaaaagaaatttgccaagatcacacagcttataaacagaggtgaacccaggcagcttgactccagatctgctcttagacactctccttaactgtggcaagaagggatggaaactcccttctgagagacactggactaagcagcctatataagctgcagtgtttgctcgatttctagaaatagcaactatattctttcaatttaaccccctattaagacaaatcaggttttaaaaaccaacacaaccacaacaataaaaatcaggacatacttatcagacttgtaattctaacagtgcactgaaaaaaatgtacattgcatttttgtaatgctgtattttaggaaaaattacttcacaataggcagcaaaatatttttgttcatacaaaagtgctcccttctttaaatcatactaaatggattccataatgcatgatggagaaatatcttaaactaactagaagtcttattttcatgatttgcatgttgaagggtcagtaactagtcaatctatttcaagccaagtatctgcttctgtttgacttcaaagacattctggagtaaattatgtagatgataaaggttacagttcaacaagcttctaaagtttagtctgagtctccatgaacccacattcaccttgaatgacattataatagaaatcaacagcatgagtaatcaaaacagcatggtatgggtagcaaaacagacacatacaccaatggagcagaatagagacctcacaaataataccacacatctacaaccatctcatctttgacaaacctgacaaaaacaagcaatggggaaaggatctcctattcagtaaatggtgctgggcaaactgactagccatatgcagaaaaatgaaactggaacgcttccttacactttatagaaaaattaactcaagatggattaaagacttaaatgtaaaacccaaaaccataaaaaccctggaggaaaacctacacaataccattcaggacataggaatgggcaaagacttcatgacaaaaaggccgaatgcgattgcaacaaaagcaaaaattgacaataggatctaattaattaaactaaagagcttctgcacagcaaaagaaactatcatcagagtgaacaggcaacctatagaatgggagaaaatttttgcaatctacccatctgaaaaggtctaatatccagaatttacaaggaacttaaacatatttataagaaaaaaacaaacaaccccatccaaaagtgggcaaaggatatgaacagacacttctcaaaagaagacatttatgtggccaacaaacatgaaaaaaagctcaacatcactaatcatcagagaaatgcaaatccaaaccacaatgagataccatctcacaccagttagaatgacgattaaaaagtaggaaacaaggtgctggcgaggctgtggagaaataggaatgcttttacgttgttggtgggaatgtaaattagttcagccattgtggaagacagtatggtgattcctcaaggatttagaaccagaaataccatttgacccagtaatcccattactgggtatatacccaaaggaatataaattattctactataaagacacatgcacacatatgttttctgcagcactatttacaatagcaaagacatggaaccaacccaaatgcccatcaatgatagactggataaagaaaatgtggtacatatacaccatggaatactatgcagccataacaaggaatgagatcatgtcctttgcagggacatggatgaagctggaagccatcatcttcagcaaactagcacacgaacagaaaaccaaatactacacattctcactcataagtgggaggtgaacaatgagaacacatagagaggggaacaacacataccagggcctgttgtggggtgggggatgagggaagggaacttaggggacgagtcaataggtgcagcaaatcaccatggcacatgtgtacctatgtaacaaacctgcacgttctgcacatgtatcctgatttttttagaagaaatatatataatatatatgtttatatattttatatatattaaataaataatatatatttaatatatacttttatatattaaatatatatttatatatatgtttcagaagagatatatatatatacatatatatagaaagaaatcaacaccatctaagaacctgctccctcaagccagctgcttccagtaagggtgagtgaaaagtggcttctaaacaaggaaattttcactttgccttgaacattctgagaacatagtgtgtccggaattggtgggttcttggtctcaccgacttcaagaatgaagccgtggaccctcgcagtgagtgttacagctcttaaggtggcgcatccggagtctgtcccttctgatgttcagatgtgttcggagtttcttccttctggtgggttcgtggtctcgctggctcaggagtgaagctgcagacctttgcggtgagtgttacagctcttaagacagcgcgtccggagttgttcgttcctcccggtgggctcgtggtctcgctgggctcaggagtgaagctgcagatcttcacggtgagtgttacagctcataaaagcagcatggacccaaagagtgagcagtagcaagatttattgcaaagagcgaaagaacaaagcttccacagtgtggaaggggaccttcccttccacagctagctcaggcagcctgcttttattctcttatctggccccacccacatcctgctgattggtagagccgagtggcctgttttgtcagggcactgattggtgtgtttacaatccctgagctagatacaaaggttcttcacgtccccatcagattagttagatacagagtttggacacacaggttctccaagtccccaccagagcagctagatacagagtgtcgattggtgcattcacaaaccttgagctaaacacagggtgctgattggtgtgtttacaaaccttgagctagatacagagtgccgactggtgtatttacaatcccttagctagacataaaggttctccaaggccccacaagagcagctagatacagagtgtccattggtgcaatcgcaaaccttaagctaaacactgggtgctgattggtgtatttaaatccctgagctagacataaagattctccaaggccccaccagagcagctagatacagagtgtcgattggtgcactcacaaaccttgagctagacacagggtgctgattggtgtgtttacaaaccttgagctagatacagagtgccgattggtgtatttacaatccctgagctagacataaaggtcctccaaggccccaccagactcaggaacccagctggcttcacccagtggatcccgcaccggggctgcaggtggagctgcctgccagtcccagtgccgtgtgcccgcactcctcagcccttgggtggtcgatgggactgggcgccatggagcagggggcggcgcttgtaggggaggctcgggctgcacaggaacccacggagtgggtgggaggctcaggcatggcgggctgcaggtcccgagccgtgccccgtgggaaggcagctaaggcacgcggtgagaaatcgagcgcagcgccggtgggctggcactgctgggggacccagtacaccctccgcagctgctggcccgggtgctaagtccctcattgcccagggccagcagggctggccgactgctcccagtgcagggcccgccaagcccacgcccacccggaactccagctggcccgcaagcgccgcacacagccctggttcccgctcacgcctctccctccacacctccctgcaagctgagggagtgggctctggccttggccagcccagaaaggagctcccacagcgcagcggtgggctgaagggctcctcaagtgccgccaaagtgggagcccatgcagaggaggtgccaagagcgactgaggactgtgaggactgccagcatgctgtcacctctcaatagcagatcattaaaaatgtattatctacacagtaggcaaacaagcatagtaattcacattgctttacttagatgtcacagtgataagtacaatagaaataaaaacacaaggaaaaggtttatattatcccattgtcagaggctagattttaagcactaacttgttttgtacctatcctttatcaaatagtcttcctccagggcttccttcaaagaccaagaaattttcttacattgaatagtgtcaaatattaaccttactttagtgtgaccataaccagttttgagcctgtccaggttgttcacagagacctattccttcttcataaatctatcttgtaaagacagacagaaggcaaactcaagtaaaaagggtcttcacgtgtgaagaatctaatttgtcaactccaacttagcatttctcattaataaaggaaaacaaattataacagaaggaaaagttaggtgaatcattaaatttagttagctatcctatttcacttaaattctttaaacactaagtataccattgcaatcactttttgcttttaaaaaattacagtttaaaatttcttttgaaaaaatattttcaacagaattccacatatttccaagattgtgttttttaatgttacttcaagacaatatctcagaaatagaatgcattgtttttgtgtttacagaaaaaagtcagtgatgcaatgaacagaacacaaacacctgtatttccccaactgtgatgtttaagatgcactttcaacttaactcctgctaaattttgttagtgaaaaatgccagaaaagaaccatttccacagtatgaatatatagcaggaagctggtcaaacaagatggaatcgtttaaaaaggcacacatccagtttcaggggagaaacagctttttaaacttcttcaccttgggccccataatcttgaaaatttttgctctctgacttctgcagatcactgcccagtgaaaaaacaatgccacacaccatctatcaagggaaacctctctaaaaaggttgaactttcctttagacatctcaaagaaaacacagttattatgaagtcttcccagaccaaccccagccaatgtatatttctgttacttggaatttgattttcacagaatttcagagatcaaaggaacattaacaatgaggaaacagaaggtcagataagttaaatgacttggcaaaaatgatgttgacttgttaagtggcatagtttaacaaggacccttgtttcttcacgggcagactgatgttcccacagtagaacactgggttgtcgtctaattttgtattatacaatacaaattgtctctctaataaaattatgaaattctcaaagaagctgtaacatttatttctcttgaaacttcaaggtggctctcctagttctgggaccataaaatactcaaataaatatttaccaaaataaagatctaaaggagtaaataaatgtgcacagcaatagatcttgacaaaatggcaaaaatccactcttccatattcaaaaaactcccccccaaactctaatatttgtttgtaagtctgtttacttatatttccagaaagattctcaaagaggacatcttttcttacttttttggtaagtatgggcttctctgactaccatcttaaaagaatatacttgataaagtattaagtaactccaggacatgagttacccatgagagatcacttgccaacaattaactgaaccacaatattccaaaaagagagatggctcttaatcaataaataaattctgggtctaattataatggcatgaaaatatttaagcaattataaactactcaatgttcagatagaaaattgactttattattgagctagaaatcaaatgataacacagaaaataacaatataaatgctaaccttgagtttttccaaaaaagcaactgttgtcaaggtcacaaacacactgagccaagtcttgttattcctttatcccatagctattgtactacttggtctgaaagtggatgtgctagacattttccatttgtcattttccatttgtctctccagaccttcactctgctcttctccatcctgttctaagcctggtcagctgacctccatgaacttcatcaaaggacccccttgcccttggacttttacatgggtttggccagtagaagccagtggctacaaatcaaaggaagaacagagaggccaagatatttattctacttcctcctccttgccagatcacattggttaagtttctcctctgcaatgaagaccacagctcatgtcagacagcctttccattacagctgctctctggtagttctctccattttccctgataggtcaagaagtagtaaaggctccctgacttctgcttcctgtaccatcccttgttagtttctcttactctgcccatacctttgtaactagtcccttcagtaaactcttcagttattccatttgagtattgacatggtttggctctgggtccccagccaaatctcctcttgaattataatccccatgtgtcaagacaggggcctggtggaaggtgattggattacaggggcagtttcccccatgctgttcttgtgatagcgggttctcacgagatctgatggttttaaaagtggcagtttcccctgcacgttctctctcctgccgccttgtgaggaagatgcctgcttcccttttgcctactgccatgattgttaactttcctgaggcctccacagccatgcagaactgtgagtcagttaaacctcttaccttcaaaaattacccagtttcaggtattctttacagcagtgtgaaaatggactaattcagagaattggtaccagcagagtggggtactgctataaagataacctgacaatgtggaagcatctttggaactgggtaacaggcaggggttggaaaagtttggaaggctcagaagaaaagaagatgtgggaaagttgtggacttcctaaagaattgttgaatggttttgaccaaaatgctgacagtgatatggacaatgaagtccaggctgaggtggtctcagatgaagatgagaaacttagtgggaactggagtgaaggtcactcatgctatgctttagcaaagagactggcggcattttgcctctgccttagagatctgtggagctttgaactcaaaagatgatttagggtatctggcagaagaaatttctaagcagaaaagcattcaagaggtgacctggcattttctgaaagcattcagtcagatgtattcacagagatggtttgagattggaacttatgtaaaggtttggaaaacttgcagcctggccctgtggtagaaaagaaaaacccattttctagggaggaattcaagctggctgaagaaatttgcataaaaaatgaggaacggaatgttaataccaagacaatggggaaaatgcctccaggccgtgtcagagatcttcgtggcagcccctcctatcacagacctggaaggctaggagagaaaaatggttttgtgggctaggcctggggccccactgctctgtgtggccctggggcgtgacaccctaagtctcagtcactccagctcaagccgaggctaaaaggggccaagatacagcttggggcattgctttaaagggtgcaagccccaagccttggcagccgacacatggtgttgggattgcaggtacgcagaagacaagagctgagctttgggagcctccacctagatttcagaggatgtatgaaaacacctggatgtccaggcaaaagtctgctgctggggcagagccctcatggagagcctctactagggcaatgcagagggaaaatgtggggtcagggtgcccacacagagtccccactggggcactgcctggtggggctgtgagaagagggccaatgtcctccagaccccagaatggtagatccactcacagcttgcaccatgtgcctggaaaagccaggggcactcgatgccagcctttgaaagcagccatggggactgtcccctacagatccacagggaaggagctgccaatgccctgggagctcacctcttccatcagcatgccctgggtgtgagacatggaatcagaggagaccattctggagctttaatgaattaaaaaaaaatttttttaacaagtaccctgccaggttttggacttgtatagggcctgtggcctctttggtttggccaatttctcccatttcgaatgggaacatttacccaatgcctgtgcccccactgtatcttagaactaactaacttgcttttgattttataggctcacaggtagaaaagacttgccttgtctcagatgagactttggacttggactcttgagctaatgctggaatgagttaaggctttgggggactattggaaaggcatgattggttttgaaatttgaaaaggacatgagatttgggaggggccaggggtggaataatatggtttggctctgtatccccacccaaatctcatttcgaattgtaatccccacatgttgaggcagggacctagtgggaggtgactggatcatgggggcagtttcccccatgctgttctcatgatagtgagggagtcctcatgagatctaatggttttaaaagtggaagcttcccctgcacattctctctctcctgccaccttgtgaaaaagatgcctgcttcccctttgccttctggcatgattgtaagtttcctgaggcctccgcagccatgtggaactgtgagtcaattaaacttcttttctttataaattacccagtctcacgtagtacctttatagcagtgtgaacatggactaatacaagtacatatatatacttgtattagtatatatatatatacaagtacatatatatatagtatatatatacaagtacatatatatagtatatatatatatacaagtacatatatatagtatatatatatatacaagtacatatatatagtatatatatatacaagtacatatatatagtatatatatatacaagtacatatatatatagtatatatatatacaagtacatatatatagtatatatatatacaagtacatatatatatagtatatatatatacaagtacatatatatagtatatatatatacaagtacatatatatatagtatatatatatacaagtacatatatatatagtatatatatatacaagtacatatatatatagtatatatatatacaagtacatatatatagtatatatacatatatacaagtacatatatatagtgtatatatatatatacaagtacatatatatacttgtattagtatatatatatatatatacaagtacatatatatacttgtattagtatatatatatatatatgcatatatatatatacatacctgtgtccagctaggactcagaatgatcctttgggatagaggtccttcctgtctcacattgccagttccacacgattttttgttggggagggaatggcaacctttggtcacttgtgttttggtgtcatatctaagaaggctttgcctgacccaaggatacagagatatatatatttctatagtttcttctcagagctttatagttatagcccttacatttaggtctatgatccattttgaactccttttcatgcatggtgtgagattagtcgaaattgctctttctacatgtagatatataattgccctagcaccatctgttgaaaagactactcctcattgaatggtattgacatttttgtcaaaaatcaatttaccatgaagggtttatttctagactctcaattctgttccactaatctatatgtctatccctatgctatgccattacattgtctctttttttttttttttgagatagagtttcactcttgttgcccaggctggagtgcaatggcatgatcttggttcactgcaacctctgcctccccagttcaagcaattctcctgcctcagcttcccgagtagctgggactacaggcacatgccaccatgcctggctaattttttttgtatttttatagcagacagggcttcaccatgttggccgggctggtctcaaactcctgacctcaagtgatcctcctgcctcggcctcccaaagtgctgggattataggcatgagccactgcacttggcccacattgaattgattactgtagctttgtagtaagttttgaaaccagaaagtataagtcttccagttttgttgttcttgtttaaaacaccttggctaatctgggcccttcacatttccatatcaaatttaggatcagctcgtcaatttctgcaaaaatgcccactgggattttgataggaattgcactaaatctatctactaatttagagagaatcaccaccttaaccacattaagtcttctaatccatgaagtttgaatgtttccatttatttaggtctttaattttactcagcaatgttttgtagttttcagtgtacaattctttcagttattcctgagtattcttttggtgtcattgtaagtggagttaatttcttaatctctttttcagagtgttcattatagtatatggaaatataattaatttttgtgaaatcaattggtcttgtattctgcaactttgatgaacacattagttgtagtaacttttttgtggaatccttaggattttctatatacagggtcacatcctctgtgaataaaggcagttttatcctctccggtctagatgtctttcatttatttcttgcctgactgtaccagctagaacttccattccagtgttgtataaaattgtgagagcacacatcctagccttgttcccaatctcaggaagaaagcattcacacttgccatttaaatatgttgctagctgcagctttttcatgaatccccttagttcaaagttcacttctacttctaatttgttgagaatttttattatgaatggtatttgattttgtaaagtgtttttctgtgtctaacgataattatgtgtgttttatcctttatttcactattttttgtgttatattcattgatttttgatgttaaatctttttggcataaatcccactggatcatggtatataatccattctatgtattgctaatattgctgatattttactgaagattttttcacctctattcatgatgttggtctgcagttttcttttcttgcaatgtcttcatctggcttggtataggacaatactggcttcgctgagtgagttgtacttcctcctctgttttccagaaaagtttgtgaaagattgctattatttattatttaaatgttgaatagaattcatgagagtagtcatctgggtatgagctttgtagaatgatttttagttactaattcaattgctttatttagtataactctattcagattctctatttcttcttgagttttagtagttatgtctttcaatgattttgcccatttcctctaagttgtctaatttaatgggataaagttgttcatagtattcccttataatccttttaatttctgcagggataggagcgatgtctcctctttcattcctgattttgataatttgtatcttcagtcttttttcttggtcagtctaaccaaagttttgcctatgttaattgtttccaataactaatttttagtttcattgattttctccattttctattttactgttttctactccaatacttatctcctttcttttctatttcctttaggtttaatttgttcttatttttctttttctgttctctttttattttctagtagagatgggggggtctcactatgttgtctaggctagtttcaaactcctggcctcaagtgattctctaactttgcctccctaagtgctgggattacatgagtgaaccatcacactctgcctttttttgttttttgttttaaggtagaaccttaagttgctgatttgaaacctctcttctattccagtacaggcatttctccttggtttcttgatgttagagtgtcagcatactctacaacttggtctttggacccttaatctttagctacactcactctgttatcatcttatctagtctcatggctttaaatataatctacatattgacagtgctcaggccagaccactccctctaaattttagttgcatatatctatccaactgccttttatcttagatgttagacagctctagtttaacaagccccaagttgaaatcctgctcccagccccctaacacaaattggcttcttcaccagtcttccgcatcttagttaacagcaacgctatccttaccattgctcaggacaaaatcctagggtcatcttttaactctatccttgactcattttctctcagaccatagatctaattcatcaggaaatcctattagatctacctgcaaaacatatacacattctagccactttactacctccactgcaaaccccctactccaagccaccatactccctcacctagattatagcctcataactaacctctctacttccatctttgccccctacagcttctctcaaaaaaatacagccagagaggattctgtaaaaatataaattgtatcacctcattcctctgcttaaaatttgccaactcagcctatgagaataatgtcaacccactttcaatagcccacaaagccctccaagatctggcctccagtgatccgtctgacttcatctcccacaactgtcactcttgcttactttgccttagccacactgtttcttgaacatacggcatgctcccacctaaaaaagtctgtccgctgactgtcttatttcctggaatactttttccccaatatttacatggcttatcttttctcaccctcaagactttgctcaggtatcatcatcttctccacaagactaactctggccacttccctttaaattacattcaacaccactatcagtacccccaacattcattaccctgctcatttttttcccgtagcacttatttaccttcaaatataatgtatactatacttcatatgtttattgcttattgcatatctgccccaaaagaatgcaagcccttttagggcagagacttttgtctgttttatttatggatgcatcccaagggactaggtatatgcattgcatatatcagatatctattaagtatttgttgaatgaataaatttagaaagcagaactctgctagctatcatcaattgaaatattagttatgccttaaaagttgaatttattcatgccttcattcattcaacaaatactgaatggcttctctttgccaggcactgcaacagacactggggatattcaagacagaagacagacaaggccctgttgacatggagcttacttactaattttctgtctctccttatagaatgtaaaaataaaaaatatatataattcttgtaataatatgtgttatagccagacatcatagctcgtgcctgtaattgcagctactcaggaggctgaggcacgaagatcacttgagcccaggagttggagttatgaccatacccctgcgctccagcctgaccgacacagtgagacgccatctctaaaaatgtaagtaaataaataaattgtgttacaaaaacaataggataaataggtaaacatgccaattattggggtagtgagctagggagtaccccttcaactagaataacaactacacttgatctgagatgtcaaaacgggatgaggaaaagccagtcatgcagaaacctggggtaaaaatacattccaggtagacaaaaagtataaagctttgggaggaagatggacgttggcaagtttaacaaacaaagccagtatgatttgaaggtagagtatgaggagaagatacagtgggatggcatcctgtggcatctgtccattgtagaggccctaaacccaccctgacatttgtagtaaattagatgcatcctggaatggtacttttatatcaccttctctctcctgtgctccctcctctcgtattcttttttctttcaagaataagagccaatggcatagacgagcagtatcattgctaagaaatctgaaaagactattctttagtccatctagtactcctgtgcaaacagaaaaagttgtgccttcctgagaacactttactgccacgtgttagaaaaatacgtaataaataagaatatcagcaactcactcataattgtgcaatgtcctatatgtagtatgtagcagccctggttgcagagatagagaaaagtagctctatgcaaaatatgcaaaccaaaatggttccattttttcctgtatgtcatataccaaatgctgcagatgctaaatatacatatagatttacatgcattgcaaattactactattctgcattagctacagttggctactgattctgatagcattttcatcatgagaaaaagaatgagtctttttgaatattagtcaatggagaaaatactgtgtttacaataaagtgatacagacttaagtggctgtaaccactaatgtacctttataaaagtggtaaaagtcttaaatacatccacaagtgttagaagtagtgatcatcagacagtctatctgaagaagatattaagacagtgttttctttggaatgcatttgcctatattacctcatgtaattcaaacattatttttattttgtagtttcctgattaagtttttaaaaataagtcaaaggatattttggtaaagtaacagattccaaaaaaaagcaaaaaaaaaaaaaaacccacattttcaagcttaatcccaaagatgaccatttgtttcatcatttaggctaaagttttctaatttaggaaagaaaaacgtgtgtctttgactttatgagaaataatctgtgatactgtgtacatctgtgatttctagatgaatagcattcgaatgccacttcaatatgattaaaattaataagcaactaataaaatccataaaggatagcttttcctgaaagtgtccaatgatggaagagtgccacctagtgttcaatgtggatttaacatatcctgcccaaaaagccatttcacaaagccatttcacaaagccatttcacaaataccctcaattttagccctgtagttattcattaaaccatagtaattttgcagagccctagtcaagtatcaaaatatgaattatgaattcctgaaaaaaatgtatatcacctatatccactagaaactgagtttttgaaaaggaagttaaatttctatagctacataaaagcaaaagaaagagttaactcaaaaaaaaaaaaaattttaaacatcgtgaccctaagtagtaggctagaaagaacatgaggttctaggctaaataggttcaaatttgggccctaccgctttctagcgtataatcttgggtattttaaaaaactgaggtttccttatgtgaaaagaatatacagtaggcattcaataagtgatagatattaactattaagaaaaagagatttcccattcttttttaaagaataagttaataagtttctttttttaaagaaaagtgagagcaagtttattaagaaagtaaaggaataaaagaatgcctactccataggaagagcagcctccttttgtttttaatatatcccctccagtcatcgggactttaggaaacattttaatgaaaggatagcttgtgccaggtcaacaatttcatttctctctaattccttgcataaaagaggacccaatctggggtgggggggttatcctttgcccagtcagccccaaataagtttaaagtttttaaatttattgatgaaattatcaaacagccactcttatggaatatgcgtgacattcagtgaattctcttccattgctttctaacatctaataaattcctttcgcttgctttctaacatctaacaaattacataacagtatcttaaacaattaaaaacaataatttaaaaaatgctattaaatcatttcaagaatatctttctcatgacatttttaaaaaaggtttaatccacaatgtatgtctatttagtgtgtgtgtgttgtgtgtgtaacagaacctctttttttaaaaccctggattcattttatcaagctccttacaaattttccaaaattaagtccctttttagcctaatcctttctttaaggctatagatttctcatttgtattagtaagaatgtaactgtataaaaggaacagtatctcaaaagctcagtgtattaattagaatagttttctaagcaagctattactgagggactacaagagtgagtaagaaataagccctacctccatggtgtctcatgcctgtaatcccagcactttgggaggccgaggcagatggattgcctgaggacaggagttcgagaccagcctggccaacatagtgacaccctgcctctactaaaactacaaaaacatagcggagtgtggtggtgggtgcctgtaatcccagctactcaggaggctgaggcaggagaatcacttgaacctggaaggtggaggttgcagtgacccaagatcgtgccaagaaagaaagaaagaagaaagaaaggaaggaaaggaaggaaaggaaggaaagaaaggaaagaaagggagaaaagaaagaaagaaagaaagaaagaaggaaggaaggaaggaaggaaggaaggaaggaaggaaggaaagagccctgctctcaaggagctcactctccttagtacattactgagtcccaactcagagagccagacagcaggatagagaggtattaataaattcccaatgcatgtctttgaaagtagatggatccattctccaccagcactgccttcccagaagactacagcctgtgcaaaacgcagaggggatcttgaagaaagcaggagtgatggggcagagatgcctctacttctgcttggccctggatgtttctctcttttgtctcctagattttggatgtctgtccctctccctctttattggtcctggatttctttctctccctctctctagcttcacgttgtatatctttctttcctagagaaatagaaggatattcaagaaaagagggaaaaaaagaaaaataaggcaaacataaaagagattaaaaatagagaagtgatgtgagcacttactgatatggtattaactaaataaactttgtaatttctttccttcgtttggaaattagaattacttcaatgtggaatagtcatatacacatacagacatgcacatcacatgtaaatgggatcatcacactgaggtagaagacatgtgggcctttcagtatgtcccaactagtttctttagctataaaatttgggaataagactagatcaatagttcaaaaacattttcctgtttccttttttctttcttttttttcttttttctttttcccctatttcttaacctatagtaagaaccacagtttccattgggaccaatacacacccacacccacatccacccacaaccacacacacacatgccctacaactggaataaaattctcaaaaacaattcttattctcaatatgtgaaatgtactgatatttttatacctttttttaaaagctgtctattacttacaatttagcgcctacaatccagtgatacatcataacctcaatttcataatcactgatgttaaccaaaatcaaaggtctctttcagatctaagactttatgacttgaatgaccagtgggtcaatgaagaaattaaaaagaaaattgcaaattttcttgatacaaacgataaaggaaacacaatatactattagttatggaatgctactagctagggaattcagtgaaagcagtattaagagggaaatttatagctctaagtgcctacattaaaaaaaaagagagaaaaacttcaaataaatagcctaatgatgaaccttagaaaattacaaaacctggagcaaactgaaaccaaaattagaggaaaagaaataataagatcatggcagaaataaatgaatttgaaatgaaaaaaaaatacaaaagatcaatgaaacaaaaagttggttccttgaaaagataaacacaattgataatcctttagtcagagtaagaaaaatagacagaaggcccaaacaaataaaatcagagatgaaaaaggaaacattacaaatgatactgcagaaattcaaaagatcattgatggctactatgagcaactatatgccaataaatttaaaaatctgtaaaaaatcaaaaacttcctacacacataaaacctaccaagattgaactgggaagaaatccaaaacatgaaaacaccaataatgagtaacaagatcaaagccataataaaaagtctctgagtaaagaaaagcccaggacctgatggcttcactgctgaattctaccaaacatataaagaactaataccaatcctattcaaactattccaaaaaatagaggaagaggtaatatttccaagctcattctatgagctcagtattaccctgataccaaaaccagacaacaacacatcaaaaaaaaaagaatgaaaaagaaaactacagaacaatatctctaatattgatgcagaaatcttcaaaaatgctagaaaactgaattcagtaacacgttaaaaatatcattcatcatgaccaagtgggatttatccctgagatgcagggatggtacaacacatgcaaatcaatcaatgtgatacatcatatcaacagaatgtagaacagaaaccatacaatcatttccattgatgccgaaaaagcatttgataaaattcaacatcccttcttgttaaaaacatcaaaaaattggatatagaaggaacatatacttcaacataataaaagccatatatgacagccccacagctagtatcacaatgaaaggggaaaaactgaaagcatttcctctcagatctggaacatgacaaggttatacactttcaccactgttattcaacataggaggtcctagctatggcaatcagatgagagaaagggcatccaaattggaaaggaagaagtcaaagaatctttgtttgcagatgatatgagcttacctttggaaaaacctaaagactccaccaaaagactcttagaactgataaatccagtaaagttgcaggatacaaaatcatacaaatatcagtagcatttctatatgccaacagtgaacaatctgaaaaaaaattttttaagttatcctatttacaatagtcatgaacaaaataaaatacataggaattaacaaaagaagtgaaagatttatacaatgaaaactttaaaacacagataaaagaaattgaaaaagccactaaaaaattgaaagattccatgtttatggaaagaatcaatattgttaaaatgtccatactacctaaagcaatctacagattcaatgcaatcactatcaaaatatcaatgatattcttcaaagagtagaaatagaaaaaacaatcctaaaatttataaaagactcagaatagccaaaaccatcctaagtaaaaagatgaaaactgaaaaaaatcacactatctgacttcaaattatactacagagctatagtaaccaaaacagcgtggtactggcataaaaacagacacatagatcaatggaacagaatagagaaccctgaaacaaatccatacatctacaatgaactcattttcaacaaagtttccaagaacatatattggagaagacagcctcttcaataaatggtactggaaaaactgggtatttatacacagaagaatggaacaagacccctttctctggtcatatacaaaaataaaatcaaaatggatttggattaaagacttaaatttaatacctctaactatgaaactactacaagaaaacattgaggaaaattcccaaggtattggtctgggcaaaaatttcttgaccaccaccacacaggcacaggcaaccaaagcaatcatggataaattggggcacatcaagttaaaaagcttctgcatagcacaggaaacaatcaacaaagtcaagagacaacccacagaataggacaaaatatttgcaaactaaccatctaacaagacattaataatcagaatacacaaggagctcaaacaactctacaggaaaaaaaatctaataatctgactaaaaattgggcaaaaaatctcaatatacgtttctcaaaagaagacaaccagtggcaaacagggatatgaaaagttgctcaatatcattgatcatgagaaaaatgcaaatcaaaactacaatgaggtatcacctcaccccattttaaaaaagttttatccaaaggacaggcagtaacaaatgctggcaaggatgtggagaaaagggaacactcatacactgttgttgggaatgtaaattagtacaaccactattgagaacagtttagagcttcttcaaaaaactaaaaatagagctactttataatccaacaatcccaccaccgggtctatacccaaaagaaatcagtacaacaaagagttatctgcactcccatgtttattgcagcactattgacaacagtcaaaatttggaagcaacctaagtgtccatctaaagaatggaaaaggaaaatatggtacatataccaaatgaagtactatccagccataaaaaaatgtgattctgtcatttgcaaaaacataatggaattaaaggtcattatgttaagtgaaataagccaggcacaaaaacattgcacgttctcccttacttgtgagatgtgaaaatcaaaacaattgaactcatggagatagagagtagaaggctgggaaaggtagtagggggttgtggagttgaggatggttaatgggtacaaaaaaaattgaaagagtgagtaagacctagtattcaatagcataacagggtgactatagtcaataataatttaattatacattttaaaataactagaagagtgtaacttgattgtttgttaacacaaagaataaatacttgaggaaatggataccaaattttccacaatatgtttattatgcattgcatgcctgtaccaaaatatctggtgtacatatttatatattaaagtattaaatatatacttatatatttataaatattatatatagtgggtatatataaatgtatacatatatatatacacacatacacacacctagtatactatgggtgtgtatatatgttttatatatatatatgtgtgtgcacatatctattatatataatagatataatatatataatacataatagatatattatattatataatagatatataattataaacataataatatataatgaatataatataaaataaatataataaaatatataatatatctattatgtattatatattatatatgtttatatataatataattatatatgtttatatataatataattatatatgtttatatataatataattatatattatatattatagatataatatataatatactatatattatagatataatatataatatactatatattatagatataatatataatatactatatattatagatataatatataatatactatatattatagatataatatataatatactatatattatagatataatatataatatatattatatattatagatataatatataatatattatatattatatctatatataatatattgtatattatatataatatattgtatattatatataatatattgtatattatatataatatattgtatattatattatatatattaaatatatattatacacacacacacacacacacacacacatatacctgctatgtacccataaaaattttaattttgtttaaaaaagactgatttcatgccacataagccttgtatgatctggtctcaggctacctctttatctcatctgcctcacctgcctctgccaccctctccctcaccttctctgctccagttacactggccttcttgctggttactaaataaaccaagcaggctcccacctcagggtctttggatgtactatttcctctacctagacagctctagggctaggattcccagggctctccacatcatcacttcattcaggtctccactcatatgtcagcaatgtaaggaggcttctctgaccagctaactaaataccaacttcttcactctctgtcttgtttgattttttttccataacacttatcaaaacctcaaattatactacatatttgtttattctgcatctccccagaaattttagctccataagggtgggactttgtcactgattgctcagaacagtgcctggcactcaagagaaacttaaaaataattgttgaatgaatgaagctagagctctctctcagaataaaagagtccactgtttttgacccataattctagatttttctctagaggtgaacagcccttgatcaaaactgtttgtccactcctggtctctaccaagtaactagcagggaaattcagtggaaagttaccttcctttcttctcaactgtcttttcagaggattatctttcttccttggatgtttgtgcctttctgctccctgatgatattgatatcttttctctgtaaatacaatacctacttccaaggacactatcaattagttaagaatcttaaatgcctttaaaaatagaaaacattctctaagtgtcaggcactatcgttaaaatggcagatttgcaaagcttttgtcaggtgctaaagtgaaaaaagaaggtgaagctggtagggggacagagagcaactggagttgttactttagaaaggtggacaaggaagtcctctctgatgaggtgtcatttgaacatacatctgaaaaaacgtgtaggagcatttcaggcaaatggaatagtaagtgcagctgaagtgtatgtaaaactggaaaaaaaaagatgtaaactttgaaaatgtatatctcagaaggctaaaccaaaaagaattgcttaaaaattatatgaataagaactacctcaaataattctgaatagtcaccaactctgtgtatcttgtgtcctctcaaaactcacccaaagggacatctgggtcaatgaacaaaaatgtttaaaagaaagtggggtagggggcagcatctgtgaagcacttaattgtacaggacactaggctgaaccctgaagaatgaaccacaatgacggagtttcctacttcatttccaaatgcgttccagtaactttagggaatcaatgttgacattaatatgcataagtttaattttggatttatacatattcacatgttaaagaaaacctgaagctcagtgaatgaaaaattgcagagaaaaagcagtaaagtcaactaatcttgtttttaattagcgttctttcagtcattagcctctcttctgtgttcccacattcagtaggtctctatcttaacacttggaaataacaacagcagtagtaacagtaataacagcaaacattttttggatgcttacagtgtataaagcattgggctaaacagtttatcatttaattataataatatccctataagggaactagtattattattattattattatcctcattttacaaatgaagaaattgaatttctctaagttagtattacaatgttacagtgtatcatgtatttctcttcttctcttttttcttcctccaagactgtgagctttttaaaaaagaaatctagtcttgttcatctttgtatctcatatatatagcatgttgcaagaacccaaaagtgggcagaaagatgagttcaagagcctctgctctatatctgaatataaatgcttattatgtcaagtttgattctagaagtgttctaataatgcatgccacaacctaggtgttaagggtattgggagacaagataaaatcatcaggccaatactaatttttatgtggaaatgctagaaaaagtgatcataatattatagaagccattcattctttgcataaaaacttgaacatttttaattatgaaaaatattcagatatctaagatagacagatattcaccttttagagatctcagtgcatgcagtaaaatccaataaggtacctaaaaggcaatatggtttaacataaatgataaaactgtacttgccactagatgaagggattttcagtttttccagagccgaatttctgagtctaagtggcaagaaacagactgggtctgaacggtctcattgtactttcacagtcaaattactgaataataaaatctcacatgaccagcaataaaagtaaatgttcccagctaatccatttaaattgagtagatattcagggatctcacacctaatacctgctaaatacatatcacacatgtttagctgcccctatccacaaaagtatatgaccattattgaaactggtctcaagaccaatctctgccatttccctcccttttaccagctttttcttatttccattaggaaaatgaatctataagagaaatttaggaagagggaatttaatatataaaagtaaatttttcaatagccacaaaattgcataacaccattaacctcaaatatttatttttgaaggttgatattttaatctcttccattttcctcaactatcttctcattaggcagcaatctggttaatatgaaaataacacatttcatatgtatattacagtttataaattactttcatattaacttatttgatcttcacaaaaaatgctttaaggtaatctaaacagaaagtattattttgattttatggatgagaaaataactatccaaaaagattacataacacacagctcataagtgcttaagccaggactggaataaagactgaaattttagatttctagctctacatcagtttgtttgtacttcaacaagctacatcttgaaaataagtacacaagagaggactggaaaatctgtctacaaataatagttaaaaaaaggccaacttaatattcttcactacagtcagacaataaaccttgaattttaacaatttataatagatgtaaaacaataattacaaagaaatattgtaggtaagtattaacagtgcctttcatctatagaacatacagtaatttatatttctctcaatattctgagcaaagcaggtgacagttttattaaaagttcaaatctattgttagacatatgtatgtaatgtatagaaataccagtttagagtttagaagaaacaggcaccatggtatactgctagcagagtattcactggcaaaactattttgggagtagtctggcaatgtatattgaaagcctaaaaatgcacatgacctctcgcacctagttatttcctttttaatttattgtaaggaaataattatggatgtctataaaaatgtgttcgcaaaaatatgttagtattgtgttaacagaacaaattaataaatggattggttaaatcagagtaaatgaaagaataaaacgtagagctgtccctcagtatttgcaggggattggttccaggactcctacagataccagaatccttagacgctcaagtcccttacatacaatgatatagcatttgcatataacctatgcatatcctccagtatattttaattcatctctaaattacttacaacacgtaatacaatgcaaatgctatgtaaatacttgttatagtgctttgtttttatttgtattttttatcattgtattgttatttttttttttcaaatattttcaatcctcaattggttgaatctggatgcagaacccatggctacccagggctggctgtagttcttaaaactgatctggaaaaatgcaaaagatatattaagtgggataaaacagatttctaaacaatgaatataatagaatcatattttaaaggatatgtatctctgtgtgtgtgtgtatatatgtatgagtatatatgtgaccaggatattacacaaaaatattaatagcgattgtatacaggcagtgttattatagataaatgtaattttattacttttacttttatattttctcatttctaaaaatgactaagtaattttcctatatttctacaacagaataagttaaatatctttataaacatatataaaacatatatagcatatatatgtatcatgtaaatattgaaactatggaaaacaaaggataaaagttgaatttacatctatcagagagctctagagccattatgtgtgcatatgaagatacattttaaagagtatagaaatatgaagaaggcacagcacataagatgagtcaggagagagaacaacagcaacttattaaggcaaagtgtccagtatcagaaaataaatgtgaattaagcagtacattttaatagctacagtttctcacatctaattaacagaaagttttaaatattgacaactttggaagtgaagaagtttaggcagtttttgaaaaaaatgtgaatacaaagttcattgggaatgctggagatacttctggaaagtaagatacttcaatcatatgctatagcagcatcaagaaaggtactaggtgaagatcacagcagcaaacataactcccatgttgaaactataatgcatacccatctggaatatgtagctctgctcgccacaccttagagtagatattatagaaacaaaaaataagtccagaaatgggaaaataaattatgaaatggcaactataagggatgaaattaggagtctctgaagttcaaagacaaaagaagctcagaaaaatatttcccaaagcttataagatcataaattttacagataagataaaaataagcaccaagagaccaaattaatatggcaaaagtttaaggcaaatccaaggaaaataaaatattttgatggaataggtaaaatatataagatgtataatactactgcatttagaataaaatccaaaatccctcccaagttccataagtctcagtattcctggctccttcctgcctctcagatctcttctcctccagctgtcctctcattccctaggccccagccacactatctccctcctgttcctctaatgcacctctgtgctcactattgactctgcctggaatgctcttctcctaggtttcacctggcaagctgctttctatcattgacatctcagcttaaaagtcacatcctcatgaggaccgtccctgattgtcctactcaaggctacttgctcttggaaccaaccaatattgcattacttagtttaattttcctcatagtacttatcatcatatgaggtcatcattcgtttatttattcatgtaaactgtttttctctcaaactaaggaaaaaaacaattaaagagttttatcatcaaagagactttccctcaccaccccaggctagttcagatcactctattttattactaacttccacctcaccttgtcatttttcttttgtaatccaacttatacttgtaatttattttccaatatctgtttttctccataaattccatgagttaggggccactgtgtgctatcttattaatcaatgtatacccaccagttaccagtatatggaaagtactcaataaatactttctcgaatagaagaataactggtgaatgagaaagaattgggaataaaaaggcagaaaaaggaaagcaaaaataaataaaaagctacatgaaaaaaattatggcattatattaaccacttactattccgttctccaaataccactgtttcctactaaacaagaatataacaggctctaaactgcatttgtaatacaatatataggaaaataaacttttaagagtttcatatctgcaatttatgccctgtgctttctgattcactttttgtaaataaaatcctgtggatctttggaactgcaattcttccaaatcagcaattcaagtaacaaaaggaattctggatgactaaaaagcagatgctgtctgggtgccaagcttcatgcctataatcccagcagtttggaaggccgaggcaggcggatgacctgagatcaggagtttgagactagcctggccaaaatggcgaaaccccgtctctactaaaaatacaaaagttagccaggcgtggtggcatgcgccagtagtcccagctactcgggaggctggggcacaagaattgcttgaacccaggaggcagaggttgcagtgagtggaaatcgcgccactgcactccacagccgggtcgacagaacaaaactctgtctaaaaaaaaaaaaaggcaggtgctaaaaacaaaaccagaaaagctattaggagaaacgtcataaagttggaaactgaaaagcatttcatttcatggaataaaattttgttcttcagtaattatgaaactgtctttgaaaactctgttaaaaacaactttgactcatgcctgtaatcccagcacttggggaagccgaggcaagtggatcacttgaggtcaggagctcgagaccagcctggccaacatggtgaaaccctgtctccactaaaaacacaaaaattagccaggcatggtggcacatgcctgtaatccaagttactcacaaggtggaggcaggagaatcgcttgaacccaggaggcagaggttgcagtgacccgagatcacaccactgcactccagccagggtgatagagtgagactgtgtctcaaaaataaataaatacataaacaaacaaacaactttgagacattttacttcaaaggtttagattagttcttatggaacatagctaataatctttaaagtcctttattacactaacagttcatctggagtaatgatattctaataaatgctatattttagaagatacataatattaatatctttgtcaaatatatcttagaattaccttctctgtcctctttataatatgtaaaagaaattgatgagtccagcatacgcttcatcttaaatgaggtgtatgagaaacatgctaaactatggttccctatctctgcttcacaatataaaggtgattccagaatttggaagcctcaactataacaaactagatgaagacagaagctgattagataaactgcagtggtcaggaagcctcaccaacagagcaaacaacctccatcttcagctgcttattgagaggccataatcctttgctgcaatacatacaacagtggctagactgaacacagagaagggacatctgtttcttaggcctgttctttctcataaatgattgatggcaaatatggaggagagtgatctggatgcacaaagaaacttgaaaattttactctagccaattttaggctttcgttaattcaaagctgtatctgccatacaacaagaacattttcactagatcaaaagaggaataagaatatctgcaggccttgagatttcaactattttgccttttaaactatatattagctgaacgtggtggctaacataaacataatcccaacactttgagaggccaaggtgggaggatcacttgagcccaggggtccaagaccaggctgggcagcatagtgagaccctgtctctgaaaaaaaaaaaaaattagctgggcatcatggcacacacctattatcctagctgctcggaaggctgaggctggaggatcacttgaacttgggaggttgaggctgcagtgagccatgatctcaccactacattcctgctgggtgacagggcaatatcctgtctcaaaaaaaataaataaataaaaataaaataataagataaaacaaataaagtatatattattcaaagtaccctgtgtcttgaactttgtggatcaggactcacagtaagaaatatattttacatcagaatccagtacacatccaatacatatacaattaaacaaaagttcatgaacgttacccttacaacatgtagtgaatatgttaagttgctattttatgtcatctttttaatgctggctacataccacaaatttgagtaatgagtcatcaggtacagtttgagaaacactgctgtacgtatacgtgtggtctggcctctgcctacctccctaaccacatttcatggtattttgcaccatattttccctactgcagccacccctgcaccatcccaccacccagtttctattattttattacattgaaccataagttcctaaaatataccaatctcttttctgcctcagggtatttgatcttgttgttagcgtggcctggactcctccagatcactgcactttgtattatattatgcaggtctcaatataaaagttctttccacagagaggccttcattgaccacctaatttgaaagagccccagcctgcaatcccggcaggaggagtgggaacaggagttcattcattgcccttagcattcctgggaagtttgataacataatgtaagacaggcaaaaaccaaaaacagtattgagcaaatgtcactttctacctccctatgccattgcacaggtcatagaattctaactattgaaattctattccattttcttcatgacaacttttctgactctgactgagaagcagggactcaattgtacaatttgccccctattactttgtattctctcagaccacttagcgcattctttcttattttgtattcattccgcaaacatttgagtgcctaatatgatctaggcaatactgtgaacaacataagcatgaattcctccaacagttcacattttagtaagagtgacagatctataaacaaataatttcaaccgaatgaggcaagtacaataggagagatgtatactacataaaatggtgacaaaaagaatgaacaatcaacctctttttctttttttcttgatttcacagtgtggaggggaaagctctgaatatctgcatagattttaaatttgtatttatttatacttttttagagacaaggtctcgctatgttgctcaggctggccttgaactcttggcctcaagcaatcctctgacctcagcctcttcaatagctgggactacacacatatgccaccgcacctgactcgactcaaccctctttgagtagggaaggaaggcatcacagaaaagacacctacactgggtctggaagtgaatccacctttgcaaaaattataacagtgagagaaatctaacctaactgactccatattgcttctaacctcacaaagctaactgcccttgctcatacctgggcataggcaagctaactatgggagaaatttatagtttaactttgaagcaaggatggtaatagtcccttccaaaactgaccccctctagggactaaaacagccttgtaagactaatagaaggccgcaaggttaggactatgggagggacctaaaatctgctaaaatataggcataggtaagcaataaccagctactgttccttgcttttctataatttcttactattcagaagtcatgtagccagaggtcacaagatttgtaacttcaccaattgctcctttagataacatcactattgtaaaacctaagattggtcttgagatattttccaggcttctgcattctggcaaacctcctgatgccacccagatacatgcctcataccaagaaactgactctactagtcctatgactctcacctagacaactgactcagcacaggaagacagtttggaaacacctataaattcatccccaaccaatcagcagcgcccattccctaccaacctgcccacaaaattatccttgaaaaccacaacttccaagctgtcagggaggcggattttagaaatatttcccatccttccactcaactgccttgcctccattaaactctttctctgctgcaactcctgcattctcaatgtttggcctttctgggaagtgggcaagaagaacacgttggcctgtaataggagaataaataagtttggcaagcaacaagagggtgcaagtattctgtgtagaaggaattgcaagtgcaaagtagaaagaggaggcatactaccagtttgaagttgcttggtatgttcaatgaaaagcaagtagctaaaaggcaagagaattttttttttttaagtatggaaagggaaaggcaaaagctagacagaaaagtgcttgttcatggaggaacttgtgtgccattctagacattttactgtaggaaatagggaatctagagttttaaggaggtgagtaaatcaacaggttgggtttttaaaaattccttcttgtggcagagaaaataatggattggagaatttccagaccagactgtaaaagtcactattaaaataatcacgaaatgaggagatgacaaactaaaatttgatctagtgaacaactgaatatgggagaaatagaagagggaggaatgtaggataactctgatttctagtttaggttataatatagtagtagcattatttaacttggtgaaaataggagaaaccaggaggaaagatagcaagttcagttttggtcatattaagtttgaaggacatttgagacagatgtgtccgggaagcaactgagttaggcattagtagatctgagaggaaaattgaaatttagaagcaaaatcaaaggtgttagtagaatccatgtgagtggacaaaatcacccaaggaaaatgtctagactaagaaatgaaagtaatcaaggagttaattccaaagaatgacattcaaaaaccaggcacagccagtaaaaggaattaatgactatgaacctcagttgtcacaaagagactaagtaatgtaaattttgagaagtaattactgtatttggtatttaaaaggccattagaaacttaagcaagaacaactttcttgaagccattaaagaagccagacagaagacttttgtctgtttgatataagtaaaaataatatcctttcaagaagtttactgatagataggaggactaggaaataactggataaacacaggatggaggacatggttttgctttatttaattttcataagatgtgtgacttgagcactgaagagaagaaactggagaggaaaaggctgaacgcacaggaaagaaaaaaacaactggaagcgaaatgtaacagatggaagcaaatgagatcaagagcaaagatggatggattatcctttaatatccctttctctacactagaaatacaagactaaaggctcggcaaaaatatagagcaatgtgtaggttgggggcatgaggttgaagaaatggcctgttatactccatcatgtttagaaaggagaaatgaagagggcaaaagacagggtttgtaaagggaaggtttgaaaatgtcttcacagagaatgggtcaggggaaaactggggtaaccaaaaggattgctgagtagtatgaagaaacaaggggtggtgggtgagggctctgtttctaaattcatagctataactatctaaagatctttctatcctccagtccgttatccataagtgcttaaaagatatggtagttaagtgaattaactagaaccctctcaaacataggggtgaattaaaataacctataggcttatttaaaatgcaaataccgagctccattcctttcattcagaatttccaggggtgaagcccaaacagtgaattccagaagctctccaagcaatcccaggagaaatttctgtttaaaaaaaaaagaagaagaaagaaaagaaaagagaaaagaaaagcaagcacagacctagaaggtaaccaactggatagaagagcgctgatccaacatacacctgttaatggccctcgtgggggcgtggggcagtgctctgccactcagaaaagcaaaaagactccaagatctagggagattcagatcagtgttgagacagtcacatacacaccaccccatactcttaataaagcgcgttaatgtgaatctgtgaacatgaaaaatgccatgatgaacaatgcaaacacataatgtttgttcaaaacaggttattagactcgatgccttaccctaaattttctgtttcattactctagagacttagtaacattagtggaattcagggtgctgtaagaaatacggagagcgaggagactgcaggaacagcccgtgggaagggggaaagagataacggggagaaggtcgggaggaccggacaactttaagtgcccatccgcccgaagacttggaaagctaagtaagtaggaccccagagccgttcttctggcatcccctggcactcaccattgtctcaggatctcagcactagaaaataggtatcgttgagacaggaagacaccaccaccaccaccatcatacggttactcaggcaacaaagccccgcccactgtcgcacgaggcgtgggacgccaccgccccacctcttcgtccttagtggctgggagtaatctcagctgcgttcatccaatcgacagacccgcccctccacgctgtcgcctggggctacgagacgccattattctgtttccggcagttttacttccgtttgtttaacagctggcccggaagtttaagtgaatatgcggcttgggctccaaaagttgctgtacggtattttattttaaagtagaaatctgtccgcttttcacttacggaggccttacagtgtgtgttctgtgttacttgagtttatacgcactgcagaatttgtttaccctgctcttttggaaacgtattccggaagcgaaaccctgagtaatcggaagtggttaggagtgagagagctgctggatatgcggagggactgggcgggtcggcttccgaatggaagaggtctgtgagaagttaacctggtgataccgatccgaagagcctatcaagtgaagccccctgaaatacggagaataagaatcttagaggtaaatccgaggacaagcaggtataactaaggatgttggaaagggacggaggtctggctggagctcggtggccagtagctttggatttagggaaagattgttccgggaagactttttcagacagggatgaaacttaggtttcgacttccccggacagcaaagttgacaggcttgtcgcttcccggcctatcgctttcatacctgctcactccccctacttacttcttcaccccctccgcttcatttggcatttgccagcaggcactcgctgtgcctgtacgtttcgcagagcagctatcaagggcagtttcagggatcgttactcttacgaagggttttttggatacctcttttcggagcagtagagtgtaagtgtagaaaagtttgtgactgttaagaaagttagtcgtcgggttcactaattgaactgagttgtatctagtactgagaacgatctttttttgtagtgaaaccagttgtcatctagtgtacagtttgtcatatttatatcattgcagtagcatcaccttcttatatgttctctggtaaatctgagtctgtactgtaagacaatgtatacatttctgaaagcatgggctcgatatgtttctctttttacttttggagctacactattttaattttaactttttattaccaaaaaagtataaattatgttatcttgagtaatattttttgtcgtttgttaaacatctaaacagaagctcctttttgatatgtgtgtgtgtgtatacaaattgtgtcggtatgtctcctaagaaagtaattactttaaaattcctcttgtcatatggatgacaaaaccaccacagtaacttcattccctttgcttggctaaaattcaggacatacttctgacaatttagagtgtattggtgaggatggtgaaacggagtatttagaagtaaaccacccctaatttttttttttgagacttttagtagacataacaatgccttctgtgagaatgggatataagggacatttctctttctaaatgcatgcgtactaaatacagaagcaattaaaatatcataacttttaaattggaggtactctatgtgtttatatgatatttttaaaattatttcatatgcatacatttctaggttgttcagcagaagtcttggagtgcattttcagtggttaaggtgaaaaaatgactactaaaaatttagaaaccaaaggtaagtggcttttttataattgtttttaaaacatgacatttatgacgatgtgaaggaacgtttgagccagataactagatctcatggacccccttgggaatcatttgttatttcagatccctttatgtttattttttagtgcagtgtttatatttcagtactttagatgtacaagtgaaatttaacatcattagttagaatttattaggtgactactcttaaacatttaatgttaatgcaaagtttttaacagctatattccctatacactagaagattacgatttaaataagaatacacattttaaagatttaagtagatagacaaagcaactagggtgtatcaaagatctctttcatgttgtattagtttgctggggttgctgtaacaaagtaccacaaactgcatggcttgaacaacaaaatgtattctctcagttctggaggctagaagtccaagatgaaaatgtcaacaaggctgtgctccttcggaaggcattagagacactctcctagcttccagtggcttgctggcagtctttggtgctccttgtcttgtagacgtaccacccttatctccgccttcatattcacatggcattctccctatgtgcatgtttctgtgtctaaatttaccctttttataaagacagcagtcatattgaaaaaaggaacccagtctactcctgtatgatttcatcttaactaattacatctgcagtgatcctgtttccaaatgaagtctcattctgaggtagtggggggttagtacttcaacaaataaagatttgggggacacaattcaacccctaaattgctaaatacagtagtcactttttagtcctagctgatttgtcctctctaatatttaatactgttgaccattccctgccttttgagatacgttcttttgatgacttccatgacatcacttttattttcagtctactctgtagcctttcactgtccaatgcggtaattacatgtggctatttgaatttaaattaatattttttaaaaattaaaaattcagtttctcaatgacgcttgccaaacttcaagtggtcggtaggcaaatatggcgagtagctatttcaatcattgaagaaaattctgttggacagccctgctgtagctgtatcttctctctttctttttcagcctcttctccttcttatttatcttttaaatatcaacactttccaccactgtttcttttctactctcatgacttcagtaattatctatataaatgacttccaaatctatctatatccctaatctccttctttatgattcatacccttatagactactgcctactggccatcttcacatagctgtaggcaacaattttaacatgtcccatagtgaacttctcctgacccagcttattctttggatgggttgagttctgcatgctagaaccatcagttaaagatggaaaactgttttctagatgccaatttttcagcaaactgacctccagccacaaaccctctctaaaagcaggttgaaataagtttaagaaacaaggaagaaagatcatgctaataaatatttaattgaatttaattcagctttgcaacagcatttcataagtcaccagaaggcttttataccattagataagcaagtcagagactgtaatgaaagtaataaactggggattaatgggaaataagagcagttaaataattaatgtgaaagcaaccaacatggtgcttgtcaaaaagcaaaaactaaatacaatattatgattagtcattagaagtactggcaagttctctgtgaaattaaattactttttaatatttattattacttgtttttaatgaggattagagttataaggcactttaacaaacattattttgtgtgatcttaattatccagtaaggaaaataattctattagccatatttctatttaatctgtcatctgatgttagtgaacaaaagttacttgtattgcatggcctgtgaaaaggtgtacttggttgacatttgtcagttgtctgtgcttcctgtaactgcctcaggagataagtacggttgtttggtatagcaacagaacttcctctcagaagacatttgagcagcactgtcatcataagagggttgtatcatggctgctagtgctgtttctgaaagggaaacatacagtaaatagtaacaattagaaacttaaaatccaaagcttttcttggatgtgggattaaaattgaaaataaagctattaaagtcaactagtttagtaatagtagaccaaatagaaaggtctgagacatttaaatatttttgattccataaaatagtctaacactagttctgtagaataataggtgttaggtaaaaaagatattccatgagcagataaatttgataaatgctgtattaaaagagaggctatactatgggacctctcagagtcctatagtataactttaatactaatgtacattgaaactctgtagagatgcagtatgcaacattgcccacacttatttgaccagggatctctatccatagagcctgtggtaagaagaatgcttagattccacttcagtaaatctcgatgttactcttaagtccattgtatgtaacttattttactaatttaataataactaaactttattaggtgatatgggtgacatttaaaaagactcttgatttaaaattaccacatgacaatccctaatttgtttaactgtatcatagctgaatttgtatatgttctggaaagtctttcagactataaccaagttaggaattaatgatttagggtagaggaaaaaaaataaagcagtttttaaatgggttagtttttggatgttaaaaatgaaacactctaggtagtgtattaacagactaatgagcttcagtaagcatttattcattttctctgtgacaaggaccattttattagttcatgacacaaagattaggaggcggtccataccctgaagagctcccaacagtctagtctacaagagaaacaaattatttttaaaatatatactaccatgtttgcattactctgaaagcaccaagggatgggaggaggatgaggttaagtgctttgtccaaggtcacacaatacatggcagtagggacttaagttattttaactcaggctctagtgagttagatttcttttcactaccccattctgctgacttagagtacctctcatcatagattgaagttttatgaataaaagagaaatatttgttcaatgacagacaataaatttttttttgcctcaatattctagagcaagggttggcaaattgtggccctcagcctcctgagaatatctgcaatcagtttgataatagtggacattaacactatttaagccaaacattatcctgaattaaaaaaaaatctgttcttcccattattagacctatgttatcaaaaaattgttttcaattattgttgttatagtttgaatttcatcaataaattttttttctcttattaaatacttacatggtatcctcaattttaccttttggttcacaaagcctaaaatatttactctctggtcctttacagaaaaagtttgccagctcccatcctagaatgttagactagtgaccttctttgttctttccctacatttcaccaatcctggtaggcaatacgaatgagcaaaccttagatatgttttaattcattgataattgatcacaggtggaagtaatgatgatgaataatttaaggattgttttgttggttcccttcaaatagtggggaagaataaggattggtgtttttcttgacttaagcgttactcataattatggagctgttaccataggtccttgtcttcccaattgagagaaggtaattattcgtaaatgtgtcctggattgtgcctactgcatatgtaataaaggtttctaggtatgtcacaaggaaaaatcgaattacgaaagttaccaggtgagaaaatgttaagccctggctcttacggcctgtttacctatgcacattagctagaatcatagttattactgagcgggagctctcacgtaatatataatacaactttgatattcataaatgcttgagtaagtagaacagtttaaataaagttaagagtaaattggggtggaaacaagttggttgaacttcttgattttccaacaaggtattttgttcaaaaagagatttctgttaaatacctattaatggttctttgccttttaaatttaactttaatcattttgtaatttgttcttgaatctctgttacttaaaattccaactcaaaaatgttacagcttgcctagaaattttatttgaccataatggaagtatcacacctgttttttatttcctcagcctcagtgggcctgaaccatggctgtagtgcgtgtttttattgttgatggtttttattaatttatagttaatacatgattctgtgttacttcttaaatgccagaatgtcttattgacaagattagacaagttagttaagtttagacaaacttaaaatcagattttaagaatacaggtagctgggtgtgatggctcacatctgtaatccaagcactttgggaggctgaggccagagaattgcttgagcctaggatttcaagaccattctggacaacatgatgaaaccctgtctctacaaaaaaaaaaaaaaatacaaaaaaaatacaaaaaattatttggtcatggtggcacatgcctgtagtcccatctacttgggaggctgaggtgggaggatcacctgagcccaggaagtcaaggctgcagtaagctgtttttaaatgattcagtggaagttctccttgtcagtgctaccatgctttgttttaactaatttaccaaacccagcatgttaggcctttatttcactttctgaagtattcctttgtttatctttttaaaagtagagtcaatcccaaggcccaaggggtgtttaaacttagtttacatttcatatggaaatgacacgattttattctaatgtaaaatgttttgtaaaatagaacacattaattatacctcagctatgtttccacctcctgtctaattaacataactcgaggttcccagaacatttctacatgggaaaaatttgaaaaaagtaaatctgttacttgaataaatagtcctatagtctagcaatataactttaagatttacataacagaatgaaagtcagaattgtattttatggcattaaataaattaactttatttctgtctatatcaacatccaaagtttattaggaatttatttaaagaataataaaagcaataggacctaacatttaatgagtgcttactgtgtcaaataccattctaaacagtttacatgtattcttatttatttttaagtacaatataaatcataggtattgagcatgcaaataaataaatagtaaggatattaggcatagatccacagatacactggtagagtgattttcgaaggcatttcggccgtacagatcttcaccaaacccattaattttatgcttgggaatttatttgaaaaaataactcagaagttaagaaaaatatgtaggcataaaagtgttcaataaagccttatttattatagtgaaaaattgtaaagagtctaaatattcaacagtagaataagaaagtaaatgctatattaacttgaagggaatatattctagccataaaataaaaaatatgttaagcttacgaaatttattactgttacaagtataaaaggaattctgttttaagtctttgttttaggagattacattacacacacacatatatatataaaacatatatataaaaaacatatatacatataaaacatatatatataaaacatatatatatatatatatatatatatatatatatatatggtctggctggacagtgatgaattcactgaagaccaatcagtagttcatgattgtccttaatgtttctatagacataaaatttctattgaaatatttttataccacttacctgcacacttattatatattatcctgtaatacattttatctttttatatgtatgttctgtcccctaaattaggtagtaaatttcttaagcatagtggtcttacctcatagaatgtctagccttcattaggtacccagcatcatgtttgctgcccgtgaccactcagagttcatcattataaccattgttactgatctgtgtgctcgtcttttgtccctccccttgttatcattcatttattgtttataacatatatacatatatatatatatacacacacactacatgcaaggcattttattgggaatacagtgcactcaaaataaattgaaagccactagagggaatgagagaacaataaaagaatttgggtatgatatggtgaaagtgaggtataaggatgtttaatctgacaatccagtgtagtttcacttgtgtaagcaggacataaactgttaggcctaagaataggattgaatcttttcttaataaatttttcggtgtaacatatatgttgcttcctcttactccaagagttcacaaaacagatgaatctcttatgatgtagatggtttcaaatatgcatctatatagctgacatttattttaactaacattattgagtgtctacagtatgccaagcatttcatcttattacattttttcttaccaaaattctatagcaaagttgttatgatctccgttttgcaaattaggaaatagagattcatggaagattaaattatttacccagggttatactagaaagtaaaagtcagaaccaaatattctgattccaaatctcttgtctactgaaggaaagtttaaacatgtatcttttgttgacacatgattgttttgaaaattactttttctctgattttttttttgcattctttttagtgccagtaattttgaatatagggtatagcatgtattagcattttcttggcatttcttcttggtaagtagtttctgttttgtttcctttttgttagtcaccgttacttcatccccaatccgaggagcaggagatggaatggaaactgaggaaccacctaaatctgttgaagttacctccggagtccaatctagaaagcatcatagtcttcagagtccatggaagaaagcagttccatcagagagcccaggagttcttcagctagggaaaatgctcactgaaaaagcaatggaagttaaagctgtaagaatattagttcccaaagctgctataactcatgatatccccaacaaaaatacaaaggttaagtctctgggacatcataaaggagaattccttggtcagtcagagggagttatagaacctaataaggaactctcagaggtaaagaatgtattggaaaagctcaagaattctgaaagaaggttactacaggacaaagaaggtctttcaaaccagctccgtgtacagacagaggtaagaagagccttaatcgataaaatgagtactactctttacgtctggaccttttaaacgtgcatgttagaaaactacatttctttatgggaatgtcattcatcctagcttgtcagttctctaaaatgcttcctcttaaatttctcattctttctcagttctctagggatactttatattgggaacttatactctaaacctcattgaagatggaggtgtgaggtgctttggacaagaccaccaataagttgtaaaagtaggttacaattataaactgccagaccaaagattgaccaagtcaggcatagtaattgaccagcagtccttgttttaaggatccgtaaattccaagtagttttgcttgtgtatacgggatacttggaataaagagaatggcgatataacttactgtgtcttcattgtaaatgaaaaaaatctgtagcccttaagtgtgttgctttaatctttgcatcttagtaaaaattgccttgccccttcccttgtttctctattagaccatgcatcttttggctagatacaagtcttcataagtgagaccatggttagtgtttttatacaaatatatttttaaataactaatttctcattacaaaatgtagtacaaatttatgtgtaaaaattttagaaaatacagaaaaacacaatgaaaatagtgccacctgaatcatttcatccagctatacgtgcataaccatatacattgagttcatttagtgtcacaacccacttttttcagttattaatgttctgccatgtcacagaatattctattacagtgtcattgttaatagtaacagtgttcttcaatagctataccatataccaataactgttattggatatcttttaattttttgctcttttcagtaatgatgtaaagaacatacttagaaacatactggattactttgctttattttttaaaagtaaattcttaggatgcaatac

SEQ ID NO: 441 - DNA, 90499 bp, Homo sapiens
gtggattcttgtaggtttttaagattttatactatgcagccataaaaaatgatgagttcatgtcctttttagggacatggatgaaattggaaatcatcattctcagtaaactatcgcaagaacaagaaaccaaacaccgcatattctcactcataggtgggaattgaacaatgagatcacatggacacaggaaggggaatatcacactctggggactgttgtggggtggggggaggggggaggggtagcattgggagatatacctaatgctagatgacgagttagtgggtgcagcgcaccagcatggcacatgtatacatatgtaactaacctgcacaatgtgcacatgtaccctaaaacttaaagtataattaaaaaaaaattgaacaaaataaaaaaaaaagattttaagtctagttacttttctagggtatgtctcaatgtaggtcaagctctgtttttttattaattgagataaaattcacattccatacaattcttttttagtatataattcagcatgtttttgtatattcagaaagttatacatccttcacccctaattcctgaacatttttgtctccccaaaaagaaaccgtgtgcccattagcagttacctcccattacccttgttcttgcacccccgcctcgccctggcaaccactaatctactttctgtctctatgggtttgcctatatgagacattccacataaatggaattgtaaaatatgtggctttttgtatctagcttctttgacttaacatgatatttttaaggttgtagcgtatatcagtacttcattttttggtttgcagaataaaatccgttacgtggatttacaacattttatttatatattcatgaatggatggatacttgggttgtttgtacttttttactttcacaaataatgctgttataaattgttatagattgtgtacacgtttttgtgtggacataattttttcagttctcttggatatatacgtaggagtagaacagctgggtcatatggtaactctctgtttaacctttgagtaactccccaactgttttccaaagtggctgtgccgcgttatatttccaccaggatcatattagggtttcagtatttccacgtcctcgtcaataattgttattttctgatttttgattataaccatcctaatgagtgtgaagtgtcatctcattgtggttttgatttgcatttctctaatgactaataatgagaagcacctttttaagtgcctattagccatttgaatatcttctttgcagaaatttctattcagatcctatgctcatgtttaaattggcttatttttgttcttttattattgggttcgacgtgttctccatatattctgaacagcagtcccttattcactatgtaatttgaaaacatgtctcccattctttgggatgcttttcactttcgatggtatcatttgcagtacaaaatttttagttttgacaaagtccaatttatctacttttgtcatttgtgtttttcatgttgtgtttaaaactattgcctaacccaacatcacacacaaaaaaagtttacttctttgcttttttctaagagtattataattttagctcttaaattagggtctatgatcattttttagctaatttttgtatgtaatgtgaggcaggggatacagtttcattttttgcatatggatatccagttgaccccgcaccatttgttgcagagactattctttcttccattaaattgtctggggtcctttgccaaaaattaattgaccataaatgtaagagtttatttctagactcttaattctatttcattgatccatatgtctctgcaaatgccaccaccacaccgtcttgttgtggtgttcttgtggtaaattttgatgtgtgagtcctccaactttgtttttcttttataaaattgctttagctatttatgggttctgtgaactttaagatcagcttgccagtctctgaaaaaaaataaaaggcagcatgaatcttggtagggatgtcattgaatctatagttggaattggggagtactgacatcttaaaaatattaagacttctaatctatgaacatgggatctattcccatttagttaagtcttctttcatttctttcaacaatgtttatagtttttacttctttgcagttcggcacatctgtcattaaatgtatttctatatattttcttctttctaatgccattgtaaatgaatttgttttcctaatttcatttctaggttgtttactgctagtgtatagaaatacaactgatttttcttacattgatcatagattgtacaagcttgctgaacttgtttatcagctctaataatttgtgtgtgtatatgtgtgccttaggattttctatatagaataccatgtcatcttcaaatagagatggtttttctttctaatcttatgctattttttctttttctttgctgattgcctttgtttgaacctccagaactatgttgaatagaagtggcaagaatggatgtccttgtcttgttcctaatcttaaaagggaaagcttgacagtcattaagcataatatgagggatgagttatttgtagatgccctttaacaggttgaggaagttcccttccattcctagtttgttgagtgtttttaccatgaaagggttttttattttgccagaagccttttctatttctattgagctgattatatgttttccctttattctattaatatggtgcattatattgatttattcatatgataaaccaaccttgcattcctgagataaatcccacttggttttgatgtgtaatcccgtttctgtcttcttggattcagtgagctagtatttttgtagtattttacatctgtagtcacaagggatattggtctgcagttctgtgatatcttcgtctgcctttgatatcaggataatactggcctacatagaaggaatcaagaagtgatccttctgattatgttttttgtatgagattgtgaataattggtgttacctcttctttaaatatttggcagaacttatcagtgaagcttggtccaagctttacttttggagaagttttctgattattaactcagtcttttctcattataagcctactgagattttttatttcttcttgaatcgattttgatcatttctttatctagaaatttgtctacttaatctaggttgtctaatatcttggtatatgattgttcatagtatcccctcatccattcttaattttagtgatttgagtcttcggtttttccttggtgaatctagctaaagatttcagtttttgttgatgttttcaaagaccaaacttggtttctttaattttctcttgcattttcctaatctctgttttatttatttccattctaacatttagcatttccctccttctacttatttttgttttagttacatagaactttagttacgtagagctcatctttttctaattcctttttaaaataatttcaatttttattatagattaaaggacacatgtgcacatttattacatgggtatattgcttgacactgaggtttggggtataaataatcccatcacccaggtggtgagcatagtacccaatcggtggtttttcagcccattccctcctcctttcctcccatctagaagtcctcactttgtattattctcatctttatgtatattcagtgttcagctcccgcttgtaagtgagaacatgcagtatttggttttctgttcttgcattaattggcttaggataatggcctccagctccatccatgctgctgcaaagggcatgattttattttatttttatgtctgcacggtatttcgtggtgtatatacactacattttctttatccatccactgttggtggccacctaggttgatttcatgtctttgctattatgaatagtgcgggaaagagcatgtgagtacatgagattttttgacagaatgaattcttttccttcgaatatatacccagtagtgggatcgctgggttgaacagtggttctttttcagttctttgagaaatctcccaactgctttatacaatggctgaaccagtttgcattcctaccaacagtgtataagcattcccttttctctgcagccttgactgcatctgttattttttgactttttaataatcagaattctgactggtgtgagatgttatctcattgtggttttgatttgtatttctctgatgaatggtgatgttgagcattttttcatgtttgtcagctgcttgtacatctgcttttgagaagtgtcttcctgttctttgctccccctacttttttttttttttttttttttttgagaaagggtctcactctgtcacctaggcggtagtgcagtggcacgatcttggctcactgcaacctccgcctcccaggttcaagcaattcttgtgcctcagcctcctgagtagctgggattacagctaatttttaaatttttagtagagatgggatttcgccatattggccagctaattttttaaatttttagtagagatggggtttcgccatattggccaggctggtcttgaactcctggcctcaattgatcttcccaccttggcctcccaaagtgctgagattacaggtgtgagccaccgtgcccagcccctttgcccatttttacaaatggaattatttgatttttgctttttaaatttttacatttccttacagattctggacattagagatttgttggatgcataatttcctaatattttctcccattctgtgagttgtctcttgattgatcatttattttactgtacagaagctctttggtttaattaggtaccaatcatcaatttttttattttgttacaattgctattcaggacttagccataaactattttccaaagccaatattgagaagggtatttcctaggttttctgctaggatttttgtagtttgaggtcctccatttaaatctttaatgtaccttgatttttttaaatatagtgagaggtaagggtccagtttcttctgcatatggctagccagttatcccagcaccatttattgaatacagagttctttcttcattgcttatttttgccaattttttgaaggtcagatggttgtaggtgtgcaggtttatttctgagttctctactctgttccattggtctatttgtctgtttttgtaccggtaccatgctgttttggttactgtagccttacagtggagttttaagttgggtaatgtgatgcctttggctttggtgtttttgcttgggattgctttgactatttgggttcttgtttggttccaaatgaattttagaatacatttttctaattctgtgaaaaatgatatgctattttgatagggatagcattgaatctgtaaattgctttgggaagtgtggccattttaacaataatattgattcttctcatccataagcatggaatttttttccatttatttgtcatctctgatttcattcagcaatgttttatagttctccttgtagagatctttcacctccttgattaggtatttcattttttgtggttattgtaaatgggattgtgttcttcatttggttctcagctagaacgttactgatgtagagaaatgctactgattttgtatcctgaaactttaataatttgttcatcaggtccaggaggcttttggtggagtctttagggtattctatgtaactcatatcatcagcaaagagagatagtttgacatcttgttttcctatttggatgcctttcacttctttctcttccataattgctctggctcagactttcagtactagaagtggtgagaatgggcatccttgtcttgttccagttctcaaggggaatacttccaacttctgcctattcagtatgatgttggctctatgttagtcatagaaagctcttattattttgaggtgtgttccttcaatgccttgtctgttaagggtttttatcatgaaggggtgttggatttcatggaagatgttttgtgcatctaccaggctgctctggggtccaaggcctatggaggtcccttgtggacttgagtgttgcctccttatacactctgggcaggcagctccctgtatcagtctatatgcctgggggtcaggaggaatctcccatcccaggattgcacaggtccccgcaggaagtgtagatcccccaggggctctcactcactatggaaaccatttagttgcccatagtaatgtggttgaattctctttaactgccttatacatgtttataagttgctgtttgaatccccttcccaggacatgactggtaattgtgtgtggtttgtattaattttgttccttggagcttggagaagccagagagggagtaggtgattctaggactctgtgcaacctcctgaagtgacatttttctctgcgattgttttaaaactcacaaactgatggctgctttagcaattgcagggtaagggaaatacctagttctatgggacgtgcccttgaggttttgcttttgtacttctttaaggtggctgttggctgctttggtggcttcctagtgtacagtaatattgctgggcctgattttttttctagcaaatcttcataatgcagctaagctattcagatctaagagataattttctagacatttttctgatttctttctggctagaaggagtatatgattaatcttcattcaagctggggcagaaatgctgttttcttttttaaacagggttgcatgtctctagttgagaagtttatctcttaccttagtcaccttttctgtcaaaagtgggctatccgtagggtattttgaatgtaatgactcacctttcaccctctgtatgtatgatcctttgtggagaaagaactgtgtattagctctaaatttgtgatatgagttgagccccttctctggattctgaagattcttttcatgttttgtttgtttgtatatttcagtcatggaagaggagattcattatacctgtctatttcctaaaatccatcacctgttttctcagtgtttctctctctcctatttactcagcttctctgtatctataggctgcttcctcttcactggaaccatgctttagtcattcctcacatggactggggaggacaagtgtgacaggatggcttctgttgatgtttctactgccttacatctttctctttattaccaaatatgtaatcttttattaagtataaagataaaaggatagttaaatataaagagttcaacaacatagaaaataaaaaggccttgtaattcatccgtaattctccccatcctgaaatagtcctgattaacattttatatataatcttccagttttatattttatgattcacataccttgttttattttaaaaaatggaattataccaggtgatttgaaagtcttattttcaacttttgtttgttttgaaactgttcatttaatatatcataatagacatctttctgtgtgaaatacagatttatgtagtcttttttattgctttatgagttccattgtatacttatactgtttaattagttccctaataacagatatttaaatcatttaaaatatttcttttttattattattatactttaagttctagggtacatgtgtacaacgtgcaggtttgttacatatgtatacatgtgccatgttggtgtgctgcatccattaactggtcatttacattaggtatatctccgaatgctatccttcccccctccccccaccccacaacaggccccactgtgtgatgttccccatcctgtgtccaagtgttctcattgttcaattcccacctatgagtgacataggtgtttgtttttctatccttgcgatagtttgctcagaatgatggtttccagcttcatccatgtctctacaaaggacgtgaactcatccttttttatcactgcatagtattccatggtctatatgtgccacattttcttaatccagtctgtcattgatggacatttgggttggttccaggtctttgctattgtgagtagtgccacaataaatatacgtgtgcatgtgtcttgatagtagcatgatttataatcctttgggtatatacccagtaatgggatggctgggtcaaatggtatttctagttctagatccttgaggaatcaccacactgtcttccacaatggttgaactaatttacagtcccaacaacagtgtaaaagtgttcctatttctccatatcctctccagcacctgttgtttcctgactttttaatgatcaccattctaactgttgcgagatggtatctcattgtggttttgatttgcatttctctgatgggcagtgatgatgagcattttttcatgtgtctgttggctgcataaatgtcttcttttgggaagtgtctgttcatatccattgcctagttttgatggggttgtttgatttatttcttgtaaatttgtttacgttcgttgtagattctggatattagccctttgtcagatgggtagattgtaaaaattttctcccattctgtaggttgcctgttcactctgatggtggtttcttttgctctgcagaagctctttggtttaattagatcccatttgtctattttgtcttttgttgttattgcttttggtgttttagtcatgaagtccttgcccatgcccatgtcctgaatggtattgcctaggttttcttctagagtttttatggtggtaagtctgacatttaagtctttaatccatcttgaattaatttttgtataagctgtaaggaagggatccagtttcagctttctatatatgtctagccagttttcccagtaccatttattaaatagggaatcctttccccatttcttgtttttatcaggtttgtcaaaggtcagatggttgtagatgtgtggcattatttctgagggctctgttctgttccattggtctatatctctgttttggttaccagtaccatgctattttggttactgtagccttgtagtatagtttgaagtcaggtagcgtgatgcctccagctttgttcttttggcttaggattgtcttggcaatgcgggctcttttttgattccatatgaactttaaagtaggtttttccaattctacgaagaaagtcgttggtagcttgatggggatggtattgaatctataaattaccttgggcagtatggccattttcacaatattgattcttcctatccatgagcatggaatgttcttccatttgtttgtgtcctcttctatttcattgagcagtggtttgtagttccccttgaagaggtccttcacatcccttgtaagttggattcctaggtattttattctctttgaagcaattgtgaatgggagttcgctcatgatttggctctctgtttgtctgttattggtgtataggaacgcttgtgatttttgcacattgattttgtatcctgagactttgctgaagttgcttatcagcttaaggagatttggggctgaggcaatggagttttctaaatttacaatcatgtcatctgcaaacagggacaatttgacttcctcttttcctaattgaataccctttatttctttctcctgcctgattgccctggccagaacttccaacactgtgttgaataggagtggtgagagggcatctctgtcttgtgccagttttcaaagggaatgcttccagtttttgcccattcagtatgatattggctgtgtgtttgccataaacagctcttattattttgagatatgtcccatcaatacctagtttattgggagtttttaacatgaagggctgttgaattttgttgaaggccttttctgcatatattgagataatcatgtggtttttgtctttggttctgtgtatatgatggattacatttattgatttgcatatgttgaaccagccttgcatcccagggatgaagccaatgtgatcatggtggataagctttttgatgtgctgctggattcagttttccagtattttattgaggatttttgcatcaatgttcatcagggatattggtctaaaattctctttttttgttgtgtctctgccaggcctaggtatcaggatgatgctggccttgtaaaatgagttagggaggattccctctttttctgttgattggaatagtttcagaaggaatggtaccagctcctctttgtacctctgatagaattcaactgtgaatctgtctggtcctggactttttttggttgataggctattaattattgcctcattttcagagcctgttattggtctattcaaggattcaacttcttcctggtttagtcttgggagggtgtatgtgtccaggaatttatccatctcttctagattttctagtttatttacatagaggtgtttatagtattctccgatggtagtttgtatttctgtgggatcggtggtgatatgccctttatcattttttattgcatctatttgattcttctctcttttcttctttattagtcttgctagcggtctatcaattttgctgatcttttcaaaaaaccagctcctggattcattgatttttggaagggttttttgtgtctctatctccttcagttctgctctgatcttagttatttcttgccttctgctagcttttgaatgtatttgctgttgcttctctagtttttttaactgtgacattaggatgtcaattttagatctttcctgctttctcttgtgggcatttagtgctataaatttccctctacacactactttaaatgtgtcccagagattctggtatgttgtgtctttgttctcattggtttcaaagaacatctttatttctgccttcatttcgttatgtacccagtagtctttcagaagcaggttgttcagtttccatgtagttgagcggttttgagtgagcttcttaatcctgagttctaattgggttgcactgtggtctgagagacagtttgttatcatttctgttcttttacatttgctaaggagtgctttacttccacctatgtggtcaattttggaataagtgcgatgtggtgctgagaagactgtatattctgttgatttggggtggagagttctatagatgtctattaggtctgcttggtgcagagctgagttcaattcctggatatccttgttaactttctgtctcgttgatctgtctaatgttgacagtggggtgttaaattctccaattattattgtgtggaagtctaagtctctttgtaggtctctaaggacttgctttatgaatctgggtgctcctgtattgggtgcatatgtatttaggatagttagctcttcttgtttaattgattcttttaccatcatgtaatggccttctttgtctcttttgatctttgttggtttaaagtttgttttatcagagactaggattgcaacccctgcctttttttgttttccatttgcttggtagctcttcctccatgcctttattttgagcctatatgtgtctgtgcacatgagatgggtctcctgaatacagcatactgatgggtcttgactctttatccaatttgccagtctgtgtctttcaattggagcatttaggccatttacatttaaggctaatattgttatgtgtgaatttgatcctgtcattatgatattagctggttattttgctcgctagttgatggagtttcttcctagcattgatgttctttacaatttggcatacgtttgcagtggctggtaccggttgttcctttccatatttagtgcttccttcaggagctcttgtgagacaggcctggtggtgagaaaatctctcagcatttgtttgtctgtaaaggattttatttctccttcacttatgaagcttagtttggctggatatgaaattctaggttgaaaattcttttctttaagaatgttgaatattggcccccactcctttctggcttgtagagtttctgctgagagatcagttgttagtctgatgggcttccctttgtgggtaacctgacctttctgtctggctgcccttaagattttttccttcatttcagctttggtgaatctgacaattatgtgtcttggagttgcttttctcgaggagtatctttgtggcattctctgtatttcctgaatttgaatgttggcctgccttgctaggctggggaagttctcctgggtaatatcctgcagagtgttttccaacttggttccattctcctcatcactttcaggtacaccaatcagacatagatttggtcttttcacatagtcccatatttcttggaggctttgttcatttctttttactcttttttctctaaacttctcacttcatttcattcatttgatcttcaatcactgattctctttcttccacttgattgaatcagctactgaagcttgggcatctctcacatagttcacgtgccatggtttttagctccatcaggtcatttaaggtcttctctatgctgtttattctagttagccattcatctaatcttttttcaaggtttttagcttctttgcaatgggttcgaacatcctccttttgctcagagaagtttgttattaccaatcatctgatgcttacttctgtcaactcgtcaaagtcattctccatccagctttgttccattgctggaaagcagctttgttgctttggaggggaagaggtgctctgatttttagaattttcagctgttctgctctggtttctccccatgtttgtggttttatctacctttggtctttgacgatggtgatgtacagatggggttttggtgcggaggtcctttctgtttgttagttttccttctaacagtcaggaccctcagctgcaggtctgttggagtttgctggagctccactcctgaccctgttcacctgcgtatcaccagcggaggctgcagtacagcaaatattgcagtacagcaaatgttgcagcctgatccttcctctggaagctttgtctcagaggggcacccagctgtatgaggtgtcaagttgtcccctaatgggagatgtctcccagttagggtactcgggtgtcagggacccacttgaagaggcagtctgtccgttctcagatggcaaactccatgctgggagaaccactactcccttcaaagctgtcagacagggatgtttaagactgcagaagtttctgctgccttttgttcagctatgccctgccctagaggtggagtctacagaggcaggcaggccttgttgagctgtggtgggctccacccaattcatgctttccggctgctttgtttacctactcaagcctcagcactggcggacacccctcccccagcctcgctgccaccttgcagtttgatctcagactactgtgctagcagtgagtgaggctctgtgggcatgggaccctccaagccaggcgtggggtataatctcctggtgtgccgtttgcttagactgttggaaaggtacagtgttagggtatgagtgtcctgattttccaagtaccatctgtcacggcttcccttggctagtaaagggaattcccctaccacttgcacttcccggatgaggtgatgccccaccctgcttcggctcacactccatgggctgcacccactgtccaacaagccccattgagatgaacctcgtacctcggttggaaatgcagaaatgacctatcttctgcatccctcatgctgtgagctgtagactggagctattcctattcagctatcttggaaccctccggtggttttgaagttcatcactttttttagctatctccaggcctccttatctcacatgaaaattatatgcaagtgtcacttcagaatttccttctgaagatgcatcagactaatgtttggctagcattctcttcagagtttttccaggcccagtgaaaatagccaggctttttttgtcttaccaccttacaacaaacagcttaagtcctatccaactactacattctcccaacacagatacaaggcagcatgttcacattatctcaagcttcctccaaatacatctcaacagttagaattggattagaaagaggacttgttggcttgcttatcctgtgggtaactgtgacattgactgcaggtaataataacaagatctcttttatttttctaggtggcaaaccatgtgatttcttctgactctatttcctcttctgccagtagtttcctgagctcgaactctactttttgcaacaagcagaatgtacacatgttaaacaagggcacacaagcaggtaattacttgaatctgaactttttcattgaaatacattgaaatggctcttaaacatataagatactcaacctcaatcatagtaaaggacatgaagttaaaactatatccaactgccaattttcatcttatcagattggcgtaaattcaagtgtgatggcaagtttgtgggcaagagtgtagggaagtgtgttcccttgtatattccagtgggagtagaagttggtttactgtgaaagacaatttgacaggtcctgtcaaaattactttcactcagcatttttacctttgaaatgtctgctatagatatactatgaatatgtggattttaacctatagatatacttgcatatgtgcaaaatagtgtacaaaattaaccactgaaacattgttttttatagcagaagattaaaatgaatttaggtattcctcaatagctgaatgattacataaattattgtatatctggataatgaatgaaattctacatagaatgaggaagctctctctttactaacgtggaaagatctccaaggcatataactgattttaagaaaaggtacagaacagtgtatggcatactacaatatgagtttttttaaataaaagaaataaaggagggaagagaattgcttaaatgtgcaaaatgaattctctggaaccatatggggttgtgaacagagtaaatggagaccagaagtgggaaggaggatttttagctattgcctttctatacttttggtttcataaaataaaaataaataaactttcttgatttgtttcttcccctcaaatcctgtctttacttctgtcaacctcttccatacctgggtgactaccaaaaggactctaagtatttattgtctttctgccttgggatccaggtggaaattctttaccctttgaacccatattcattcttctttccctctcatacctaaaatgacttacaaataaaaccctttcttttttcttctccctctttttccctcctactctcccctgtccttccttcttttcctctctcttcccatcactccatcccacacaaagggattgtatttttgaaacattaaaaaggttcacatactcacttgaataaacctgtcaactcagcctcaaggttactcccagagacacctgtgatccttcccctcaggtaacttggagattgtgaacggtgccgaaaaacacactcgagccaactccaagttccagcgaggctaaattggaagaggacagtgatgtgacttcttggtcagaagaaaaacatgaagagaaaatgctctttaccagttatcctgaggacagaaagttaaaaaagaacaagaagaattcccatgaaggtcagtttctcattccagatcttgtagtagagaaactagtgaatttcaagtcccctgcaatgctgactctgtgtttccaagtgattctatgtgacccccacctacccccagtcaccaccttgtcagattttcgaagtccagcatggcagttacacagtcatccctgcagtgaaaccaaactcaagggcaccctgtggccgctgacagctgagacccctgagagcctgtattatatgcatctccttgatgaaagccaggtggggctgtaaaaagtgaaaattctgttttacttctaaaaactatttcctgtaggagtttcctggtttgttcctgtggaaaatgtggagtctagataaaaagaaggaaaacatgctcaagactcatgaccctggcatctcccggttggaaccagtaaccaagaccaagccgtggagggagccactgtgggagcggaactggcaggggcagcacctggacagtcggggctacctggcaggcccaggcagagaggatggcagaaacccactgaagctgtttgtgagagcaaccctgcaggtgcagtgacgtttacttaactttagccctacatgtagggagaagaagggtaaggcgcagagaagctggctctgtgacttggcgagctgaggtgtaggcctgagacgctcttttccagcacctccgcagttcacctgttttcacacgtgaggactgagtttctcatcatctgtcaaaggctgccttactcttagccatagatggtgcatcactgtcaggatctggagacaagggcacaggagggaggatttgtggctctgctcattgggtttgtgggtccctgtgtgtggagggcccagaggcctgatgcttgtgcagcctcatgcatgttcctccatgtccgcagctcctgtttctgctccatgtcggatttaaaggaaaccaagtctcttctgatgtgtccctctggggataaaggaaaagttattaatgatgtatttgtttgaatagatctttaaaatagcagcatgggcagagctgtattgcgttgatgtttcagagagttgtaatcgccatagtcttagttcctggcctatgctgaaggcatgtctttgatccctgtgggttccaagctgcagctctccgccatagagaggtgtcagaggtttcttcaactctaggtattttctcggcatttgaatcaggcttccccagacctcttgggtacgtggtgtgtttccagccatatggagagtagattgcatcattaatctgaggctgggtattttctctctctctctcttttttttttttttttttaaggaatcgcttcagtttcacagacctgacttcatctcccacattggggagcggataaagcgtctgaagttaatagtccaggagagaaagctgcagagcatgttaaagagcgagcgggatgcgctattcgacattgacagggaacggcagggccaccagaatcgcatgcgcccactacccaagagaggtacgccctgcccgttcactttcctgtgagtggaatagagaaggcaaggtctgctgctgtgctgcagagccctgctaaaggccagcccaggccagttacctgggcagacagcaaccttttgcttgccaagactcaaaccttcttagctaacagaacctccccaccttagccgtcagcacattcatgatccaagtaagcccagttactctagccctgtcactgcatcttaaaccagctctgtctgtgagcaagttagttccaaaagtatattgatttttcctgaaaagatggggctgattccaggcttgcctacctcttaggatggtaataatgataataataaacacatagtccttacatcttgcccaggcactgttcacattagcgcttacagcactctcagtaggtactattaatatatctactttatagtgagaaaactgaatcaaagggagattaactacctctcccaaggtgacatactcaggtgtgctgctctggagtctgcattcttaacaattatggtaagcagatcttgataaaataatgaaagctgtgaaaactacaaagtactatctaattctttcatcaagccttacctggaaactggccagttttttaattcaaagcctagtctttgctacagagtgttaggtccttagggccttaggctgctgtcctgttaccctagtctaaccctggcttgccttggtcattgctccccactcagtcttgccagctcagggtaggggcaccaagtcctagcagctccctctcccagctcttgcaccacaccctctgggttaagtcactgtccactgaaaaccctttcttctcttccttagtcttcctggctgtccagaagaacaagcctatcagcaagaaggaaatgattcagaggtccaaacggtaagaccaagaaaacaagagtttgtgtacaagtgttaaccaggccaccaagtggtcaggagctctggcttgcacccagaataaaggcattatgctcaaatttaaacattatgagaaagttgtgagagtcatttctcacttatggcactgaaaaaaaaagtagcacatcatggtatgaatgactcatatgcaaaagatgaaaaacttctcattaatttgcatatcttaggctcctctttattaacctaaatgtaaataaagaatattttaggccaggtgcggtggctcacgcctgtaatcccagcactttgggaggtcaaggtggataaatcacttgaggtcaggagttcgagaccagcctggccaacatggtgaaaccccgtctctactaaaaatacaaaaagtagccgggcgtggtggtgcacgcctgtaatcccaaccactcagaaagctgagccgggaggatcctttgaacctgggaggcagaggttgcagtgagcttagatggcactactacactccagtctgggtgacagagcgagactccatctcaaaaaaaaaagattattttaaaataaaattaaatatgtatttgggttattataccttttatcttagcaatcccatttcttggaattgatcccatagggtgagaaagaacagtgttctccagaacatattaagttaaacttttttaaaaaattaaattttcgaagtatgtcaacactgtttccatttgtggtctttaaaagtaagtatttgtgcctatgtagacgtgtatacttttatatgcatagaatatttctggaagacagaaaaacctgataatactgattgcctttggaaaggagaactgatgtaggatgtagtagattttttgactttttgaatgttgtgtcatgaggaacgaacattagttactcataaattaattcatttgagtgttggatgtggtggtacatttctgtaatcctacctactcaggagtcttaggtgagagaatctcttaagcccaggaatttgagactgcagtgagctatgatcacaccattacgctctggcctgggtaacagactgagactctgtatctaaaaaataataaataatattttaaaaaattaattcatttcagatattgatatattgatcatgggaatgccagagaataagttaaggttgacttttttaggtgttcattagagacttgctttaatgagaatagtttcttagttggcataatgcttctgaagtaaaggtactttaaaacagtttatcttacggactttaagcattcctcttgaaatcttgtttttactctttctagtcagtctttataggcaatccaaagggatgctttggatgctttagtccagtggttctcagagagtggtctgtggagtcctggaagtcgctgagaccctttcaggcaatttgcaaggtcaaaactaatttcagaatgacaccaggatgttctgtgccttttttgctgtgttggctatttgcactgatgatgcaagagtactgggagaggagtaaaaccattggtgtcttaccactattcaagacggtggcaccaaaccgtactagtctaataggcattgtatcctgcacagcctcccgccaggagtgtgatggaagaacaaggaagcagtgtaaatggaggtaaacgggaagcacttcctttgcaccgtgaaagatgatgactgtttcaaggaaaagcacttatgccatggtttgtgtcgtgagctgaaccagctgcctttgtcatggaacatgacttttaattgaaagagtaactgacagaaaaccaattattctgacttgtgtttagcagacattttcttgaaaatgaagaagtgactctctgacttcaggaaaatgtctgacagtatctgttgccaaagaaaatgtgagttttcaagccaacaatagaattctagaaaacttgtattcaccaccatgggcttgatgacatcttagtacttagacctttctgacgagatagcagtgacattaacaaatgtgacgtttttcatgttatctaaatacatttgtcaacatttggaagatctgcacaactccctggaccaggattttccaaatgattgttgctttttgttacaaaatcagggaatagatagaagattcaaatagtacaagatagactgatggatttttatgtaacagaataggaaaagtttgctgacatgctttcagattccaccttgcaactaatttttaagaaactaccacttgtcagccaggcacagtggctcacgcctcataaaatgagttggaatgaagtttttctttcttattctctagaagaatgtaatgtaatttattgcttaaataattaggagaattcaccagtgaaacccatctgggcctggattttcttttgtgggattcatttttttcaataactattcagatttcagtttttcttttatgccaaggtttagtaagttgtgttttttacgtaatttgttcatttcctagaaatttacaaattgatgatccaatgttataatatccttttgttatctttttttttttttttttttgagacggagtctcgctctgtcgccctcaggctggagtgcagtggcacgacctcggatcactgaaagctccacctcccaggttcacaccatcctcctgcctcagcctcccgagtaggtgggactacagacatccgccaccacgtctgactaattttttgtatgtttagtggagacagggtttcactgtgttagtcaggatgttctcgatctcctgacctcgtgatcagccctcttcggcctcccaaagtgctgggtttacaggcatgagcccccgcacctggccctttgttatctttttaatgtctggacgttctaggatctgtagtgatgttccgtttttattcctgatattatttttgcctcctgtcatttttacctgatcactctttccaaggggtatataaatttcactagtattgtcaaataacccactttgggttttattgatttttctctatcgtatattggtcttatattgattttttgttgtttattttggggccgtagcaggagccacagccagctccacatagttcagagggcctggcaagtatggaggaagacccttgctttcccctggaggtgctgagagtttaattcccgaggaagtaaggggattatttccctgtattggcaaaggttctagtttttgagtagaactagaggacctcacttctcttgaaggagaagtagagaggctcctcctcattcccttccctacaagtccccacgtgactgattcttcctctccaggggcttctagaattagcaacattgttccctttgatcctttggctgattacatatcctgcatttcttctgtagggctgggtgttgatagagggccataagacattatacataaggtattttatcccatttaccttgtttcttacaaaataagtcccagttggagaattgtagtattaatgtatgtaagtaactcatgttcagaccatctctcttgattccgtagggaacactggggccatatggtattacagtaatatatcatttgctttttggtcatggatatgggtatccaaatagtttccagtgctggaggaggcactgtaacgggctctcctccagtattgagacctggttccccatattctagggtctttgcccagaaggctgattccaccctccaagaagcttccactggggattagtgatgacacaaatcctgtaactcttagcctgtaggatatttctggtcctttcagcttgctgctacacgcaggccactatggagtggaggtgctgggaagctaggagaggacaataggggttgcctctccctggatcatgttcagtctgggtagcttccctggaaatctcatggagattccacagtagttccggatccagcttgagtggtgggaggtatgtaaatcaatcaagtaagcaaggtgttctttctggagagggtgcacactctgctcatgtaaagtctacatcactgtattttggttccaggaattcccacccaaactgccccattctaaattaggcctcttcaaatcaataacagttcttctgtgactgctggaatatggaagcccaatattttagggattaccacagactaaggagaagggaatccagacttcacatgcattcaggccacaaagaaacacaagtattggcaaaagtgacaagcattcagcctacagatataccagacagggacaaagtcttaaagatgagagtcctcgtctttatattagggcttcccctgttaaaatggatggagacatctctcaactcctagacctgaaggggagtcctgcccattcccaacagtcctggatcccttgagctaggtcctaaacctgacaacccagagtcctaataatcaaaaccaaaaccactcttttagtcagttcacagaaccaccaccacttactgcctcaaaattgcaccaaatgaaaggtccaagcagccacttctgctttcctggtgggctggggggatggggttggcatgcctgaggcccttcaccaatctccctcttggcaacttaacccactcatgcttcctcagactgctgcttcgcctgtaagcagcctataagggaggtcgagtcagggctcagtccatagtcccatctggatcaaccagatttgtttcccaggccctcccaccccactgcctccaaaaaaaaagcggggtttgtttgcctggtgagtaacaaaagtcgctgagaacacagactttgatcaataggagttttattacttgtcacaagtaggaagagctctgggaatattcgtcaaagcagtgtctcctaagagaaaatgacaggaaggctttatagagtgatcgagaggggagaaggtgcatcatcacatgaagaggaggggtcccagtgacacagatggagggagtcatcgtgccaccacataggacgcatgctatggtaatgaaactatagctctcccagggtgcaggatttagcattgtaatgaggaaagttcactgtaagtgagttcatctataagttgctggggtctgtcaggagcaggttccaactgactaggtgaccacatttcacacagggtttgagacaaaaccgtctgcaaggcagaaggctgtaaaacgggctaattgctcaaattcattaaattccttcactccctgggggcccgccctgtcttgtctatatagccagtccttaggaagtgaggccaagctgaactgttgacacagtctatgtctttacgagtctgggagctgggtgattttacctctgatgctagacttatttttactggttttgaagccttgcttacagccctttcccagtttctcacgaaatactcatgaaaggggatggtggggagtgggcatggggaaaagggaatgatattaaaattaaagctaacatcattggcctctagggggcactcatggctcatctccatagcccttggctcttgcagctgcccaagatgagagtcctgatctaaggaaactccaccaccaccaaggctggggtggtggcaatgggggcattattttccaaacctgactaggctacattttaaggggatcatagtcacagagaacatagatgtggactattaattttctttgcctgagcagccgtagccctatgtgctcctctccagcctttcagggagctatgatgggccaaaaaatgctcagtagcccaagccatctcctccatagacactggagtaaaatctctgcctatgggtgtgtgtgtcttgtcttactctatcctggatttgtttcctccaatgctggtggctttactttagatagtctgattgttgcagagatgagacccaaggctccactctggagaaaatagagccctcttgagaggtcagcccaacttgctagacttctgcatggggcttggggttcaatgttccagcctgtccccaaaaagtcatggccaaattcacatattcctttgatccctgatggtgtctcatcacacagttcgtctggcctcaccattgctccactaagtccaggaacctcaaggaactatgagacaggtagggctagacttaacaaaatggctatcacagtcttcatttcatgagacagaggtgaactgagaaaaggtggaaggtgcttcagagacttctctgtattcatccctaacttaggcagagagccttggccacacaggaaactggggaagacccctctcttactcaggagtcccccacactggtgccatcttatgacaggcaggcatcagcttcagagccagtcaaacagttaggaatagcaaacattgctccagaatttgttggggttttttttcccctgaatttgatagtaagctccacataggcaagaatgacaaccatcttgttctccttgtttctctggagtctaacacaacatgtagcacgtggttggcccaataagaatttgtcgaatgggggccagatgtggtggctcatgcctgtaatcccagcactttgggaggctgaggtgggagagtcgtttgaggcctggagttcaagatcaacctgttcaacatagtgagacccctatcttcttttttttttttttttttttaaagtggagtttgttgaatggcacacagaaaataaacaatccaaatgacagatcagaggtgctggaaaagaccagggagatctaatcgttaaatcacgtcatctaaatattaagaggagacatttggacatctgatagaatttggcattgaataagtgataaatacacagaaaactgaacaacggcaaaaagaaaagtatcagttctaagggaaaagatacaaatcaaaagccttcaggaaaggataagtcatcatggcttactgtatagcttagcttaaaataacacagaatagtgaagtagcccaaagggccatctaaccacactgggaagctgagcaggggaggagtgcgtatatgcatggaggagacttgtcttcaccctcctcagcagctgacagcaggcaggctagacctggacaatggagcaggagtcacacagcctgtgaaagaagtgctggggaatgtaggggctgctgtttcacatgacagagccattgaaccctggctgtttataatagttacatacataattttaatagaaataaaaaccaaaaagaaaaaagacttaaacatgaaaggcaaaaccattacaatttttagaggaaaatataagagagtaagaacagaaaaatgtcttaaggcacaaagtgctaaccataaagaaaaagattgataaattcatcttgataaattttttgtttatcaaaaggcaccataaagacagtgaaaagacaaggcacaaaatgggagaagataattgcagcacatctgaccagcaaagaatttgtatccagaatatataaagaacttctatgagtcggttttttaaaaacacaatttatatttaagtctctttaaaacaaatagacaattcatagaaatatggtgatatggtttggctgtgtccccacccaaatctcatcttgaattgtagcttccataatttccacatgttgtgggagggacccagtgggaggtaattgaatcatgggggcagatttttcccatgttcttgtgttagtgaataagtctcatgagagctgatggttttataaagagcagtgcccctgcacaccctctcttgcctaccaccacataagatgtgcctttgctcctccttcacgttctgctgtgattggtccgcatccaaatgtcatcttgaattgtagctcccataatcctcatgtgttgtgggagggacctggtgggaggtaattgaatcatgggggcagatttttcccattttcttgtgatagtgaataagtctcatgagagctgagggttttataaaaggcagttcccttgcacaagctttcttgcctaccatcatgtaagatatgcctttttcattataagttacccagtcttggatatttcttcacagtggtatgaaaatggactaatacacatgggctaaactcatgagcaggcaactttatagaaaaacacaaatagcccataaacataaaatgtagattgagttcattattaattagggtaatgcatgttatggatagaataaaatacctttttacattcactggattggcacaaagttttgtctttgtgccactctaaatgttgacagggatgttgatcaactggaattcacacactgcttgaggaagcttgcattcactctataattcagcattctgaaaagtgctcaccaataatcagcccaggaaggttcacaaggacatcttcaccaaatatgtcctttcaccctagcaaagaactagaaacaactcaagtgtcttttgacaagagaatgagtaaatggcaagtggtatgtcacgcaaaagaattctagacagaagagaaaattaaggaacatcaaacttagtgaatctttgagacgatgttgagtaggaaaaaaaattcagaagaatatattgtatgatacttttatcataaggtttaaaagcaagccaaggtaaacatgtgcagggacacctagggacccatgtcattttaggatcaaacagatagatggacagatgatagatagacagacagatggatttttttaactcaaaatagtggttacatccttagggagctgggattggagaagagacacttagctttgaaagtattgtcaaatatagtgacctttctagttcatttgggtgctgggttcaggggtattcattttattatgcaccataatttatgtgagacattttattatatcaaatattttctaatcttacagtaagcagtttggtaaacagattcataactgcatataatgtgtaggtcttgtgaacaatgctgctgtgaatatcaggacccaactgcacttgtctctcactgccttttgtaagcctgctcaattggggagttcttccccttatactggagatgagaactcaggtaatgcctcgactgttcggatcactgtcaggggattacatgttctaccgtgctgacttttcactgaaagcccagtctccactcaataagtaaaagtgtaataatcgaaactcccaatttgagttccacttaaaatcttctctcttcccctgccagacctctctgcaccatctaggggagcatagtcccctctgtccctgcctgacagggctctcctcctcagcagcacagggaggtgtctgacccatctgtgtgtgtgtgtctatgtggtggggatggggaccatagcttggcatcctgccctctcaccctggcagttcattgtctcaagctgactttcttgggtgttttcatggcttcttctgaggcctccctctggaatattggatcgtaactccagcaatgcaagcaataggttttcctccagcttctggtcctcctcctcctcctcctcctccccaaacctggtttctagcagtcactccactgagactcagagtcttcttggcccagtgccagcctcttgcatgtcccaaaccttgtcctcaggaaacacttatgcatcctatgctggggtgaactcttaagagtgcaggatcacctcatggccacagcctagctaggccctgaaacccacactctgggtttgtcagacgtgagtcagccccaggccactgaacctctcccactgcagggaatccctgtcaagtggtgaaagccagcatctagacctggagtcacaggcacctgtagcataactcctcctgaaatggaggtttttctttagagattggtccatatcccttatccctggacttctgagaagggtggacaacctgtggactggacttgagtctggaatttagagaagtgtccatagtagggctgccagatgaggcaaacacaaatacaggatgcccaattaaatttgaatttcagataaatgatttttaatgtttgattctgtcccatgctaaaaattgcccactgtttatgataagtttaaatttattggtccattctgtactttatcaaggacacacgcaggaggaacagtagcacaaaggcttcccggtgccttgtgggtgaaagaaaggcttccagggaaaggagagaaacacccagggatcccggtgacgtcgggaagcagcacccagaccatgtaaggacaccgcctgcagggggagactcaaggcctgggaaggttttctaatctgtgccttgagtcgggtggggggattttctgggaaaggaaaaccagacacagtaggacaaatattgtatagtttcacttatatgaaattgtcagaataggcaagttcgtagagacagaatgtagaacagggctttccgggggctggaggagaagacaaggagttcttgcctagtgggtacagagtttctgtttgaaatgatgaaaaacttctggaaatagattgtggtgacagttacacaccattgtgaacataattagtaccactgaactgtacacgttaaaatggttagttgtatgttttatgtattttgccataataaaaactagggggaaaaaaaggaaggggagattgtctcaggctggctgactttccctgcatgtacgcacatcttcacatgtgcacacatgtaaaacaaaaatgaagcaaaaaaagaaattctaatttaaccagtaagcaatatgtaaaaggaaatctgaatgtcattacaattttaccaggttcagaataaaataccatccttcaaaatgaacaaattacttattagccgaagaaaggtgaaaggaagtttggaattaacagtctagattttctcactgattggtccaagtcactgacctctaaaattatcttagatcatgccctccctccttcctactttctggaaaacaatcagtctcctaccctatgcttgcccaaagagtttcccatacaaatcacaaatctgcacttgccattccctggaagcccttacattcccaaggcctggcctcatccactgccactgcccatggccccagtccaggcaaagcaatcactccctctccctctctgtcattcctttcttttcctttcactctctttctaccctcctcttccccactctctgtttcctctctctctctctatctctctctccccaccatctcctctctctgtctccccccgccttctctctctgtctctgtctctctgtttctctgtgtctctctctctgtctctctctttgtctctctctctgtctctctctcacacacacacacacacacacacacgcacacacacacacagccagcaacattctacctctgccagagttccaggttgaataggtgtggactttgactttcagattcctctggcaagtgtcaacatcagtcctgttgctccctggcagaggaggacttggagtcaccttggccaagaagctgtctggaggtcacagtggcaccgcccatcggccccttggctgaggctagatgagggcagattcagcacagcagcaactctccccataaaaaaaatccctcagtgtcttagttctctgacccttgtactccttgtgagttttagagccacatgaactcttcttttttcccaatgcttggagacaaaatttacataacctacagttagccattttcaagtgtacagttccctgccatttggtacattcacagtgttttgcaagcaacacccatatcaagccccaaaacattttcattacccaggaaggaaacctgtcgtcatggaaccgtcactcctcacatccccttcccctcaaaccctggcaaccccaaaccgttcttgacagcctcctttggcatttcttcattttggtgtcagatctcacagcagaatttcttacctattatatccagtgcctcagtgcgaagttccagtttaacttcctgttacctcgagcccactatcttgccccaataataccctcccccaattcacaaacacagacgcattccctcctacagctttgggcctcctatctgagtccttcaggaaagaagagcttgtaactcccttagcagtgagtgtagacttggtccaaggaagatgagcaccagtcagggcagctggcccctcctctctccctggtcttcagcaaatcagcactgcccatcgatgcccaggcaatgggagcgtcgaccagcagaggacacacctgaatttctctgcctcatgggagggcggccactgtgttgcatttaggaagaagctgtgcaagattcatactgttttgctaatgttaatcttgtgggcataataaacgtcgtacccacacttaactttcgagatcagacaagattgggtgtgttcagggtggtatggccgtagaccccacacttatttttaacacacttctaggcaaggctgctgcactggtctggggatcacactttgagtagcaaaggactaaattgcaataactgccggggggggagaaaaaaaaacaggatgaactgcttcctcctggctcagcagctagggagtcactgaactaacaaggggatggggtggggataagaatgttccaggcaaaaggaacaacatgcccaaaggcctcaagcagaaagagagcttcaggtattgaagaagtagaagtagctctgtgtggctggggagtgggcataagatggagcagaagaatgccaagtcctattcctgggtctgaatttccaggagcagaagccctgtcccctctagaaggtggatatagtctggatatttgtcttcttcaaatctcatgttgaaatgtgacccccagtgttggaggttggacctagtaggaggtgtttaggtcataagaagtggatccctcccgaatggtttggtgccctcctcatgactgagttgttactctattagttcgtgtgagagctggttgtttaaaaaagcctggcatctctctggttccctctcttgccatgtgacacaactgctcccccttcacccttccccatgagtaaaagcttcctgaggccctcaccagaggcatatgccagccctgtgattcttgtacagcctgaaaaactgtgagtcaaataaacatcttttcattataaattacctagtctcagatatttctttatagcaacgcaaaatagactatcacagaaagtcggtaccgaggagtagggcgttgctataaagatatctgaaaatgtggaagtggctttggaactgggtatgaggcagcggttggaagagtctggagggcccagaagacagaaagatgagaaaaggtttggaccttcttagagatttgtaatgtcgttgtaaccaaaatgtggacagaaatatgtacagtaaaggccagcctgatgaggtctcagatggaaatgaggaagttatggggaactggagcaaaggtcacccttgttaagccctagcaaagaacttggctgcattgtatctatgtcctagggctttgtggaaggctgaacttaagagtaatgacttagggtatctggtagaagaaatgtctaagcagcaaagcattcaagaaatggcctggctgcttctaatagcctatgatcagatattggagcaaaggactgacttaaatttggaactattaaatcaaactaaaatctggcctgagaaagcctcctcactcccatacttgagtccttaaggatgaaccataacctaactttgtaggtaggccaactgaaaacctaacttagaaggatgcttctgtagcaatagctgagcgtcagccaatcgcagcagccatgcttcagtgactcacaggcagcctattgttcaaaccatgttcaaataaggcaaacaccatgctgtaaccaatttggctatttctgtacctcacttcggctttctgcgtgtcactttactttttctattcataaggttttttccgaccacatagcatctctggtgttgctctgaatctgctgtgattctagggactgcctgatttgtgaattgtctttttttttttcttcaaaattaaattctgttaaatttagtttgtctaaggtttttcttttaccagatctggtgttggaagtgcaatttgaagtaaaactctggtgacctccaggaacaccaggtgaccaggccagttgtgctcactgatctcttgattgtaactggaggttgtagatgcgttttctcttggattcagagctccactaatgtgtattctaattgaagctctccaactttactggagcgatattaaagtggactgggttcaggatcaaatttgaatcaataattaactggattaggttccgttagagcctcagacctatactaggcactttttttttttttttttttttgataatgggtttgtctcaatccaaagattctgggactctaccttctgggactccatctaatttgatatgtaaaattatggacccagaatatgtgcatttttagaaaaatagattaaccttactagagaaaagatggccacaatggggaagttttaatttgtataaaattgtttatttgcatggcatattagaaaaagggggtcaaaaccccacaaaaacagtgggatatagtctttcattggtacatggaagcctctaaaagacaaaatgaatgaaaacttgcctccttaaaagattcttcgcaaaagcaagtgaacagcttaagtaacaggctaaggacatgatgaaagagaactgtactctgactgaactaaccccaactgattcttctctttatgcatctctacctacgtactctgagtctactaacctttttactaaattgacctttcactctcaagatgatgaaaaaagaggaattagatgtacgcctcacaaaggaagaccttctgattatccaggcctgcctgctataaccactttcactccatggtctaaaactgagcttagagctattgtagaagacttccctgatctaggagagaatcctcaaaaattgactgaggagtgtagaatcctcataggagattatgatccaggactccctgacaaaggttcatataaatttattcatatgatatggaggcctggtgaagctcaaaaatggatggcagcagcagaatggaacaaaccggaggaagatattaaagactctgcccctactgcccgcccccacaaaacttcctcatgagaaggcccaacaggagctagaaatattgctgcaaatcccagcctgggcaacatggcaaaaccctgtctatacgaaaaatacagaaagttagctgggcatgatggcacacgcctgtagacccagctacttatgaggctgaagtgggaggatcacctgagcctgggagcttgaggctactgtgagccatgactgtgccactgcactctagcctgggtagcagagcgagaccccatctcaaaagaaaagaaggaaaaaaaaattgctgaaaatcttttaaattcaagtgctaaaatttttccgcaaaagttgattggtacatcatacaatattgtaaaccaaaaaaagaatgaaccagtgtcagattacagaacttgcttagaaataatgtgaaacattctgggctcagagtaccagcaaggagtatttcctgcagggactgaaatggtattaactactctatttataaagggacttcatcctgaacttagaaatttaattagaaaacataaactcggatgggaagttacagccatgactgaattggtggctctagctgaacattttgagaggactgtagagcaagaaaaaacccaaaaggctaacaagcttatgactgttcaattacaacagttacaggggccaagaccaaagggatcttctcattctcattttaaatcacaaccaagaggtattagaccaagaaattcttcaccctaagatgtctgccttattgcaaacaaccaggacagtggaatagggattgtgcccttttataccagcccaccaatgaccctccctttaggccagcctgtttcaccactagagggagcacaagagaccttagctctcctgaagataatcagcattgaagcggctctgagggatttcccagtatattgctcctcataacacccttaaaagaatatggagaaacagaggttacaataaatggggactcatgtatagtcttggtggataccagagctaccttatctgccactaccgtaaaacacactttcatacgccaacagatccctcagagttaaaaaggctatttctgtggttggggtttcaaatcaaattcaagaggttcccatatctgaacccgtccaattgactttggggcactcttcagaaaatcacacttttttactgtatgatagtgctccagtaaatttgctagagggagatttactttcaaagctgaaagggcatagaagactacctattgggtacattgtacactgcttgggaaatgggcacactaaaatctcagaactcaccagtaaagaacttgtccatgtaaccaaaaaccacctgtactcccaaaacaattgaaattgtttaaattaaaaaatttttaaaagtggggaggatgtaaaattttccttagaaggagtaagaatcagtttcctgattctcctgaaccagaattgttatgctctctataggcagaaattaataagattgaaactcaggcctgtaatgcctgatcttccaaaaatacatgaatgtttatgggtctcttcctcaactgacacaggaagaatttaaagtgtggaacttataaaagtccaaatagaccactctaaacttttgcctaaattacccaatatccactaaaactagaagcaattcaagggctctcgccaattatagaagatttaattaaacagggacttataattctatgcaccagccgttgtaacactccaatcctactggttaaaaaaaaaatggatgaggttgaagatttattcaagatttatgggcagttaacaaaattgtagtagcaaggtttcctatagtcccaaatcctaatactttattatccagtatacatgctgattcttaagtggttcacaatattagatctctgctcagcctctttttgcaatccaattcgtaaagagagtcaatgcttatttgccttcacttggaaaaatcagcagtacccctagactgtgatgccgcaagggtttaccgaagccccttcgtatttttcccaggccttgcatcaggacttaatgacattatagtttccttaaaattctactctcattcggtacatagatgacttactatatgctctcccactaaagagtgctctgaaatggactcagtttaccttttacagcaactcacacatcaaggtcagaaagcttcaatagaaaaacttcagttttcaaggggaaaaagtccattatttgggacatgacttgaagggatttccctctcacctaaaaagttaaaaactattcaaaattttccttggcctgcaaccaaaagataattaaatagttttcttggacttgcaggatatgtttttagacttgcaggatataaaattcctgggttctgaatttttccttaatagcctcaccatttcatgagctccctaaaaaatgctgtaccagagcctttatcttgggatgatagttacgagcaggcttttagctaaataaaattgaccttgtaacagcctccagctttaggacttccaaattgcactaaactgtttacctaattggctcatgaaagtaataatcaggcatttaggagttcttacccaggaacatggggagaaacataggcccattgcatattatagcctgcaattagacccagtagctaaggtatatcctaactatttaaaagcagtagcagcagcaaccaggatgaaagaagcttcagctgatctggttttaggaaatgaatttaatttggaagtcccacatgctaaattccacccaaacccagcattttttagtaagtagactaacatgaaatactctgtctccttctaatctctctctaaaacactgcaatttacttaaccatgccactgtattactgctgcctgatgatggtgaagaccacaattgcataagtgtagcatcagaaatagtggcccctcatgttaatttacaagttagtcctttggacaatcctgagttaatacttttgttgatgggtcctatgccaaaagctcagaaggaaaatatcagctaggatatgctgttaccaaaatgagttaatagagaagggaccccttcctctattagtcagctctattagtctaagctctataagtcagcttaactcttgaagatttttgccctcacccaagcttgtcgtatagctaaagacaaatcagtaagtatttagacagatagtagatacgctttaggagtagtacatgattttggcatgatagggaaactctaagggtttctcacttctagtgggatcaccatcaaaaatggactccagttagataaactcctagtttgctgttagtgatcgaagctcatacctgcagaactgaacctgaatatcaagggaatgcttagcagatatttatgctaaatcagctagtactgaaactgttcagatatgcaacctgaatgaacttcataagattaatccaatccaactaccttacaatgacctatttaataaacagtgcaatgcacctcatttggaaaaacaaaactggtatctaaaaggatataaattcaatgttaagtgcagactcacagagggcctagatggctgtctggtctttcctgagtctttgaagcttctattttcaaaagctctgtactccacaactcatcatggaacagaaaaatacgtccaaattgtgaaaaaatacttgtgggatgattgttccaaaattgctagaatatatatatatatatatatgtatatatattttgagacggagtctcactctgtcacccaggctggagtgcaagggcgcgatctcaactcactgcacactccacctccctggttcaagtgattctcctgcatcagcctcccgagtagctgggactacaggtgtgtgccaccatgcccgactaatttttttttatttttagtagagatggggtttcaccatgttagctaggatagtctggatatcctgaccttgtgatccacctgcctcggcctcccaatatgctaggcttacaggcattatccactgcacccagcctgctagaatattttataaccaatgttggcttgtcaaacccatagtcctggaaaaacaaaagattcaggtggtgtattgtattttcaccacctaatggatcatttgaacaattatagatagacttcattcagttgccaccttcaatgggggtctcagtatgttcttgtaatagtttccatgttttctggttgggtagaggccttcctgtgtaggaaagctgatgctgtgacagtagctaagaaattattagaaaatgtgttttctttatggagcatccctggaaaaatccccagcaataggggaattcattttattaggcaggttataaagcagttaaacaaggtgttatggacacaatggcactaccattgtccctatcgccctcagtcttctgaaaaggttgaaagaacaaatggcatattaaaactgaaattggcaaagttaactgaatcagttgggttgccttggccaaaggtactatcattggacttaatgacaatcagatccactctcactaaaaaacagaagtggatcccttatgaaatagtcactagaaggcctatgccccaatagtgaaacctcatgcatctttctgtctcctaaattctgatatgagtaagtactgcaaggccattataccaaagtgtactttcaccagataaaggaagcttttcaagatccaccaactgaggataatcaaaccttccacagtctagaacctggagattgtgtcttctggaaatgacatcagagaaaggctgctcttgacaactctttggaagggaccgtgctgagatcttctcaacacctacactgcagtgaagcttcagggccttgaaacttgggtccacacctcacaactcagaagggcctcttcagactcctggaactgtacacctgctggagactttaaggtaaagctgtctaaggaaatatctctccagagcagcgggcattctagctgtggacagctttcccaagatcacagatcaagacttctgtatcatcatgaaagccttacattttttcttttctccgcatttcctgttgccctaattctttctttttccctacagaaaaatccatgggacgataatcagtggatggctttagcttgagcatatgctctagcacagaaccagagtttgtggcttattgggtttgtttttattgccaaaaaaataaggaaacaattccgctaatgccaatgcctctccatgttgccaatgagagtcaccccaaaattccaagggaaggatagaaagctatccttgatattctgaacaccattgctacttgttttcctgcactcactaaaagcaacactttaacttttcctttttttttttttttctgaggcagtctcactctgttgcctaggttggagtgcagtggccttatcttggctcactacagcctccacctccaaggttcaagcaattctcctgcctcagccacccaagtagctgggactctaggcatgcaccaccgcatccagctgatttttgaatttttagtagagactagattttgctatgttggccaggctggtctcgaacctccttgcctcaagtgatccaccagcctcggtctcccaaagttctgggattacaggcgtgagccaccatgcctggccttaactgtttcaattaataacctgatcaataccaaaatatagaaaaccagtccaagtgatgcctgcaaaagatatattgtgctttcaggcatcatgcactcaagttacgggaattacctatgtgagtacaagtaattgcttgtataatatcaccagattaaattcaacagggtctctttttactaaatgtgttatacacccttacaacatactacagggcgagcacaaaaaggtcaatttcccagtggattttgttcaggagctgtgtaggtttattaatgaacaaatctaactgacccctgctcaaatgcaactatgtggccctgtttttcaactcccaagggcctatactgggtctgtggataatctgcgcatttcattctgcctcctcgttgactcagaccttgctgtttggtctggctcacttctgcctttcaaatagtttcacctaaaaattctcctaacagctcttatgattggaggccaaaatagacaataactgaaattagcactagctttgaaatagacaaagataagctagtttccactgaggaaagattccagtggggttcctggggactcactcttggtggtggtgggatactagttgtatggaatctgaagctaatccatatttggggtcttggattttatagccaatcagacatcccaatgttccagacaggtagaagctactctccaaaaggtagatgtggcctggtgcagtggctcatgcctgtaattccagcactttgggaggctaaggcaggtggatcacctgaggtcaagagttcgagaccagcctgcccaccatggtgaaaccccatctctcctaagtacaaaaaattagccaggcatggtggcgtgtgcctgtagtcccagctacttgggagactgaggcaggagaattgcttgaacccagaagacagaggttgcagtgagctgagatcaccccactacactctagcctggttaacagagcgagaccctttctcacaaaaaaataaataaataaataaataaataaataaataaataaataaaataaacgaggtagatgttacagttaatggaacatcatgcagcttcatatctcctttttactcaagctggggcctatgtttggtattgaacaaaatggaatgctgcaattttctctctactgattttgttactacagaaagcttaatgtaaaggtggctgatactgctgtttccttagacactgacaccaaatacaataaagaagtctctcaagaggaaaacatggtgtgtttacaggagcaactaacagttggtttgtaggcatcctaaatggtggatggcaagcttgggtttcccaaaggtttctagtctttatatgtcttctagtaggtgtccaggttagtatggcctgtgttaccagagtaacaatgaaaatggctacgtctttaaatcaggccactttacagtgaactatggtccttaattgctatcacatttcaaacaagaactatgaccaattaaactttactattgttgaactgcctatgttgcctgaactttgactggtttaagttggtttcatttatttcataagaactcttgttaaggggtgcaccttggtattttgatattattctcttgatagtcataataatagttccctggtgtgctgcatcctctcaagtcataaatgttttgtatgcagccatacattgagaattgaatggtctcacttcaactaggtcagcaagaacataaagaatcatttacctagtgtgaagttgtgacttgtgaacttcatagtgacaccaataaagacttgtgaactccatactgagactaaaaggacttgtgaattccatactgagccaatttacaatagtgggagagtggcatcaatgcctaaacttttgatcaatctctctaaattgagagtctgacaaagagaggggagttgataaatgaaactcaaatccggcctgaggaagccttcatattgccatgcttgagttcttaagggtgaaccgtaatgtaactagtaggcaggcagactgaaaacctaacttaggaggatgcttctttagcaatagctgagtctcagccaatcccattggccatacttcaaccactcacaggcagccgactgttggaatcatgcccagataaggcaaacaccaagctgtaaccaatctggctgtttctgtacctcacttccattttctgtatgtcactttcctttttctgtccacaaatttgctttgacaacacagcatccctggtgtctgtctgtatctgctgtaattctgagggctgcccaacttgcaaaatatttatttttcttgctcaattactctgtgaaatttaatttgtctaatggatttcttttaacagaacttataattaaaatggagagcgggtgtaaatatttataaaacttgcagcctggccatgtggtagacaaggaggaatccaagcagcctgctgagcaactacttgctggagacattagcatgtctaaaagggagccaggtgctaatattcaagacagtgggaaaaggcctcagaggcatttcagaaggcccctcctatcacaggcccacaggcctaggaggactgaatggtttcagagaccaggcccaggacaccattgccctatgtcacctcaggatgctacttcccacatcccagcttctccagctccagccttggctcaaagggccccaggtgaagcgcagaccactgctttggagggtacaagccctaagccttagcagcttccatatgtttttttttttgtcttttttttttgagacagagtcttgtcctgtcaaccaggctggaatgcaacagcacgatctcagctcactgcaacctctgcctcaaaggttcaagtgattctcctgcctcagtatcccaagtatctgggattgcaggcatgtgccatcatgcccagctaattttgtattttcagtagatacggggtttcacaatgttggtcaggctggtctccaactcctgacctcaggtgatccacctgcctcagcctcccaaagtgctggaattacatgtgtgagccaccatgcccagccttccatatggttttaggtctgcaggcttgcagaatgcaagagtgaaggaggcttgggagcttccacctaaatttctgaagatgtatcaaaaagcctgggtgcccaggcagaagcctgcacagggcggagaccccacagagaacctctactagggcagagccatgggaaaacatagggttggaacccccatacagggtcctcactgggacattgcctagtggagctgtgggaatggggccaatgccttccagacaccagaaaggtagagtcgccagcagcttgcaacctcagcatggaagacccacaggctcaatcccaacctgtgagagcagccatgtgggctgcacccagcaaagccatagagacagggctgctcaaggccttgaaagcccactcctctcaccagtatggagttaaggaagatgattttggaagtttcagatttagtgtttgccctgctgggtttcagacatgtgtggggcctgttgcctctttcttttggccaatttctcgcttttggaatgggaatgcctacccaatacctgtaacacagttgtatcttggaagtatgtaacttgtttttgatataacagcctcatgggtggaaggcatttgccttgaggctcagatgaaactatggattctggacttttgagttgatgctggaacaagctgagacattgggaaactatcaggaagggatggttgcattttgcaatgtgagatgacatgagattttggggtaagaggcagactgatatagtttagatgtttgttctctccaaatcacatgttgaaatatgacccccaatgttagaggtagggcctagtgggaggtgtttcgctcataggggtggattcctcatgaatgggttggtgctctgtccatggtaatgaatgagttctggccctgttagttcacatgtaagctggttgtttgaaagcacctagcatctttcttgtgtgctgtctcgccgtgtgacacacctgctcccccttcagcttccaccataagtgaaagattcctgaggccctcaccagaagcagatgcctgcactgtgctttttgtacagcctgcaaaaccatgaaccaaatacacctcttttccttataaattacccagtctcaggtattctgttatgatcccctggaagagttatactacttccaggtctagaccatggtaaatcccacactcccctctgaggccaccttcttccctctgcagagaccctgtggttagagtggattggttgtgtctctggccccaattcttctcccgaggctgcattccacccttttgctatgtgactttgcagcccttcatgatcattacagaggcaggttcctctctccttgaatttggggaagatgcgacgcatgcaggagtttgaaaacacgtttgtttgcttctgcttttgtttttgctcctctgcaatttccttgaaaccatgcctgagctagcctgagggaaaatgaaaaagcaccattgagctaatctttcagccaatcccactgcatttgcacaatgcagtctgagaccagaggaactgcccagccaagctcaggcaaaattgctgacttcagactcatgagctaaataaatattgatttcattttatgattgttcttatgcaacattatcctggcactagaaaaatgaaacagatgggaatcaaaaagactgaatgaagcagaaacccagaagctaccccacaggcaatcgcatgggactcagatgttaatggacaataagcttttattgcacagaaaggtcattgcagtcagaggttggggattgcttgctgctacagccgaatggattctattctgaccaatacagaaggaaagaaatcatagacgccctgcctgagcagaagggaggtgatagatgaaatgaactgtatgaagatccaccagcctggcccacacgtggaagaaggactggcccgtcttcttgaagcccaagctctggtagaggcccatggcagagagctggatgttgctggtgtccaggacaacttcactgtagccctagtcccgggcaaactggaggacagtcctgaccagggcttttgctatcccctgaccacggtgctcattgtccacagagagatgaaacagctgcaaccgcttctccctcaaggtgggatcatcaacgggcagagctcctactgtgcccaccaccttctcttcagattcacccacccagaagcaggagccacactcactcaggtaggatttggtgatgtcagacatgtctgtgcgcaatgctatgtctacataccgcgtccagggttttttggcaaggaaccacagggcaggaaggaggctgaggctgaacacgagggccagaatccaggagccagagaccaggagtagggcaagggcccccccaagtaagagtatgagggttcgaggcagcttcagtaatcgccggaaggtggctggggcgtgttcggccatcccccgggagagcaagcccacgacctacttgcggtcgctctcctggtatttgcggatgtgataaggagccatggacagacttctgtgtctgaagtcactgagtccaggaaacagagctaggcctccctgcacgcctttacgccaggcctggggaagagagaggaaaccacgtgagtgcctgcatggctcccagccttgcaggaacagggagacctgcttaagggtgtgtctttccgcgtttgcccatgaggaagcaggcctctgccactgggagaaggtagcatgagaaagacctgcattggaatctggctccatgcctttctagctgtgtgaccttgggcatgtcacttaacctctctgagcctccacttcttcatctatagaacaggggagaagaaaacctgccttctagagttgtttcgaagattgaataaaataccttctataaagccctgatagatgaactacccaccactcttccctctgtttcctttttctggctctctcagcttcttggtgcattgagagagtacctacctcaggcaggccacatgcccaaccctttggtgcttctccagggaccatacatcgcagaaatcctgtgaccaagcacaagtttcaggaaaggctccctccagctttattgtaagtttttaggttgctgaggtggcataagtgccaagcataaaaaacagcccagcctccagatcccaaggaaggtgcatgctcagagcactgtccttccacccagtcccctcacctgtcaccacaagagccttgagtgtccagggagcttcagctgtcagccgctcactggcatccaggagataccgtctggggcttgctcacccctggaaagcaggctgcctgcctcattgcttggctcctgaatgtttggtaatcatcaaccctagggtcaaagagctgggctgtaacacagcagggagcccagtgtgcattcccctttatagtcaaagggaatggcctggagggggaaactcagggtctggaaccgcctgggttccttgcccttctggaaggcctgccacctctcttgcctgttcaggccctgggcatctttctgccacctggcacacttgatactctctgagatccaccttggtccctgtacacatataccacgagcctgagaactgtgccattcaccctgcactcagtcaccattggccagaagccgagtccccacacttggcaacaaggcccttcccagctaggcttctccatgctgaggtttccctggtccacaaagcatcgattgttggcagttctttgcactcacctcaccaacccccacctccacccattcattgattcagtcaacaggtgtgtgcgatgcacttcccatgtctgggggtcatttcagccatgagcaaggttgacattcggctgacaggcatggctgtgtgtggcttgtgtgtgttctggctgttggtcagaggctgtgccacacccgttgttaaatattttgcactgcagatgttggagaggcccaaattcaagctcttgtacccgacgtggagctgatcccaaacactgacacatgggtgcttggagatagagaaagttgtattcgatttggccaaagcaagaaggcaggagaggaagatctctcaacttcagttcaacaaagaagcagcagcagaatgtttttatgcagctagagagtgaggaagggggagttcagggggattgagaggaaaagtctgtgtttcctcagtctgagataacaccttgtgcaaccaggcttctcagtgtcagcagctggtcacagtgtccttcaaggcattcattccttctgcaaacttttcctgaccctgaaggaatgtcttcctgctgaacaaagaaacagtgcatgagcagtttatcattatgttgtgggaacaaggaatattggaccaaaagcaagtggttaacatgtgcaagccagcaacggtctgatcagaatgttcattatttcagtcactaaaacatggtatggtgctgaaatctcaaggggcccaattacaaggatgcaacatatacaagataggcaaaagcaaaacctaacagaaaaagcccttttccacaccaacttacatgctattgaagggaaacttccctaaaagattagccaacccattgttgatcagccacgctgggcccgtcatctaggttaggtagtttggactctattccaagagcaaggggaggacattgatatgcacagaggggagaaggggtgtgtgtgtgtgtgtgtgtgtgtgtgtgtgtgtgtgtgtgtgtgtgtgtgtgcgcgcttcactctggctgcaggtggacaatggatctgaggaggtgggaatggaagcagctaccccttaaggctagtgccgcatccaggcaacagcagggcccccagtgcagggatgcaggtgctcactgtacaagagcagctggcccagaggggctggtaggagctaaaatcgggcctcccgttgccaagccatgagccatggcacgaaactgagactggccaaaggaaaaggcaaccttttcttatttgctcgaaggcattgcttgcctgctaaactctgcatccagtggactgcatggcttgaggctgtgcctagctctgtgttcacaaagaagccgcctgggctagcagaggcccatgagacagcagtggcttcaacagagggaggaagtcaagaatgtgagacatgagccacatggaggtgcacttggggcagaaatggcaggagttggaatgattcacacagggaggaggatgaggaagggctcagagatgacagccaggcttctggtaggggcattcaggaaaacactggagagagcccagatctggaaaagtcaaggcttcccctaaaggtgctgccctgcagccttcctcagcagaaaccagaggctgggagtcagcagcaggaacccagggccagccagtggaggctgctgagattccagatctttggtacccaacaccacctccgaggaaaagtctaaggagcatcaagtctgggcaggaagtccatggcttatctttagagtgttctcagaacagttcagtgtcaagcaggagttggcctaggaattacaagaggtgagcagctgcttcaaagcaccactgagtacttctagtgtgagtctgaccaatattcagagtcagaaacctgccggtcacttggagggggagaggtttgtgctccgtccctgtgtgctgtctcttcctccatgctcacccgtggctgtggcttcctcaaaacacagcgacctcacttgacattcaggcatctcttgctcccaggatctactgtgacttctgcatttttgtagctttcctgataaaagcctgggctttccttgtcagacctgaaagattcatttattcattcaacaaacagttcccgaggacctgaggtgtgccgggcctggacttggcatgaaggcaccagatgttggaagcgaggctgccgcccaggaggacacacctgatggggctctgggaacaggatgatggtggagacatcacatccggaataactttgttaggagggttgaacttgacagttaggacttttatgttgcacttgttgaaaagccacctaaaattgtcataagtaagagaggtgatctaatggcccatgaaactgccaactccaggaagacagacagggtgacctgaaagtgggtttgacctgttggtttttctgccattctgtgggtggcatcagcttcctgccaagactggcactgcataggatgtcgggtgtttgccagcccagttgaagctgtctgcttccttgctcaccaacagcagaaaggtgggggctattccccacattccaggtgacagagaaggtttacatggggactcagtcacactttctggggactgtacatttcatagcagaatccaggttatattaaaggagtcctggccgaaggatgccagcaccccatagagatggagagccccagggagctcaagggctgaggggctgaggggctgagtgacagtgagcactgcccacagagggggtgccctgcagtcaggaggggtgggaaacgggtgcagatcggcagccaacagaggcccacccacatgagcacaggtggagttgctggtgcgatgaagagtgtgctggttgggagtggagggctgggggccggtagccggtttgggaaacccaagctgagcgaaaggtgtgccaaggcctgtggtggtgcctgttaacagaaaaatcaaactgttagatgatctgaaagaggtatcttctgagccaatatgagtgaccacggtctggggatctcaagaggtcctgaaaacgtgtgctggggccgtcgttttctacatttgaggggacaggaattggagtaacatcataaattaatccatggaaggtgtacattgactgggcctaacaaggtgggatattgtgaagcagcagggggcattatagatcacaggtggattcaaagattttccgattggcaattggttgaaagagttcagctttgtctaaagaccgtgaagttggtacaaaagaatgcttcagttcagagagaggggtctgcctctgccacgtgatgctgtcccagagtcaggtaggaaagtcagccacagtatcctgggtcaatttaaaccccactgaaggagactctgtggtttctagggtgtgtgttaattcttgccttgcaaggccttaagtcttgttcataatctgttactgattgtcacagagtccattctgaataatctaatgatgcctattttaacattcatgccagtcaagtgattctcctgcctcaccctcccaagtagctgggactacaggtacacgccgccatgcccggctaatttttgtatttttagtagatacagggtttcaccatgtttgttaggctggtctcgaactcctgacctcgtgatctgcctgcctcggcctcctaaagtgctgggattacaggcaggagtcagcacgccaggcccagagttttctaaatgagacttggtgtagccagtgagcttctgttgcctgctgtgacatgggtgctattgttcccattaaaaactcagacctctgcctcgggagacagggctcagctgcagcctactcaactaaaacatgaagcgctgcttcgtgggcaccacagcggctccttaaacttgcaatggtgtgcaaatttgtgggctcactttctacatccgatcttcaaaggtgtctgcgatcccagaaggttgggaactattaaatttgatcatttctgaaatgtcttccagtttaaaagtcttcagttccagttcattttcaattcctgaataaagggatgagtcttggagcttctggaagctggcctggaactgagcacttactgcagacagtgcctgaagtgcaaacccaaaggtgcgtagatctgggctgcatgtgaaagctttcatattcaggtcttactttgcgacagtgaggggtgaccagggaagcctatatgaggggcgggggcaaaccaaggcagcctgggagctgccttaaccacctctcacctcacttcctcagagataaggttttcttgaagggaacgtgcagatttatacaaaatactaacaagctgagattttaattttttaagcaataaggaaaaacagaacttttcactccaaagaccctgtgttaggctcggcagaactggtggcacatctcaggagtcatggggcaatgctctcagaaacaatgttagggaaaaaaaaaaaaaaacgaaaaacaatgaagaggcttaattcttcttgttaaaggaagaggtatcctctgtcccttttcttagagcattttgtttggaaaacttgtcattttaaatccttcctctgcccctttgaggggcatgcaaagctttttgacagctaaataagcctcttgccagctttgcaacccaggactgtgttcctgaaggacctgggatcccaatctttgaaacgttatcatcagagcagccaggtccctatctcccagtctccatgggagggcaggaacctaacttttgccctgtgtgataaatctacctcctatcataaagataagggttgtttttcctttgtatgaagtcaaatagcagacgcaggttgtcgagtgaattgaggttgaatctctgtaaactcggtgtgaccaaaagtgctgtgcaggccccctgacctgaggactaggcatggcttctcttgagaacgtgtgcaatggtttggacccactggctagattagcggtgagatttctgtctgtctttgcagcttcttagcggatcattgcccgtgatgcgcatctcactctgggttaatcctttttcaaggataaaagtgtttttctttctcttcttcctctgcagagaggcttgctgggatgggagaagattttatttgtaattccatttctccacgaccagaggatgggctctgggggtcaggcagctgggaaggagtttagaacccatgcctaggccttccccaaggctcatgcactcagttccctcagttcagcagtagcagaaacactatctggaagaccccatactgtctggaaagaggaactcattttctttcattgctgacactcctggatgactgtgtgtggcggttacccataccctagtcccaccctgtgccccctctccacctcagggggccccaagagccctggccctgctagtccagagcacccccaagggagactggggttgggggtcccaccagggtgccaggtgttggtcaaggtgaatgtgaactaggaggaaggagatggagccctctcctgggaaccggacagggacagggatggggtgggggtgcccaggaagccatggctctgggctggggccgccaacctgcccaggcaactggggctgactccttgaagttgcatttctgactccccctcccacgtgcaggctcttggcccactggaggcccactggaggccacagtggcaggttcactgtgggcgggggtgggggggatggggtgccctggggagctgggggttcctgtggagcaggggtatgggtcccaccctggccaccccgtctgcccaggctccacatgtgccccctggtccccctggaaagacccttctctgtcccgctggtgcacccctcccccaactgggcctccaccaagaagaagggcccgagttctgccgaggcgtccctctgagtgaccacccacacctgaagccatcagtcaggtccctgcacaggagccacccctgagcctgtgctcccccacccctggctggctgcatctgggctccagatacgtgtcccccacccagaccccattgctgggttaggcccttcttgccacccctcagctcttctccctagggaacagcatcattgccaacttctcatatcctgtcattgtccaccaggagagctggggcgggggaccccgcttgtgcataactggcctcaggcagccgacctggggctccacagctcttgctgccgctggaagttgggccaaggctggtggcacacacaggtgtgttcctgctgttgggatcaccagacaaggctgcttcgccttgggccgatcttttgccccggaccactcagccctaggtactttaggccaatctgctgatcaaggccataagtgcctcataaccaatcagcagggtaccttcccggcagcctcaagggtgactaggtttctaccacaccctgatcccaggccttcctctcagccagtcctacccagaacaccctatttcacagtgcacttcacccctagcctacctggccattccctatccccatagctggctctaagttttcttatcacctctaacctgctctaaatgctaaggatatgcatctgttgttgatttgtatttagtaggctctgcaagcagggatctttggctcttcggttcactcatgtatgttaagtgcccagaacaagcctgacagatattaggtgctcggtaagtgcgtgttgagtgagtaaacaacagacagccagtttgggtattcccagtagggcaggaacagagaagagacacgttttattgggaagctaacaaatcttaagcttcaaagttcctctttcccctgcaccagcaccttacaaaaaaaaaaaaacctactgtggttttacaatttatattttgcaaacaggctctgaaatgtatttacctcaggctccaaaaaacctggatcttccttgagggcagtgctgcctactggatgaaatacagattttagagtcagagttgggttcaaatcctagctctgcctcctgcaggtgtcttaacctctctgacccccctctcctaatttgtgcaagggaataatatccccacatgtgtaagactcaacagggtgggaagggcacatttgtatctaacctgaatattaatatatgcattccacagtttcttttgtatgtatccattataacataattttaaaaactgatgacacgatctggttttcaaaacctttctttattatttgtggaataaagttcatggtacaaatatcaacagagtcgaaggcttctgtgatgggtcaagtgagatggggcctgggaagtgactgatattgaccacaggatgcagcaacatggggatgactgatgaccttgacaggagcagcgttggttcagtggtccccaaagacctcctgacaggggaaggtttcacaggagaggaactggagctgagtgcagaggacaccatggagcagttttgccacagagtgaaacagggagatgcctggcagctgcagaggagggtgcagtcaaaaagatttgttacagaactgccgtttgactcagcaatcctattactaggtatatatccagagaaatagaaatcgttctaccatagagatgcatgtgaatgttcattgcagcagtattcacaatagcaaagacatgcagtcaacctaaatgcccattaatgacagattggataaagaaaaggtggtacatatacaccgtggaatactatgcacccattaaaaagaacaagatcatgtattttgcaggaacatggatggagctggaggcccttatctttaccaaactaacacgggaacagaaaaccaggctgggtgcggtggctcacgcctgtaatcccagcactttgggaggccgaagtgggtggatcacctggggtcgggagtttgcgaccagcctgaccaacatggagaaaccccgactctactaaaaattaaaaaaattagccaggtttggtggtgaatgcctgtaatcccagctactttggaggctgaggcaggagaatcacttgaacccaggaggcagaagctgcggtgagctgagatcacgccattgcactccagcctgggcaacaaaagggaaactcagcctcaaaaaaaggaaaaaaaaaaatcaaacaccatgtgttctcactcataagtgggagctaaatgatgagaacttatgaacacaaagaaggaaacaacagacactggggccttccccagggtggagagtgggaggagggagaggagcagaaaaataattttgagtactagtcttagtacctgggtaatgaaataatctgtaccataaacccccatgacatgaattcaccaatataacaaacctgcacctgtacccctgaacctaaaataagagttaaagtaaaataaggttttgcttcctgggatgtaggtgaaataattgtttgctgaagagatccagaggcaagccaaatagtgacggtataggggtggggatacctttgggacggtgctcttgactggttgggaggggctggcccgtatgagacagtcaagcaaaaggggcaggcaggaatgtgaacagggactgacagtgtgttatgtgctgggcttggcagaagttctctccattgcctcttctgttgtgtcttggtttttaacaatgaactaggaaaggatattaccaactaagagtgagggtcagagaagaggcattgttctttgagggggagagaaatgataagccgttgtccagtagttgcctcttctgttcagtaaggacagaatctgacagggtggagctgggggagaagaagaaagccaatgaggagccagttctgtgatgaaacttacaggcttccaggctcagtatcaccctacggcatctgaactccatccttatctattacccaggattcttctataccccatagaaagcaccccttgcactcggacacgcacaggaaggcagttgctaattggagggaagactcactcacactgtccccgggccccactccaaagatggccagtgcagctctctcacctccattacctccgaatggtgctctcactcacagcccagaagagcaggctgacctccacatggagctacctcatttccactcctcactgctggctgctgcctccacggaccctctaaaaccacccctggtaagatcatcaggggcctcctaactgccaagtaccaggaatgctttatagtcctcaaacatgctgaatgctgagggagttcctccattcatacagctgcttgcagtacctgggtgctatggactgaatatgtccccccaaaactcctatgttgaaacctcatccccaaggtgatggtattcagaggtggggtcttgggaggtgattaggtcgtgaggatgaagtcttcacatatgggatcagtgcccttacagaaaggcccaagggagcttgtttgccccttctgccatgtgaggatacacagaaggtaccatctatgaggaacaggtcctcaccagacataaatctactggcactttaatcttggattcccagcctccagagctgtgagaaataaatttctgtttacaagctaaatgtaaagtgttgaccagtttatggtaattgtgttacagcagcccgaatggactaaggcactggagtcagtccaagagcttagatgtaagggaaataagatcagagcagagaggtgcaagagactggctcctaccagagcaactaagagtcaggcaaataatgtcaactgaggaggtttctgggtccagcagccacccaactgctgtaacacatggctcttcatttcatacccccttctctcctggtctgtctttccctctttgatggttctttttcaagctttcattttgagtgttcctcaaatggaagctttcctcaaaacagaaaagttcatgtttccttcctaataattaataggaaaaaaatgccaaatggatagaatggactctggataagaatggagaatttttaaagaagaagcaaatatggtttatgaatatattttaaaagtgtacaaaaaagaatatacaaaaactcactagaaatcaaataaaaatcaaaatactatctaggttttacctatcattatggtaaagaattaaaagaatggtatgagctaatgtaggacaagcacaaagaaatgtgcagacacacacacttttgatggaatactgaaatgggagatccttgctggagaatcattacacagcatgtcaaaatcctttttttaaatcaaaatagagtctcaccccattgctcaggccagagtgcagtggcaaggtcataactcactgtaacctcaaacttacaggttcaagtgatcctctgcccttgtcctcccaagcagctgggactacaggcacccaccaccacaactggctaattaaaaaaaaggttttttttagagacggggtcttgctatattgaccaggctggtccctaatccttgggcttaagcagtcttcccacacactgagattacaggagtgagccaccctgctcgacctcaaaatcctttgaaaagacttgatccaaattcaacttctagggttagagctcaagaaagtaactggtcaaatgtgcaaagatgtttgtataaggatgtttatcactgtaaagtttattgacacagaagcaacctaaagtgcaacaagaggggactggctgaataaatcctgctctatttctgtagcacagtacctcacagccatgaccaatgctgatgagggtttactgacatgaaaaacattgcccaactatagcaacaagcaagaaaagattataaaacaatatgtttggatttatttttggaaaaatggtattgaaaaatgatatccacaaacaagcatgcagagagaaaagtctgagtggttccaccaaatgttggtagcagttacctctgaaaagaggaattgtgggggattctctgcataaaagataaactctgaaggtctttgcacattctaggcacttggccctgctttcagacagtgaaactgaatcttggaagtctaaagggactcagggactcaagtgtgattgtgagctcctaaaggtaagacccgcgtccggttttattatttcaattaatccaattaatgtgcacaattcagtggcatttagtacattcacaatgttgtgcaacgaccacccctttctggttccgaatcatttttatcactgcaaaaggaaattccttgtttattaagtggttcccccttatttccctctctccccaatccctggcaacctaatctgctttctgtctctatggatttatttatcgtggatgtttcatataaatggaattgtacaatatctgaccttttatgtgtggcttctttcagttaatgttttcagaattcattcgtgttgcatcatgcatcagtatttcattcctttttagggctcaaaattccatgtatgtttataccgcactttgtttatccattcattcattgatggacattaaggttgtttctatcttttggttattgtgaatgatgctgctgtgaacattcacatacaagcagttatttgaatacctattatcaattctttcaatgtatacctaggagcgaaattactggttcatattttaatcctgtttttgttttttatttttgttttttttgttttttttttttttggtggagatggggatctcactatgttacccaggctggtatcaaactcctgggctcaagtgatcctccagcctgggtctccagaagtcctgagattacacgtctgaaagatgctgtgcccagccagtaatatgttttagaatcaggaagtgtgagtcctccaacattgttgtagtgtgagtcctccaacattgttgttctctttcaaaattgttttggctatccaggatatcttatgatttttacagatttattgccatttccaatctttttttattactatgtaatatatgtttctttttttcttttctttttttttttttttttttggagactgagtctcgctctgtcacccaggctggagtgcagtggcacgatcttgactcactgcaacctccacctcccaggttcaagcgattctcttgcctcagcctcctgagcagctgggattacaggtgcccgccaccatgcctggctaatttttgtatttttagtagagatggggtttcaccatgttggtcaggctggtctcgaactcctgacctcatgatctgcctgcctcagcctcccaaagtgctgggattacaggtgtgagccaccgcgcccagccataatgtatgcttctttgagctgtttttctgataacttagtagccatgtaatctaattaactgatatgcttcaaccactttctcaatctatcactctcagacacgaaacagtatctattgactctatcatatgaaaaattaacatccccatcagagttgttccaagccccacgaatacagccaggatttttttgtcttatcatcttgcaagagctcaggtcctatccaactacaacaattacagatacatggcagcatgttcacattgtctcaggcttcccccaactacatctgaacagtttgaattggattaaaaagggctcctggagacttgtaggcttgcttatcctgtgggtaactgacattggttgcagtaatgataccaaggtttcttttctttttccaggtaggaaaacatgtgatttgctctatttcatcgtctaccagtagtttcttgtgctcaaagtctgcactttgcaacaagcacaaattaaataagagcatacatgcaaaacaattacttaaattcaaacttttccattgaaatacaaatggctcttaaatatgtaagatacgcaacctctctcaaatgaagattaaaactgtatccaactgccttttttcaccagattatcaaaaattcaaatttgatggcaagagtgtagggaaatagagtcccttatatattcttgtgggagtagaagttggttcattgtgaaaggtaatttaacagttcctatctaaattactttcgcccagaattttatttttatttttgaaacagggtctcactctgtcaccaaggctggagtgcagtggcatgatcttagctcactgcagcctccgtctcccaggctcaagtgatcctcccacctcagcctcctgagtagctgggagtacaggcatgtgccaccacccggctaatttttgtattttttggtagagacgaggtttcaccatattgcacaggctagtctcgaactcctgagctcaagtgatctgcctgcctcggcctcccaaagtgctgggattacaggtgtgagccactgcacccagctcacccagcatttttacttttggaatttatgatatactgtgcacatgtggaatttaagctatagatacttgcatatgtgcaaaatagtgtacaaaattaacgactgaagcagtttgttatagcagaaaattaaaacagtttatctgtccatcagtagacaaactgttaaataaattactgtatatccagataatgaagtcctacatagaatgaggaaggtctgtctataccagtatggaaagatctccaagacacataatttaaaaaaaaatcaaaagtgcagagcagtgtgtatcatactacaacttgcgtttttttaacaaataaaggagggaagagaattgcttgaatgtaaaacaattctctgaaatcctgtagggttgtgaacagagtgaatggagaacaggagtggaagggaagcttttccaatgatgcctttctacacactttaaattttatcaaacgcaagtaaacctccctcttgattgccttctcctcttgggtcctgtctttacttctgtccaccacttccttaccggggtgactgccggcaggacttggggtttgtctttcccacttggcatctaaatcgaaatcctttaccctttgagcccatattagttcttctttcccgctaatgtctaaactgacctagaaataaaaaacttttcttcctccctctccccctccttccttctctttctctccttctcctcccatccctcaccccacacaaaggcattctgtgtgtgaaacattaaaaagggttcccttccttacttgaataaacctgcccactcagcctcaaggctgctcccagagatgtcctcgggtaacttggagactgtgaacagtgccaaaaaacacacaatatcatgataacttcccagactccaagttccagtgaggctaaactagaagaggacagtgatgtgactgcttcttggtcagaagaaaaacttgaagtgaaagtgctctttgtttcctggggacaaaagttaaaaaggaacaaggagaattcccgtgaaggtcagtttctccttccagattttgtggcagagaaactagtgaatttcaagttccttgtgttaagtaagtttagcctactgcttccttacatattttaaattcgtcctaaagggttctctgtactccacaaactgtaacctaaatgggcttgtaaatggactatagcctactctttgccactcaccatgttttgaccaatcaaaggtggcccagtgttcaaaccatgttcaaataaggcaaacgtcgagctggaaccaatccggctgtttctgtggcttacttccaccttccatacactgcttatcattttgtgtccataaatcatcttccaccacatgggtgcactggagtctctgagcctattctggctcaggaggccgcctgattcacgaatcattttttgctcaaagtcttttaaatttaatttggctaaagtttttcttttaacacctacaatgctaagattctttgtttccaagtgacactgtgtggactcacctacccccagccaccaccttgtcaggttttcaaagtatccagcactgcagttccacagtcatccctgcagtgaaaccagactcaagggcaccctgtggccactgacagctgagacccctgagagcctgtattacatgcatgtccttgatgaaagctgggtggggctgtaaaaaagtgaaaaatctgttttccttctaaaaactatttcctgcaggaatttcctggtttgttcctgtggaaaatatggagtctagatcgaagaaggaaaacatgcctctagggaggccacatgcccaagacttgtggccctggcgtctcctggtttgaactccttggcgtccctggtttgaaccacacatttcttggggaaatctctaagtctgggagacagagctaggcctccctgcacgcctttacgccaggcctggggaagagagaggaaaccatctgagtgcctgcatggcttccagccttgcaggaacagggagacctgcttaagggtgtgtctttccgcgtttgcccatgaggaagcaggcctctgccactgggagaaggtagcatgagaaagacctgcattggaatctggctccatgcctttctagctgtgtgaccttgggcatgtcacttaacctctctgagcctccacttcttcatctatagaacaggggagaagaaaacctgccttctagagttgttttgaagattgaatgaaataacttttataaagccttgatagatgaactacccacccctcctccctctgttcccttttcctggctctctcagcttcttggtgcattgagggggcacctaccgcaggcaggccacatatccaacactttagtccttctccagggaccatacatcacagaaatcctgtgtccaagcacaagtttcagcaaagactccttcccccttgataacaagtgtttaggttgctgacggggcataagagccaagcacaaaaaacagcccagcctccagatcccaaggaaggtgcatgctcagagcactgtccttccacccagtcccctcacctgtcaccacaagagccttgagcgtccatggagcttcagctctcagccactcattggcatccaggagatagtgtccaggacccgtccatccctggaaagcaggctggctgccccctcattgcttggctccttaatttttgataatcataaaccctagggtcaaagagctgggctgtaacacaatagggagtgcattccccagtgtattcccccgtgtggtcacagggaatgagcctggagcaagggagcccagcaggctgagaatctgcagtgtgctgggcctgggcttggcatgaaggcacgagatgtcggaggcgtggctgccacccaggaggacacacctgatggggctccaggaacaggacaatggtggagacgtcacatccagaataactttgttaggagactgaacttgacagtcaggagttttacattgcaggtatcaaaaagccacctaaaattgccttaagtaatagaggtgatctaatggctcaaaaaaccaccaactctaggaagacagacagggtgacctgaaagtgggtttcacctggtgtttttctgccattctgtgcatggcgtcagcttcctcccaagactggcactgcataggacatcgggtgtttgccaacccagttgaagctctctgcttccttgctcaccaccagcagaaaggtgagggctatgccctgcattccaggtgacagggaaggtttacatcgggactcagtcacactttctgggtactgtacatttcatagcaggagccaggttatactaaaggagtcctggcctgaggataccagcaccctatagagatggagaaccccaggcagctcaggggctgaggggctgagtgacagtgagcactgcccacagagggggcactctgaagtcaggaggggtgggaaacaggtgcagatcggcagccggcagaggcccacccaggtgagcacaggtggacctgatggtggatggggacaaagagtgtgctggttgggaggagaaggcgggggcctgtagctggtctgggaattcccaagctgagcaaacggtatgtcaaggcctgtggttgggcttgttaacataaacaccacactcttaaatgatctgtaagaggtatcttctgagccaatatgagtgaccatggcctggggatctcaagaggtcctgaaaacgtgtgccggggccgtcgttttctacatttgaggggacaggaattggagtaacatcataaatcaatccatggaaggtgtacattgactcggcctaacaaggtgggatatcttgaagtcgggggtgttataggtcataggtggattcaaagattttccgattggcaattggttgagagttcagctttgtctaaagacgtgaagttggtacaaaggaatgcttcagttcagagagagggtctgcctctgccacgtgatgctgtcccagagtcaggtaggaaagtcagccacagtatcctcagtgattttacaacccattgaaggagactctgtggtttctaggtgtgtgttaattcttgccttgcatggcctcaggtcttgttcataatctgtaactgattgtccagagtccagtctgaataatctaactatgcctattttatactccaaaggtgcagggctttcatgaggtgtctctgacctccccttccaccatggccaggaattcattttcaagtttccctggggtccccttgactaagagggggcctgttccattggttggggtctcaggattgcaggccttagggcagcctcacagcatggtgcagggcgcttggttgggttttcctgaaccctgaaccccatggctcataggataagggaactgtgggccacccggattctgctgagattcctttccccaggtgcagatgcgggtttggccttggccctttctgttcctttcagaagcccacggagtggaggacagaacggtttggggtcagggacagaggctcctgtcactgagactgccctcagtgggacagagggaagagactattgatgcagttcgtctgcctctctgtgacactgatgtgtaggcccagtaattaaagtccactcctggcagccagccttgaacatagaactgatcggccacacagaaaacctgaaacaaagcctctaaaatgcagcctctcaaaaacgctcacaggagttttcttaatcagacttagcgtagccagtgagcttctgttgcctgcggtgacgtgggtgctattgttcccactaaaagcccagacctctgcctcaggagacagggctcagctgcagcctcctcaactaaaacatgaagggctgcttcgtgggcgccaaagcggctccttaaactcgcaatggtgtgcaaatttatgggctcactttctacatcagatcttcaaaggtctctgtgattccaaaagcttgggaactattaaatttgatcatttctgaaatgtcttccagtttaaaagtcttcagttccagttcattttcaattcctgaataaagggatgagtcttggagcttctggaagctggcctggaactgagcacttgctgcagacaatgcctgaagtgcaaacccaaaggtgcgtggatctgggctgcatgtgaaagctttcatattcaggtcttactttgcgacagtgaggggtgaccagggaagcctatatgaggggcaggggcaaaccagcagcccagcctggggaggtgccttaaccacatctcacctcacttcctcgagctaaagttttctttaagggaaatgcaggtttatgcaaaatactaagcaagctgagtggctggttttttttttttttttttaaagcaataaggaaaaaacagaaattttcacaccaaagaccctgtgttgggctcggaagaactggtggcttaactgaggagtcacggaacactgctctcggaaactgttagggcaattgaaaaaaaaaaaaaagaataaagacaatgaagaggcttaattctccctgttaaaaacaagggaagcggagggcagccaagatggccgaataggaacagctctggtctacagctcccagcgtgagtgacgcagaagacgggtgatttctgcatttccatctaaggtaccaggttcatctcactagggagtgccagacagtgggcacaggacagtgggtgcagtgcactgtgcatgagctgaagcagggtgacgcattgcctcactcgggaagcgcaagggatcagggagttccctttcctagtcaaagaaaggggtgacagacagcacctggaaaatcgggtcactcccaccctaatactgcgcttttccgatgggcttaaaaaacggcgcaccaggagattatatcccgcacctggctcggagggtcctacgcccacagagtctcgctgattgctagcacagcagtctgagatcaaactgcaaggtggcagcgaggctgggggaggggtgcccaccattgcccaggcttgcttaggtaaacaaagcagccgggaagctcaaactgggtggagcccaccacagctcaaggaggcctgcctgcttctgtaggctccacctctgggggcagggcacagacaaacaaaaagacagcagtaacctctgcagacttaaatgtccctgtctgacagctttgaagagagcaggggttctcccagcacgcagctggagatctgagaacgggcagactgcctcctcaagtgggtcgggtccctgacccctgacccccgagcagcctaactgggaggcaccccccagtagggggtactgactgacacctcacatggccgggtactcctctgagacaaaacttacagaggaacgatcagacagcagcatttgtggttcacgaaaatccgctattctgcagccactgctgctgatacccagggaaacagggtctggagtggacctctagcaaactccaacagacctgcagctgaaggtcctgtctgttagaaggaaaactaacaaacagaaaggacaaccacaccaaaaacccatctgtacatcaccatcatcaaagaccaaaagtagataaaaccacaaagatggggaaaaaacagagcagaaaaactggaaactctaaaaagcagagtgcctctcctcctccaaaggaacgcagttcctcaccagcaacggaacaaagctggaaggagaaggactttgacgagttgagagaagaaggcttcagacgatcaaactactctgagctacaggaggaaattcaaaccaaaggcaaagaagttaaaaactttgaaaaaaatttagacgaatgtataactagaataaccaatacagagaagtgcttaaaggagctgatggagctgaaagccaaggctcgagaactatgtgtagaatgcagaagcctcaggagccgatttgatcaactggaagaaagggtatcagtgatggaaaatgaaatgaatgaaatgaagtgagaagggaagtttagagaaaaaagaataaaaagaaatgaacaaagcctccaagaaatatgggactatgtgaaaagaccaaatctacgtctgattggtgtacctgaaagtgacggggagaacggaaccaagttggaaaacactctgcaagatattatccaggagaacttccccaatctagcaaggcaggccaacattcagattcaggaaatacaagaacgccacaaagatactcctcgagaagaggaactccaagacacataattgtcagattcaccaaagttgaaatgaaggaaaaaatgttacgggcagccagacagaaagatcgggttacccacaaagggaagcccatcagactaacagctgatctctcgacaaaaactctacaagccagaagagagtgggggccaatattcaacattcttaaagaaaagaattttcaacccagaatttcatatccagccaaactaagcttcataagtgaaggagaaataaaatactttacagacaagcaaatgctgaaagattttgtcaccaccaggcctgccctaaaagagctcctgaaggaagcactaaacatggaaaggaacaaccggtaccagccattgcaaaatcatgccaaattgtaaagaacattgaggctaggaagtaactgcatcaactaacgagcaaaataaccagctaacatcataatgacaggatcaaattcacatataacaatattaactttaaatgtaaatggactaaatgctccaattaaaagacacagactggcaaattggataaagagtcaagacccatcagtgtgctgtattcaggaaacccatctcacgagcagagacacacatagactcaaaataaaaggatggaggaagatctaccaagcaaatggaaaacaagaaaaggcaggggttgcaatcctagtctctgataaaacaaactttaaaccaacaaagatcaaaagtgacaaaaaaggccattacataatggtaaagggatcaattcaacaagaagagctaactgtcttaaatatatatgcacccaatacaggagcacccagattcataaagcaagtcctgagtgacttagacttccacacaataataatgggagactttaacaccccactgtcaacattagacagatcaacgagacagaaagttaacaaggatacccaggaattgaactcagctctgcaccaagcggacctaatagacatctacagaactctgcaccccaaatcaacagaatatacatttttttcagcaccacaccacacctattccaaaattgaccacatagttggaagtaaagctctcctcagcaaatgtaaaagaacagaaattataacaaactgtctctcagaccacagcacaatcaaactagaactcaggattaagaaactcactcaaaactgctcaactacatggaaactgaacaacctgctcctgaatgactactgggtacattacgaaaggaaggcagaaataaagatgttctttgaaaccaacgagaacaaagacacaacataccagaatctctgggacacattcaaagcagtatgtagagggaaatttatagcactaaatgcccacaagagaaagcaggaaagatccaaaattgacaccctaacatcacaattaaaagaactagagaagcaagagcaaacacattcaaaagctagcagaaggcaagaaataactaaaatcagagcagaactgaaggaaatagagacacaaaaaacccttcaaaaaattaatgaatccaggagctggttttttgaaaggatcaacaaaattgatagaccgctagcaagactaataaagaagaaaagagagaagaatcaaatagacacaataaaaaatgataaaggggatatcaccaccgatcccacagaaatacaaactaccatcagagaatactacaaacacctctacgcaaataaactagaaaatctaaaagaaatggataaattcctcgacacatacaccctcccaagactaaaccaggaagaagttgaatctctgaatagaccaataacaggctctgaaattgtggcaataatcaatagcttaccaaacaaaaagagtccaggaccagatagattcacagccgaattctaccagaggtacaaggaggaactggtaccattccttctgaaactattccaatcaatagaaaaagagggaatcctccctaactcattttatgaggccagcatcatcctgataccaaagccgggcagagacacaacaaaaaaagagaattttagaccaatatccttgatgaacattgatgcaaaaatcctcaataaagtactggcaaaccgaatccagcagcacatcaaaaagcttatccaccatgatcaagtgggcttcatccctgggatgcaaggctggttcaatatacgcaaatcaataaatgtaatccagcatataaacagaaccaaagacaaaaaccacatgattatctcaatagatgcagaaaaggcctttgacaaaattcaacaacacttcatgctaaaaactctcaataaattaggtattgatgggatgtatctcaaaataataagagctatctatgacaaacccacagccaatatcatactgaatgggcaaaaactggaagcactccctttgaaaactggcacaagacagggatgccctctctcaccactcctattcaacatagtgctggaagttctggccagggcaattaggcaggagaaggaaataaagggtattcaattaggaaaagaggaagtcaaattgtccctgtttgcagatgacatgattgtgtatttagaaaaccccattgtctcagcccaaaatctccttaagctgataagcaacttcagcaaagtctcaggatacaaaatcaacgtgcaaaaatcacaagcattcttatacaccaataacagacggccaaatcatgagtgaactcccattcacaattgcttcaaagagaataaaatacttaggaatccaacttacaagggatgtgaaggacctcttcaaggagaactacaaaccactgctcaaggaaataaaagaggatacaaacaaatggaagaacattccatgctcatgggtaggaagaatcaatattgtgaaaatggccatactgcccaaggtaatttatagattcaatgccatccccatcaagctaccaatgactttcttcacagaattggaaaagctactttaaagttcatatggaaccaaaaaagagcccgcatcgccaagtcaatcctaagccaaaagaacaaagctggaggcatcacgctacctgacttcaaactatactaccaggctacagtaaccaaaacagcatggtactggtaccaaaacagagatatagatcaatggaacagaacagagccctcagaaataatgccacatatctacaactatctgatctttgacaaacctgagaaaaacaagcaatggggaaaggattccctatttaataaatggtgctgggaaaactggctacccatatgtagaaagctgaaactggatcccttccttacaccttatacaaaaattaattcaagatggattaaagacttaaacgttagacctaaaaccataaaaaccctagaagaaaacctaggcattaccattcaggacataggcatgggaaggacttcatgtctaaaacaccaaaagcaatggcaacaaaagccaaaattgacaaatgggatctcattaaactaaagagcttctgcacagcaagagaaactaccatcagagtgaacaggcaacctacaaaatgggagaaaattttcgcaacctactcatctgacaaagggctaatatccagaatctacaatgaactcaaacaaatttacaagaaaaaaacaaccccatcaaaaagtgggcaaaggacatgaacagacatttctcaaaagaagacatttatgcagccaaaaaacatgaaaaaatgctcaccatcactggccatcagagaaatgctaatcaaaaccacaatgagataccatctcataccagttagaatggcaatcattaaaaagtcaggaaacaacaagtgctggagaggatgtggagaaataggaacacttttacactgttggtgggactggaaactagttcaaccattgtggaagtcagtgtggcgattcctcagggatctagaactagaaataccatttgacccagccatcccattactgggtatatacccaaaggattataaatcatgctgctataaagacacatgcacacgtatgtttatcgcggctctattcacaatagcaaagacttggaaccaacccaaatgtccaacaatgatagactggattaagaaaatgtggcgcatatacaccatggaatactatgcagccataaaaaatgatgagttcatgtcctttgtagggacatggatgaaattggaaatgatcattctcagtaaactatcgcaagaacaaaaaaccaaacaccgcatattctcactcataggtgggaactgaacaatgagaacacgtggacacaggaaggggaacctcacactctggggactgctgtggggtggggggaggggggactaatagcattaggagatatacctaatgctaaatgacgagttaatgggtgcagcaccccagcatggcacatgtatacacatgtaactaacctgcacattgtgcacatgtaccctgaaacttaaagtataataataaaaaacaaaacaaaacaaaacaagggaagtggtgtcctctctgagcgttttctttggaaaacttgtcattgtaaatcttcctctgcccctttgaggggcatgcaatgctttttgacaactaaataagcctcttgccagctttgcaacccaggactgtgttcctgaaggacctgggagcccgtctttgaaacgtcatcatcagagcagccagggccctatctgccagtctctgtgggatggtgggggcctaacatctgctgtgagtagtaaatctacctcctgtcacgaaggtaagagtttattttcctttgtaacaaggtaattagcaaacgcaggtggtcaggtaaattgaggttgaatctccaataaatgggtgtggccaaaggtgctgggaagtccactgatctgaggactaggcattactcttcttgagaatgcgtgcagtgaacaatgggttggacccactggctagataagcgtgagatttctgtctttgcagcatcttagcggatcattgtctgtgatgcacatctcactctgagttaatgcctcttcaatgatgaaagtgttttcttcctcttctacctctgcagagaggcttgctgggatagattttgtttgtaattctatttccccaccgccagaggccggactttgggggtcaggcagctgagaaggagtttagaacccatgcctaggccttccacactctacaggcacccagttcatccatcagtagcagaacttagagtcttcctgggactccatactgcctggagagaggaattcgttctctttcattgctgacattcctgggtgaatgcctgtggcagttatactttacccatcccattttgtacctccttccactccaggggaccccaaggggcctggctccacttgcccagtgcacctccgaagaagggagactgggaaatgaggatcctgccagggggccaggtgttggacaaggtgcatgtgaatgtggaggaggaagacggagccctcccaagaacctgacagggtcagggatgaggtgagagtgctcagaagagtgctgaggcaggacccaggctggggccacggacctgcctcagcagctggggtctgacctcttggggttgtgttctgactccccttcccccatggctctttgccctctggaagccaaggggcaatggcaggttcacagtggcactgcaagggtacagttgttgggggttcttgggagcaggggcaccagttctgctgtggccctggttgcctccccttgcccaggctccatgtgcaccctcagagtccccctggcacaacctttcttcttctcacgaggaacacccccacttccacttgggcctctgccaggaagaagggtgggagctctgccgaggtgtccctctgagtgaccaccctcagctggagccgccaggcctctgcacagtagctgcccctgggccttgtgtgtaaaatgggggtaataacagtatctacctcataaggttgctgcaagaactaaatgagttcctagaagtgaaagacacttagaaccaggatccagaggcttgcgaagggtgagctggagtagccatggtaagtatggagagggaggtgaactgaggatataaaatcaccaaggcaaaaaatttaaaaacagaaacaataaccagctgggctcagtggctcatgcctgtaattccagcgctttgggaggcgcagcagaagcatcacttgagtccaggattttgagaccaatctgggcaacatagtgagaccacatctctacaaaaaaaaaaaaaaaaatcactaaggcaagaacctagtacactgtaggcattccataagtgtttgcaatttttattctaattatataaaaataaaatatatttgaatagaaacagaactctagaaggcaataacaagtaatagtaactgattatcttttaaaatacaacgaggtaggactacaagtggtttttttgttttttttttttttggtttttttttttgagacggagtctcgctcagctgcccaggctggagtgctatggcacgatctcagctcactgcaacctgtgcctcccaggttcatgcgattctcctgtctcagcctcccgaatagctgggattacaggcacctgccatcatgcccagctaatttttgtattttagtagagatggggtttcaccatgttagccaggctggtcttgaactcctgacctcaggtgatccacctgccttggcctcccaaattgctgggatttcaggcgtgagccaccgtgcctggccttttttttttttttttaataccattctgtgatttaaacttttctataatgcacaattagttttatagtcaggaaaggaaaatcaatgttttctttaatgctgagaatttttgttaatatttctgacatttcataaaacatcttttgttgacattctacaaatgatagcatccaataatgtcccaatactttcttcttgtgaagagagtttatatatctgtaaaaatgaaagacaaattatgacttgctgatatcgtcattcactactaattgtcattatacaaacatgtgtaagtgaaattattcctcattcaattattgggttcatggtataacaaacaacaaatgtgattaaaatattcaaagtagagggcaattcattacttgtatcccctttaaattgctgctatgggagtaactctcaagaacataaaaaccaaatttctatccattttaaaagcatactaaatttattttacattttaaatatactatgtaagtttgatatttaaaggtattctctttcttaatgtggagaatggttatgtcagctgagtttgtaattatattttacataaaccatcacacctcccagttctttgtatctgtaatttttaagtaatttttaaaattagattaactttctcaaaagttcaaaaaacaaggagctctggtgatcaataggcaaacggcatcagcattattgctcatctatcacactctttctaaaaatatggactggcaaacctttttgacttctgtaatattcattatttcaggaagatttttcagagaaacctgatgaccttctacttgagatattaggtattcttgatttatttgtttttctccctcttcaatgtaaacaattagaattgaagtgtcatttgctgagataccaaattttttcaaagcctctgaaatctaagagaaaaaaaatgaaaaaaaaaacacaagatcattaaccattgtttcctacgtctgaaacatttcctgatctgccttcttccttggtcaggctcttatttttcatgtcctaacagttctcactgcctactttttcactttaatgattcctttccaacatccattggcacttcctcaaaagcactccctgcttaaaggtacgccttgttcctatggaatcaagcccagcctcttggcgctgcacaaaaacacctcctccctctggtgccaagtggccctccagccaggcgcttctgccttctggccagtccagcctgcctggggatccagtcacatttcatgcccttctgcctgtgctcaagctttgtcctctgctcgcatgtcccttctcctcatggcttggctgctgaacacatgcttcagggtccacagttctgatgccactccccaccacaccctcctccctccaaaatgaatggcttcattgctgtacccctagatttgaattcattttcccattatatcatttatcttagggcattttaacttgtcttgtttatctgcctctcctcaggaacatatttgcctcttctgcccctagaactgtaaatggaacggggaaaaagttcaacagatgtttactgaattcaagagttttctgaattatgtctaatgatctcaaggaaaccataattagtaaattttattccaggtactgggaatctctattaccatgctgagataactgcattttataaacttgtcaatcatctgtattttaacctatgctacaggtttcctgtagatgacattagtacctggttgttattaacagcagcagtaatactaaaacttcatcagcaaaattgcagtcatttttttcatgtgctacatgtgtgatgtctttagcttgataactttcattgaaaaagcattactataagtatttcaaaccacaaactctacctatgtactgggtgtgtgagtgaggctgtgttaaggactgttataggtacaagcaagttcctggtatatgaaaaagacatggatcccaccctcaaggagtttacgggaagagagaatgatatgcaggctagcacacaaaatatccacgcctaatgttttatcatttagatttctgtcagcttctcaagcaaaaatacttgaggggtcttcctgaccctatatggtaagaacagataaaattaacctcgcttaatttagctaaatttttgtttactcatatgtaaactgtcttagtaagaggcagggttaaacctcaactctctgtccagagctctcttcactattatttgggtttattactaaccactggcttgcaggaatttagcctccaacccaacactgaggaacacatatgttattatgacacggtcaacagaaataggaaagtgcacattacattgttatttggggaaaggttgaaaataatttcagtagatagagttcttgtcttcatttttcccagtttgtagaggtgaactgctttgtttgctgccacaagtatctgaaatggatcaacaatctaccaaagcaaggaaaaagaattaattacacatggagaatctgcagtgcctgaaaacacatggtaactcatggttaactccagtgtcaagctgttttacttcatcacaattcttacggtctgtattttcaaaactattatcccggctgggcacggtggctcacacctgtaatcctagcactttgggaggccaaggtgggtagatcacctgacgtcagggttcaagaccagcctggccaacacggcgaaaccctctctactaaaaatacaaaaattagtcaggcgtggtggcacgcacctgtaatcccagcaactcaggaggctgaggcaggacaattgcttgaacccgggaggcagaggttgccgtgagccaagatcgcgccattgcactccagcctgggcaacaagagtgaaactgtctcaaaaaaaaaaaaaacaaaaaacaactattatcccaagggcctgggtagtcaggaaatcacagaattttaaagctgcaaggaacttatgcaaatagtaaaatttttttaaataacattaattgagggctaatattatgggcatgatcatattgcaaacattttacttgtaatattttctttaatcctcaaaactaccctatgaaattgacactattattagtagtagtagcagtagtagtagtatgtaattgatgaggaaattgaggcaaagaatgtctgggtttgaatcccatctctgtcacctatcacctaggaaacttatgcaagttcattagcattttatttgttagagaccgatgaaacagtattcactccataggctgttgtgaagattaagcaagttagtatacgtaaagcacttggaacaatgctaggaatgcagtaagcactatataaaggttggttatgtcttgttcaaaggcctaagtagtaggtctgggattaattcccggtaacatgatcgcactgcgtgtgccctgtttttttgtttttttttttttttggagacagacagagtctctcgctccattgcccaggctggaatgcagtggctcaatctcaattcactgtaacctccgcctcccaggttcaaatgattcttgtgcctcagcctcccgagtagctgggactaccagcacacaccaccacacccagctactttttgtatttttagtagagacacggtttcactatgtaggccaggctggtctcaaactccgggcctcaagcaatccacccaccttggcctctgtgtgtactcttaaccactacactattcctcctctacagactgtcttgttaggaacccccattttaaagatgagaagctggagatccaggcatttcccatattagacccagaccacaacctttcctatttcctagggcaggacctggcacttctgcctctattcactgttatagtcaaagttggctgcatctgacttggacaagaattttttccctaaccgtgacagatttttaggctaccctataacatcacaaatattaatgtatacttaaatgccctgtatggctcattcattctttttttttttttttttttttgaggcggattcttggtctgttgcccaggctggagtgcagtggcacaatctcggctcactgcaacctctgcctcccaggctcaagcgattctcctgcctcagtctcctgagtacaggtgcccaccaccatgctcagctaatttttgtatttttagtagagacagggtttcaccatattggccaggctggtctcaaactcctgacctcatgatctgcctgcctcggcctcccaaagggctgggattacaggcgtgagctaccatgcctggccattttttttttccagacagagttttgctcgtcgcccaggctggagtgcaatggcgcaatcttggctcactgcaacctctgcctccagggttcaaatgattttcctgcctcagcctcccgagtagctgggattataggcgcccgccaccacgcccagctaatttttgtatttttagttgagacagggtttcaccatgttggccaggctggtcttcaactcctgacctcagatgatccacccgcctcggcctcctaaagtgctggcattacaggcgtgagccaccgcacccagcaggctcattcattcttaaaatttatatttaccactgtaggatttatcagtgatccatcgatggtgccttccatggcctttcttctcaagtctcccgcattttttacatctttaaataacagaagggttaccctgcattcgggaaataggtccagctgatgtgttaactgcatttcacagataagcaggattctactgcacacaaaatgaaaagaccaaaagatttcatttaaaagttaacatcagaactcatttcttaataaatattcaaaaactttgaaagtaacttgataaaagtgttaaactagaaaaatccatcgccaaagcccatttggcatcctcatgagatgttgtcttcctaacccttctgagttgttctgttgtcatccccagggaaacgccaaggggcccagctggttgctgtttgttcagatgaggcaggctcaggtgcatggttgaagggctgcttccccagcagacaagtaggagcagaatgtcaggaattttttaaaccagaggttgcttacggtattaatgaagtcttactctatcttagtctttttaacttcctgatctcatcattttatttatattttaggaaggcctagacataaatattaaggaagaaaataattttaaagaataaagtaggctgggtgcagtggctcatgcctgtaatctcagcactctgggaggccgaggcgagcagatcacctgaggttgggagttcgagaccagcctgaccaacatggagaaaccccgtctctactaaaaatgccaaaaaaattagccaggcatggtggcgcatgcctgtaatcccagctactcaggaggctgaggcagaagaatcgcttgaacctgggaggcagaggttgcagtgagccgagatcataccattgcaccccagcctgggcaacaagagtgaaactccgtctcaaaaaaaaaaaagaatagggggaagggatagcattaggagatatacctaatgtaaacgatgagttaatgggtgcagcatacaaacatggcacatgtatacagatgtaacaaacctgcacgttgtgcacatgtaccctagaacttaaagtataaaaataaaaaaaaaggataaagtatcccacttgacccaaagatattcattccacgcatggaaattaagcagagagggtacaattattaaataatcaatgtcgctcctttcttggacataagcttaacaagaaaaggataggttattatatataaagacataaaagaaacataaaagacaacttgaataaccagaaagacatgaccatatctttgaatggaaaaactatgtattgcaaaaatttctttaaaacaatttctatcaaattcttaataaaatattttggtggggcaatttgagactcattttatccttttacctggcagattatatttctagaactctttctgatggaagtcattaggaatccaataattatataagatgttcctctcattattttaacagtaaaaagttgcaaataacctatctagctaatgatgggattagttgttatttaacaaccattaaaacatgtggtcttgacggtgtgtaaaaacggcaataaataacattaagtaagtaaaaacatctgaatggaaaacaaaacacaaactggccaaaatgtgggttttttaaaaggcttttaaacaaatattaaaaagaaaatacaccaaaaagttaatgttatctcttatttagaattaatttgactttttctgttacaaacagaaaaaaatatatttgtgaacgatatcctggcacacagttcaatcattagtcatgctaaggtggaaaaaatggatacagaaagacataatcagtaggatcccaattatataaaaagatacacatatttttttaaaatacatgaaagaaacactaaaatatgaccatcttgggtagtgaggttatgaggtgatttttattgtcctttatataaaagaaaatattttgttatgtatgttctgaattttctacagtaagcacacaaaacatgagtacacataataagaaaggaaaaaaacgtgctttttaacactgagtggggggaagaacccttagaaaacttcaaaatagtttgttcttgtttagcgtaatttactcactcaggtcagaaacttggaatcatcgttgagacccaacctgtcactcaaatcctatatctaatccgtaaagtcctgaattttcacctgctaaatatacttttgattcgtccacttctctcccatacgctaggtcacatcgctcatctacagcagtagccttctgagtggtttctcacaattcctgccctcctataatccagtcgtcaccagcagttacagtgatcctttcaaaatgtacatcagatcttgtcattctgctgctcttatgataaagccccaactttgtgtcacggtgttccacactctacgatctggtccctgcctctcctcttctgctaccgccgcaatggccttctctaagctcaagtcaccaacctttctccccgattctgccctatcggacaggtagttccctctctcctttcatctccgcctgacgcactcctccctcccttcaactccatttggagtccatttactacagcgcccagaaccccggcactacggctctttttagtctgaggactagctcctttttgggcccaatcacaactctgaagaatcctgcgcctatccgctgcatgtctcctcactaaactatttcttgaggggacagcctgactctatcattctcgtgctgcattcccaggggctggcctcgttgccgcttgagaaataccaaccgcagccgttgtcccaaagacactactaaaactgcccggaccctcccgctcccgagcctgcccgttagagcgcaaggaaaactcaccatccggcccccagtgcgtctcggaagagctcccgctccgaaacaaagctcacaacttccggaagcgatggccaatccccgtcttcttcgagccagtttccggataggccggctcggggtggccatctgtttccgggtcctggtaggaggggtgcttccgcccatggtcccgcccattcttccgcctccccaacctgggtcccgtcaacggacgcgaaggagaacaggggctgtatatcacttccggcgaaggaaatggaagaatctatgggctgggaccggaagctggggtctggttttgagtctcggctttgtcttaacctgtgttgggcgttgcaccgggcgacctcagtttcttcctgtacaaggaaaagtactgaccaaaatgagttctacatacatttccgctgctggagatttctttggtttttgagacagagtcttgctctgttactcaggctggagtgctgtggtgcaatctcggctcactgcaacctccgcgtcccggttcaagccattctcctgcctcagcctcccgagcagctgggactacaggcacccgccaccacgccccgctaattttttgtatttttagtagagacggggtttcaccgtgttagctaggatggtctggatcacctgacctcgtgatccacccgccttggcctcccaaggagctgggattagttctttttctgggccatgtctcctgtgacactttggacttttgagtttaatgctggaacaagttaaaattttggtaggtgattgggaaggcatgattatgttttgcaatgtcagaaggacatgagatttgggggtccagggatggattgaatatatgtccctgccaaatctcatgttgaattgtccccatttttggaggtgggacctgatgggaggtgtttgggtcatggaagtggatctctcatggcttggtgtctttgcaatagtgagtgagtgccaggaagatgtggttatttagaagtgtgtggcaccctccaacacagtctcttggtccagttctcaccatgtgatgtgcctgctctctcttctccttctgccaatagtaaaagctccctggggcctcctcagaggccaaacagatggtggtactatgcttcctgtacagcctgcagaaacatgagccaatttaacctcgtttctatataaattacccagtctcaggtatttctttgtggcaatgcaacagcctaattgcagggggcaggggcagggggaagaggtggggaggcatgacacactgggctaaaacatgaagaacattcggccaggtgcggtggctcacgcctgtaatcccaacactttgggaggccgaggcaggcagatcacctgaagtcgggagttcgagaccagcttgaccaacgtggagaaaccccgtctctactaaaaaataaaaaattagccaggcatggtggctcatgcctgtaatgccagctactcaagagactgaggcaggagaatcacgtgatctggggaggcagaggttgccatgagctgagatcgcgccattgcactccagcctgggcaacaagagtgaaactccctctcaaaaaaaaataaataaataaaaattaaaattaaaaaaaatatatatatatatatatacatatatatatgaaggacattctatttctgggagacactggaacagggccctggctggtctggttagtctctctctatcacaggatgctacattcccagcacattctacagttatcctagagaaccacaagtgagaaaggagagagaactaaattggtccaaggccacctggagaactgtcctgcagtctatgcccttaacccagattataccctttagcaaagctagtccgtttcatatgcccaccaacctcctagtatctggaggcggaagtttgtcttatcagatcgatgtaacaccttcacagacacaatgtcagtacaacattgttgagccatagccagaatacattttactaggcccaggaggactacatcacaaacaggttgatcaggtctgtctggagcatcaacctagtccaggatccagtgatccaggtaagaacataataggtcaaaggtgccagcccaccaagatcttattagttgtcatgatgttttgccaccttaggccaattaagtctacctccctcccatgtggcagatgttagatcctcactcagtaagccagggctcaggttctgttgatattcactgtgccactataatactggtagagtttactactggcaggacgagaaggttgctgtagcctgtgacataatggggtctgggatgacagatccagcactttcctatggtagccacagcttgggagagcctaacaaacgcgttatgcttctaggcctctgcagtcacgtccttgtggaaaaagcagactgacaggttagtgccctgccccttacacttcctgcatcctcgggtattccctacctatgtgatagaggttgagctgagtgtagtgtcccagtctgactgctgcagtcccgagagtacccattccgcttgttgcatgacccaggccttttggcttcagtcgtccagtccgggaaggtttgtcttgtacaaactcgacatgtctgataaggttacctacctgaatggaaggatcaggtgttcctggtgccactaagcctagcaccctgatactccttggtcctgtcctgtatccctgtggatttcatagaagagaggcacccgggggacgtatcacctctagatcagagtcagaggggcctgtcgggtgctctggcagcttgaaccaccggccacctacaggatgtgcactctaaatggaaaaagaaaagacaatggttgggaacactgagattggaatttcacaggtgcagcctcatcaggcagtcacctggtccacctctatccacatcaagctcagcgtttttcaagatgtgtgcagtgctgtgtttcccttgattggagaacagtgcttagtgtccacactgccctagtcaggttgaggtgccaccccactaacaggctgtcctgatgtcctttattcagttgctttgtgagttgactggtccatcattcaatggctccattggcctgtggatgacagagtgcatggaaaacccactgtattgcatgagtgtgcccactgtcatgttgcttgggcagtgaggattttccttggtcagagtgaagtcccatggggtatccaaaaacataagtcctctcaagggcagctgtggtagtcagagcatccacatgagtggcatatagagtcccttccaacagcaagctgttgccatagcccttgtccccacacatggaatcttttaatagtccaatcactgctgccattcccctgaccagatggctaggctgttggcaatggcccatgagtcagtaaaaatgtggcaagatatggtggtaggtgggaggggatgtgccccactgttatggctcaaatccttagctgttaggggtcatagcccctctggtggcagtgacattctgtgccacaagccaccaaaatgtcaatgcctataaagcactcagtggtgggaaccatggtcactgacacctgaaatggcccaaaggcctccacccacaagcagataagcaccacaagcagataaacactatgtgtcaccgagttcatccccaaacttcctggtgtcaccagcttaatttttcccctaaaggaacctggaaattctgtcatgtggccttcagtatccaagaactcgaaagaaatcagaatttccatctttccccattttatttatttattttttttttgagacaggatctctctccattgtccatgttggagtgcagcctcaacctcccaggttcagacaatcctccagcctcagcctcccacatagctgggattacagaagcacaccaccacacctaattatttttaaattttctgtagagacgaggtctcactttgttgctttggctggtctctaagtcttgggctcaagggatcctcctgccttggccccacaaagtactggaattataggtatgagccactgcacctggccccattttatcttaataggagtatagagccattggcctctggtggggatccagagaccttgggccccattcctacccgtgccatacagcccaagacatttgggtttgcaatgtccctttatcaaatatattcatcaaccaggatgcatgtgacttccttggcctttctccatgtctaagactgtggtcctttagacttgagtctccctttctgtgacgggccacgttgtgcatgtgggttcctctcagatgcttcagggaccatgtgagtacctcatccctcttctttctcttaagtgccttagggtatgtttgggtccccaatcatcagccctggaaatgagcaatcacataagtggctaacaaccaagggatcctgtgtggcatttcagctccaccttactttctctctgcttccacccattcagccagctcagtcacatccacagggtgtgtttgcacgtgacctaatgtctcacgtatcacccctcctttcccataaaatgtccagttgcaagtccagcctctgcacccacaggttgacatcaccacctcctttcaccaggaaaacatggttctgttagactgaaccctgtttgttgtgtcaattttgtgaagcaggctcattgtgcactggttatcaacttgcctgagtccaatgagatggtaagatggaatgcccacacacaagttacatgaagtgggtttattacttacagattggccctgaggcacaacagaagcccggaattcattgtgagccaatctcccaaggctcaagaaagctaccgagggtggatggattctcacaagtggggcatgtgtcccacttgcactgcagctgagggacactagaaagcatcccacactggatttaataccctggggaccacatgacacgctgggcaaaagtgttgatggacatcttgtttctcagaggcagacaggaacagagagagcctgtgagctgttcttgtcagtccctctttatcgcaggatgttgcattcccagcacattctacagttattgttgagaacacacgtgagaaagagggaagaactgggcgagtctaaggtgacctggagaattgtcctgcagcttgttcttgaatgttcatatcaactttactcataatagccaaaaactggaaataaccaatgcccaacaatacattgataaacacattgtggcaaattcatacagtgagataccactcagtaatgaacaggaatgaactgcagatacttccaacaatacttgcaacatggatgagtctttagaatgtgctcagcaaaatgacaatctaaaattaattactaggctgggaacggtggctcaagcctgtaatcccagcactttgggaggctgaggcaggaagatcacctgaggtcaggagttcgagaccagcctgtccaacatggtgaaaccctgtctctaccaaaaagtacaaaaattagccgggtgtggtagcaagcatcggtaatcccagctactcgggaggctgagacaggagaatcgcttcaacctgggaggcagaggttgcagtgagccaagattgtgccactgcactccagccttggcgacagaggaagattctgtctcaaaaataaataaataaaataaaataaattaccatatgatttcatttctacaaaatgctagagattacagatttattatggagtgactgaaagcaaatcagtggttgcttgggatagggaagtgggagacactgactggaaaggacccaaagggaatctttagggtgaagccaatgttctatatcttgatgtggtgtcagttacaaggaagtatgaatttgttacaattcatcaaattaggtatactttagaagagtatattatatataatatatatttaatatattttaaaaaatatatatatataatttttttttttctgaaacagagtcttgctttatcacccaggctggagtgcggtggcacgatcttggctcactgcaacctccgcctcccaggttcaagcgattttcctgcctcagcctcccgagtagctgggattacaggtgcgccaccacgccaggctaatttttgtatttttagtagagatggggcttcaccatgctggcaggctggtctcgaactcctgaccttgtgatccgcccatcttggcctcccaaagtgctgggattacaggcatgagccaccatgcccagcctagaagagcatattttataaactacaaattatgcctcaataaagttgattcgaaaacagacataaaaattgttgtctcatatcaagcagagtcccatggaataaaaaaattgtcttggccgggcatggtggctcatgcctgtaatcccagcactttgggaggcccaggcaggtggatcacctgaggtcaggagttcaagatcagcctggctaacatggtgaaaccccatctctactaaaaatacaaaattagctgggcatggtggcgcacgcctgtaatcccagctactcgggaggctaaggcaggagaatcgcttgaaaccagcaggcagaggttgcagtgagccagaattgcaccctgcaccccagcctgggtgacagagtaagactccatctccaaaaaaaaaaaaaaaaaagttgtctcagttcatagcagcttgtttctaactattaaaagctggaaacaacccacaacccaaatgttcgagtgaatggataaacaaagtgtcacacatccatacaatgactgcaactcagcaataaaaagaagtcagctattgctatatacagcaacatggatgaatctcaaaataattatgccaaatcaaagaagccagacataaaaagagtgcatactatatgattccgtttatgtaaaactactctatggtgacagcagatcagtggtcgcttgagtaggggttctaggatgcaaagggaggattacaaaggagtgtgggggaactgtggagtaatagatgtgttctaccttgattatggtaatggcttcatggatgtgtatatgtcatgtgaatctaattgtatgcttataaaaatatacagcatattgcatgtcaattatctctctaacgctgtttaagaaacatgagacactacatctttttgttggaacagctaaaattagaaaaaactaacaacactaagtattggtgaggatgtgagcaactggagctctcatagcttattcacggggatgctgtgtaatacagacattttgcaaaagtttggcagttccttataaaattaaatatacacttaccccacaacagcaatcccagtacaagggaaataaaaacaattcacccaaaaatctctatgcaaatgtttatggcagctttgttcaaaattcgaatattggtaaataacccaaatatccttcaactagtagatggaaaacaaattgtggtatatccacagcatactcagcaacaaaagggaatgaactgttgatctactcagcaacatggaggaagctcaaaagcattatgctaaatgaaagaagccacatttgaaaggctacatactctgttattccatttatacaacattctagaaaaagcaaaactatagggacagaaaataggtcagcatttgccaaagtctggggttggtgagaatggattgctacaaaatgccatgagggaattttaggggatgatggaatggttgtatattttgattgtggtggtggtggtgatggttataaaactacgcatttgtcaaaatttgtagaactgtacactaaaagaggtgaattttactatttgactattttttaagtcatctcagaggtaaaaatgatcccttatgacttgcaagggttatgtaccataaaattagttcaaaagatctaatttgataaggtgttagatgagagctttcaaaacaatatcaactttattcttctctgcaatatatagacttgtataaatatgcataactgttaccatgtgttaaaatgaatctaaccttggaaatgttatctgaacaaatgggtcaggtaagatacccagactccaaacacaatccccatgtcttgtgaaaataacttcgaaaatgaaacttgtaattcttgatcaattgttatgttggatgtaactgacatttctatattcttaaaaggtataaatatttgtaggacttcaatgtcaaatcagtgagagatgtggtacttccagctgtcatacacatgtctgaatgattaaacacttatgactgtcagatttttaaacaaatatctgggtgtcttaacctaggccctctagaaagcagagcccaaggcaaggattaaagcactggtattttatttattatttatttttattatactttaagttctagggtacacgtgcacaatgtgcaggtttgttacatatgtaacaacccaaatgtccatcaatgatagactggattaagaaaatgtggcacatatacaccacggaatactatgcagccataaaaattgatgagttcatgtcctttgtagggacatggatgaagctggaaaccatcattctaagcaaactatcacaaggacagaaaaccaaacactgcatgttctcactcataggtgggaattgaacaatgagaacacttggacacacggcggggaacatcattcaccggggcctgtcatgaggtggggggatgggggagggatagcattaggagaaatacctaatgtaaatgacgagttaatgggtgcagcacaccaacacggcacatgtaagcactggtattttatttgggatatgtaagaacagagaggtgagggcgaggaaaaaggtaaatgaagcaaggaacgatgcatagcaatgtgatgtaatgcattacctcaccgcaggcttcacagtgagccaggaggacacacggagtgtttgccaagtgcatttacttagccgaacacatttgccagacaacctgtgtgtcttctctggaaggcatgcaaggcaaaaccatggctgagaggagttcacaggagggagacaggagggggcgcttgcctgccaggctccctcctgtcctctgcatttcactaatcaaggccctccagagggagctgactcctccatacttctggatcattgccttaaacctgtcagcagaagctcaaggggttgatggggttgatggaatctgagacagtgctctagaatctgtgtttcatacaggatgagatataaatgaaacaaatgctaaataatgacacaaggtaccttgccgagagaggaatcatccacctggaagggtaggctgtttgtgaataatgtagggtgggagagaaggctttactaaggagatgggcttaaagaatgtgaacgatgtgctcacagaggccacagaagagaaattatagccaggagaacaacctgaaagacaaaggacacggtggcataagcacatgtaacacaatgtactcaggaaatggctggcatcctgagatatggagtggaatacagtacagggctttgtaaactcagcttggagtcagatcacagaaagccttgacaaggaactgaaaatgggttctgaaggccagaagccattcaagattcccaaagggaaaaacacaaatcagcttgttttcaggacgtaattctggggcagttgctagaattacatcagaaaggaggttcacacaggatactagaagggtcctcccttccatagtagaagtgtttgtggtgaacaaaaattaaaatttcaaagatggtaactgtcagaatggagaaaaataaaacttaaatgtgtgcggcaggaggaaagtaaacaaaaaccaagctgactaaccaccttattacaaggccaccatgacaagactagagcgtccatcatcagcttttagtgcctcaatgttaagtatggacaaatgagcagtaaacatggtcatgaggtatttcaagaacacttctaagagcagagacagaggtataaacaagtagcggacgggaaagaaagaaaaaaaaagttgattcagggaacagaagaaatgtagaaataattgacattagagagataatgaattcattttctaatagca

SEQ ID NO: 442 - DNA, 57340 bp, Homo sapiens
aagggaagacacactgcaatatacatctggacatattttaaagatattcacgatagaagaaagcacaaattaatgaataaacaattggatagatgacgtgccttgtttgatgtgagaacacttaataaaaggttaaaattaatgagctaagggaagaaaacatggctaaaagggctggtagctctgtaagggtggggacagggcggggaacagagtcagggagacaaacaggatgctgggaggtgagaaataagggtggggagtagtgggcaatctcaagaggaactaacaaggccgttgcttatagttacccagaaaacctacgaacaataacagacaagcagatgcagctcagaaagaaacagcggagcagctagaagcccctcctgctgagacaacgcaccagacacgttaatggtgtttgggggctgcaggtcatctctcacatactcacatccacaactgctgacacctctgtttcccgtcgaatcaacagatcctggcaaaagacccccagagaggatgaatggaccttgatccaggagttttaatatattcctatctcttcagaaataggaacttcggctctactcattctagtttgctggcttttctatttttggttttggtgggttttttttgttttgttttgttttttgtgtttgtttttagcttttcttctttggaaaggtttgtcaagtaaatactgttacgtgtcattttgaagaggaaattccagttccaagaaccagcacaggtccaactatccaagcagtctttaaaaagccaaagagtcggccgggtgcagtgcctgcaatcccagcactttgggaggccgaggcaggcggatcacaaggtcaggagttggagaccagcctggttaacatagtgaaaccctgtctctactaaaaacacaaaaactagccgggtgtggtgggacatgcccataatcccagctattcgggaggctgaggcaggagaatcacttgaagctgggaggaggaggttgcagtgagctgagatcatgccactgcactccagcctgggcgacagagctagacttcatctcaaaaaaaaaaaaaaaaaaaaaaaaaaaacccacagtcaataaaagacgtttgccttctctcactgcccttgattcctagagcctccctcttcaccacctcctgccccgctagactcagcccccttcaaaatcccaatcaaaggactgcacctctggctctgaggtgctttcaaagggccaacttgcaaaactgtgcttcagatctgacacttaatcatacacaacttgcccgtttctttctttcttagcggttttttttttttttttttttgagacagtcactctgtcgcccaggctggagtgcagtggcacaatctcggctcactgcaaagtcgcctcgcaggttcaagcgattcttctccctcagcctccggagtagctgggattatagacacgtgccaccacgcccagctaatttttgtatttttagtagagacagggtttcaccatgttagctaggctggcctcgaactcctgacctcaagtgatccaccacctcagcctcccaaaatgctgggattacaggcgtgagccaccatgcctggcattttagctattttttaaaacacacttgtttcttattacaaaaggaatacatgctcattaaagaaaaaaactcagaatattgaaaggcaaagaaaaaatatcccccctactcctatcacttggatatgagcattattatcattttcatgtttttgtgtattagcaaatcttttttaattgccagggtgatgaagaactctccactgttcatgtgggagaaccatgtgtttaattttttctaggacagatcagcaaaacttccaaagcatttgtgaaggcagaatggcttgccaggttgggagaccaaggaataaaaggctgaagtcctcttcccagccaagtaccaggggagcctgtgcaactgagcttttacacggagggaaatgcttcaaacttcagggttttggaagtgtgggcatgcaatgcacttggaatgagcagaaaagaaaaggtggcaagaccacttccctagagcacagtgtacaccctgcctctttgctggcttagtcactaaggtagaaaaatgctcacacgtgcacatgtacatgtgcatgtgtgtacagggtgagagagagagagatgacatatgtatatatacatgaatagatgtatgcaccctttgcttgctgccttctgctctgcactgttggagctttatactgacattaaacttcatgtcatttttatatgctatcatgccactcacctgcttaaaaaccttctgtggtttcccgatgtcaaattccaattttctccacaacatggccttgactgacctctcctaccttatctcactccactcctaagtgacccaggttcctgttggaccctttgcctccatgccctttccagatcctaaaatgtgatttctagccccttctgcagccatgaagttctaacacagatatcacctcctccatgaagattttgaggatttcctgaccagatgtcatttcttttgcaagactgtaagctccttgaagacaaaaaccaaaccacacattactgctcatattttggacaaataaatttacctttttatccatttaattctcatatcattgtccttttctaaattttattcattatattcttggccgggcacagtggctcacacctgtaatcccagcactttgggaggccaagacaggagcatcacttgagatcaggagttcaagaccagcctgaccaacatggtgaaaccccgtctctactaaaaatacagaaattagccaagggtggcacacacctataatcccagctacttgggaggctgaggcaggagaatcgctggaacccaggaggcagaggttgttgcactgagttgagattgtgccactgcactccagcctgggtaacagaatgagattctgtctcaaaaataaaataaaataaaataaaataaaataaaataaaataaaataaattgtattcattatattattatttctgcattgtgtaataattaagcagaataatacatatattctctctaattccttgaatgcagggattatgtcatacatatttcttgcactatcacccccacccgagacctatggtaaaagttcaagcaatactaactgaagtagattaaattcaagatttaaatgccaataattattccttaacatagaggagagggatggaaacataaagagtccaccttactccaaaatagttgaaaaacagcctcattccaaaacaagggaggtagtttttcttactttgtgggtctcccattctttacttactctgactaccagcacaggaaaaatctaggtagtctccaactcagcaagaagttgcagtctctttgtatgtgtaggacattgatttggaaattataaataatttcgctttgaagtcatagtataaataatgttttaaggtctctgacaggtctccaaaagttgactgaaactcttaataaagaagaaataatatgttttcaataaaaagtagaaaataaaactactgacatattttacttgcaaaataaccaataaacaatgaaatacacgtgattttttttttttttcttttgagatggagtcttgctctgtcgcccctgctggagtgcagtgatgcaatctcggctcactgcaagctccgcctcccgggttcaagcaattcttctgcctcagcctccagagtagctgggattacaggcgcatgccacagcgcccggctaatgcttatatttttagtagagacagggtttcaccatgttggccaggttggtctcaaactcctgacctcagatgatctgtctgcctcagcctctcaaagtgctgggattacaggtgtgagccaccacacccagcccaagtgattatttttaatttgaataatcatgattcaaggaaagcagatttaactatagaaaaaggatatcttctaaccattctctcctggtggctatcttccatgtttctcagacatttttttttttttttaatggaattaagacatgacttgagggcctaagtcttactctgcccatagctctgagtaatttcaggatccacaaggaaccatgtttaacaccccagtcactcttttcactcatctcttcatcttcagggatcttctccactcccttctagttctcccacttccgcaggcactccctggaccgcaccatcccctaggactgcttcacctctaaatactaaacttacaggtaggtccccattctctgacaactcacctcctaaccttccaggtcactcactccattattcccaagacacccattcttcaacctatttggaatgtccagttcaccaatcccttggctatttctctacagccttattctgttttacctctctgagttaggtcccaagaaccaacatttccactgtgccactgtccttggattgcactgtcctgccaaacacaatccaagacaactgtccacctgcactagaaatgctgagagcttctggaggtgggagtggatcatacatccagtctgatcttcaccagaactcatggtcacctaactcaacctcggtatttcctggcaattctaaattagatggatggatagataataaaggtggaaacttgcagagatgatgcagagaatctccacaccttttgtaatgttttagagatggataattcttagactagcatttctaattttacttcaaatcatatagctttgttttcctttaaggtaaatgtatctgtgctgctcgtaaattcacaagcacatgacacttttctgccttggtagctttgtctgtcatcacacgaggaggagaaatgccctgggaagaaatagaaaagctctaaagtagattggaaaagaaataagaaatctcaagaaaatgtatttgtgtagcaggaagagactgcctgagatgggatatactgtgatgtaagtcacaaaagagaaagtggaggtttgcagtggcttgtgtccactagcccctgaatccatttcaacatggtgttattgtcctggggtagcttagctgtcatacattaattaacaaatacttatggaacaccttctacttctatttgtcagacactgttctagaagcttgagaaaaagtgaataaaacaatgtccctgctctcacagagctcacatcctaataagaaaaaaaggtagcaaataaacaaaaaaagaaagggggtttttagttaacgatatacaaaaaaagaaaagaaaataggacaatgactaaacaatgaatgggcatattagtccatttcgtgttgctgtaaaggaaacacctgaggctgggtaacttataaagaaaacacatttatttggctcactgttctgctggttggaaggctccttccttgcatggcagaaggtgaaggggagccagtgtgtgcagagatcacagggcaagagagaaacaagagagccaggagggaagtgccaggctcggttgttttttttttgagacagagttttgcccttgttgcccaggcagaagtgcaacagtgcagtctcagctcactgcaacctccgcctcccaggttcaatcgattcttctgcctcagcctcccaagtagctgggattacaggcgcccaccaccacacctggcttctatctttttttgtatttgtagtagagatggggtttcatcacgctggccaggctggtctcaaactcctaacctcaggtgatctgcccacctcggcctcccaaagtgctgagattacaggcgtgagccaccaggcctagcccaggctcttttcaagaatcagctttctccgaaactaacataggaagtgttcacttattccccatcctcagggagagtgttcatctatccatgaaggatccactcccatgacccgaacacctcccatcaggccccatctccaacgctgaggatcaaattttgacacgagatttggaaaggacaaatatctgaaccatagcaaagaggaaggggggtatgttttaaattgtgtggtcaaggaagtcattcctgaggaggcaacatttgagctgaaaacagaatgacttgaaaaaaaaaaaaactatccacatggaaacggaaacgttggctttctctcacgaatacaagatggctactacagcttcaagcatcacatcctcacctaacagcttccaaagcaggtctggggatttccttgtatcaggaaaaaaaccccagcacacttcccttcatgtcccacttgctagaactaggttgcatacctaccctccaaccagtcactggcaaaagacactgggattggctgggagtaaccagggttcctctgctgggaccaggcatgggtatcctccactgaggataggcttcccacacctaaaccagactggcctgctgtcagcaaggaaaaagcgcaaagcagctaccacaaagatcacacttgagattgtcatgtaggatttactgaacacctgaccatgttccaggcactgtgctagtgttaggaattttaaaaagacccaggcatcgcttttactatctcactctgttgcttaaaagcactcagggggggtaactccctcttccctcctcttcaccatttcaaagcccctggactgatggaggtatagttcactgccacttgcctccctatagcccccactcacctcttcagctcagaatgactcctccctcctcgcaactcataaaccacatttattcctttgacaaatattcattgaacatctgggccctgggaatacatttttgctgaaaagacaaggtccctgccctcatagagtttccagtctagtgccacagagagatcattaaatagccaactacaagaacggaaagtgttacaagaggggaaataggaggatccactcccatgacccaaacatctcccatcacgccccactagatgttaccagagcacctcaacttgtccaaaggtgcagtgagagaatacatatttggagaaaatgtcatttaagtcaagactgaaacgatgtatagaatttagggaaatgggagtagaggtcaggttgagaagacaaggcttttctacctagaaaaatgagcatgtgcaaagggccagaggtgggaagagagagttggaagaaaggaacggaaagaagttcagcgttgctggaaaagagtaggaagagagaagaggaagaagtgtctgtaatgacaggcagaggccaggccagcaggggtggaaagcttaggacttcatcctatgggaagccattgaagggactgacacgatcaggcttgcattttggaaagggcactcttactcccgtgctccaatgcctttttcatgcttcagcccatactacaaacaggatgacaggatgaccaacaagacatggtggcaacaggctgggccagcatagtggccagagagtgggtagtgaccaaggaggtccaggactcagtgaaacatgggctatgccctgctagcgagaagaaaggcttaggtgcttctgttggggttttgttttttttttgttttgttttggttttttttttttttttgacagagtctcactctgttcagtggtgacatgatctcagctcactacaacctccacctcttgaattcaagcaatcaccctgtctcagcctccctacatagctaggattacaggcgtgcgccgccatgcctaatttttgtaatttccgtagagacgatgtttcgccaacttggccagactggtctcgaactcctggcctcaagtgatccacccaactcggcctcccaaagtgctgggattacaggcgtgagcgaccgcgccccaccctgttgggcactttgaagaatgatggtgtccttcactgagctacccagcactagatagattcatttccgacaagttgcatttgagcagcttcccacagggcaccgaacacagtgttcactaattaactgtttaaaatggcttttcttctcctttgccgcctgccccttccatatcaaaaccactcccttcttatcttgggtcacacttttctccgacaggcctatttcgctcttcccctttgcgtccacacccacatgaacaaggtaaaaaacatggtttatgtgcttcaagttctcgtcactgtgtccctggagaaaaaaacgtacttttttgagcacctactatgagccagtttcaccagccattcctagcacggtgttccgctaatgcaaaccttaaggcagccaatcagccatttaatgatgtcagtgatcaataaatggcaattagtaattgacacgaatccaactctttttttttctggaatgtcttttattcattatgaagaaaaaaaaaactcacaccctttacattttaaagatgaagcttatgggacagcacgacgtcccatgagccggcgtcggttctgggtatcctccacgtggcctttcctggacttgcgttatttaaaatatgcgatttcactacttgaggttaccgagtactaattttacaatactgtgtagctacatgaagcggctcgaaatatactattatcactccgttttaagcagcacgatgtctggatgaagcatcaaagcgagatgggtcaacttaaagggcctttaaaacatcttgaagcaataataagccatacactgaagcaggggcggttttaaacattacacagaacttaaaacaatcgaacgaattcgtcctttgttctttttattacattaattattacattaatactgtttaaaaagaaactcaaaaggcattaaacttaggtaccaatctacacaaagtcctcgaaggggcctggcttggaccgaacgcgcttttgtgccgccccgctcgctcgcagcaccctgaaggccactgagcttagggcgctaggtccctagaagcgacttgaaatgagggggtcgccaggccaggccctcgctctgcaggggaggatccgaccaaagtttgccaagtttccaggcaagcccaactgcgcaaatgccgctttttagctccagcggcaggcctggcccgtgggagttttgccccaggggtctccgggccttcaaagaaaagtcccacgaggtggggggcgccgcctgggccgccggccagggggacccgtcgccccagggcacaaagaaagagcgcgcctacagggtgtcccctgaccccggcgactcggggccagggaggctcggcgcgccccagcggccgctcttcccctcccgaacccgcccggcccactcgctcctgcaccgcggccgcctcggctcggcttttctcttgcagtgagctgagtgcgctcagccgaggaggggccgcgccgcgccgcgccggccgcggggcccagcccttcccgccgcgcccggggccgcccttcccgctggagccggctgatcgatggccctggcagcccgcgccccccgcctcggctcgcccgcgagcccggctgtgtgttttggaagcagcgcagcgggccgcagccgtgtgacgcccggagcgggcagcgccgcccttccttccccccgggctcgggcggcggcgcggcggctgggccgggcgggagggctggcggggcgcggactccggggaggagggcgcggggaggggacgcgggcggggacgcgggcggggggcggaggccgcgccgcgcacgcccagccccacggccgcgccgcgcctcgtgggacaggttgggccggcggggcggcgcccggctccggggaataatgagtgtctgtcaggccgtccccgggtgactgggcggggcggggcggaggcggcgcgggaggcgggggtggcgggggaagggcgcagggcggggtgcgtgtttgcgcgagtgactcggccgacccctccggcggctgcctccacccaagtgggtggggacccgcccagcccgggcggccgcggcggctccctctcccctccctgaccctcccaccccgggtcccagcctctacttaccccgccagccccgggaggctcgcagagcgagcggcgccggcgtcatgtgactgcccggagttggtgccaggagccagaggggagccaggagcggagccgcgcggagccggggcccgagccggagcgcagcgagagcgcccgccgcacgcgcgcccgtccccgtcccctgcggccgccaacgccgcccggactggagccctgacattgctgcgctcggggggctccaggcagcccgtatcggggcctttatttctcgtcggcggcgccctgcaccgcgcctcgcaaagtaagtcccgtctccctcacctctgctccgcaccctggtccctgccgcccccctcctcggccagtctggtttcattttttctcctggagggggccgcggggaatgggtcgggggtgcagcgctggtgttggggggggcgcctgcgggcttgggaaagtgtggcggctacacttagccggggtgggggcggagagcaagcaaggaggagggggtcacgggttcgcggtgaaaagtgaggggttgaggcgaggcaccgtgcggaccccgggtgcgggggagcggggctggcagcgcccgccgccgtcccgggcagggcgcgggcgggggctcacctgtgtggtccccggcctcctcccgcccgctcacgattccctccaaagccccagaaatctccgtgctctccgcgtgtggcaacgttgtttggagaaaggtagcgccgcggccgcgcgctcctgctcctccccctcccggtgcccccccaccaccaccacaacccaggctcccgcgtccttcccctcccctccctccgcccgcgccccccgccgcccccctcccaggacacggcgcgcggccgctcgcccgccacagcaaacttggagcagtctcccggccctctggaaagaaacttagggcaattgggattggaggcagcatcccattctcggttctggagcccaggagctgccagggcgtctggatcctccggggcaggagaaatgagctggtcgggtttggagagtcttcctgggggcatggagagaacctgccgcagtgcctggagcaaggattgcagcgtggctgaaggcggaagacgccttaggcaactgcctgcagccgagcctgatggggacccagggacagatccctggatcaggacccatgggacctacctaacatttccaagtggctttcttagagatggcagatgagatctggaattgtcatattcatttttttgggcagatagctactgacaaggagaagcacttttctggtttaaattttatagcagtatacaataatactagaagaatgtgaatgagacttatttttaataagtcaagttaaacggaaattggaaattgctcaccttcttgtatttcactaaaataaacattttacacttaaccactgaatttcttactcagaatttatgtttccattaatatcacccaagacattttaaatatattgattatattctcacaagagtctggtatatgggaaaaagtatgaagtggtattctgacaagtacctgaaatgtgccagcaaaatcaagtggggaataggccagttgttcattataggtttttccacacagcagttttgtgctatccttttctgtacgaatttgaggagcatttttataagagaaattcatctggatgatctgcctcaccctagggaagaagacttgcttttaggggaaaaaacaatctgctagcattaatatctacaaattttttggagttagtaatagtgtttaaggaaagtgtccacgagtgatttcttctggtttgaaaagaggtatgttagttgaccttaggctgttaatagaaacctgaaattagatgttcgattaaattaaactccctagagaaactggtatcttcatttctgcagtcagtgggctttgctgcagaactatttattagaagaaaaaaacctaatgtactatcggtaagttcaatgatgatacattgtaaagaacatttagcttgcatgaaagggaatgcaagtacaaaaatctcaacatgggaataacaaagaaaagtaactgcttagaccacaaaaccttgtcaggtacaaaacgacaacagagttttgcagaaagctattgttttattcactgcaaagtttctaaattaaaacccaatcttcttgttgctatgggcacagtgatgctctttttttcctttttttttctttttttttttccttacctgtacttagtctgcacacaccacattcttaaatctctgataacgtaagcttgagttaaacagtcctggctaacaaagtaaagagaaataatgggaaaggaactgtgaatggattttactatcttaaaaataacccaaagggaaaatagacattttagaatgacttctagaaattagtactctggtgtacagattgcataataatttttagataaatgtcaggaacagaatcacattcttaaaaggcgaatttctataaacgtgtgtatatgttgaacagatgagcagctctgcaaagatgtgtataactgcatttgaaaaagacagtgaaaattttgggttactgtagatgtcccacagtctgtcttggaatttagttctgtgactaaaggaggcttacagttgctccaattttggttctgtggggtaccccaattgtaatctgaattcctaacagcagtgctctatcttttttcctcttgatgcactgaggctgaaccataatcattaccctaactcggaatttgatctgagctagggactagccattggaatggggcagaaagggacaaaagaaatcaggagggaggctagtgttcattaggaaggtctctgctgcttgaatatgataaaatcacatttcacttatgatgtttactgtatgtggcagctcttatttgtaaatagggcaggtcccctgtataaagctggtgttattattcacacccgtagaacaaacacctccacccccctgttgttgtcttaaaaaactccagctgctcatgaatatagggtcagggagggccggctaaatgtttctctgtgctttctctccagcacagccagcagagctgtttcctgttctttgtttcaaggctggggtttgcgtcatacattccaagtggcatatgtgtgctctttcctgtttcaggctgttttctggtagatcagtagcccagaccaggctgaggtccctgcccctaaactccgtatccccacccatggagttatcatgtctctacacacttgatattgcttaagacgcctgtgttatgtcataatgagaagtcagttaacctttttacgtacaccctttgctccactgcatttgtctgggtgaataaatgcttttacctttttaaattttttattgctagattgtgatttggggaaacgtgggtccatcctggcaaagaaacctaaaggagttttgtttgtatttgtttgtaattcttgtgttgaagtggttagggcgtttgttttaagataggcattttgccctgaagctgtcaattttggatcaggattaacaccttacagtttagaagacctagcattatctgaaagatgtggcccaccctcgttcacgtttaacccaggctgctccaggtggcttccgtggatggagaatttaagcaatgttggcagcctggctttagtttaagtcttgcttatgtttggaaggagaaatctttagaaaaatcattgaagcaaagcctaagacattgagaaaatcccgggattatttctttttaaggacaaagatttaaatatcaggataatgttttaaggacaaagatttcactgtgcaatattctacacctcatttccaacccgtttttaagaattaaaaagctcaaaggagaactggcattaacaaattcatttaatgctagattgtttggaaaattttaatcttctattttgaaaacaagaagaatgctcttctcatttttgttttacaataatatttttcattttttaaaaatattctatcagttgtgggttaatgaatttctaggataactatttaagacctgccttaatattagttttctgttggttcttgagaaactaagatttaaggaaatatttgcttgaaaaagaaaagttttggaaagtgcttttgtaaacttacttggggattttttttttttaatcaaaaggaatcatctacagcatctctgtggaattaatttaaagagttgctgaagcagcaaatcaggctctcttctccccaaaattgatgataatggtgcgttttaaatgtcacattccaccacattctttatgtataaatggaaaatataaaatatgatattaagagagttattagtatcaaatagttggctactgataaccttctatgaaaaaagctgggagttttagaagtcccaataacttctttctcctttgggaaaagcagctggaaatacttagctgacctgtaggacaagagacttttaagcttaaaattcataagtaactccaatcgaagcaggtttttttgtttgttttggttccaaagttgttaacaatctaactaggtttggtaaacagagtctttatttggctttccccaaattctttcttctctcttttgcagggagatgaagtggttaatagagataattagggtctaatatattctatcagaaaaaaattctgcaagcttctaaatgctaagctgaatagttggggaaaattatcctatcttatagttgctatgattaccagaaagatgggaacaagagttttaatttcttaaccatataaatcatgattcctaatttaatttcattgtgtctccatcgccccttgagatacttgccttcttaatattttcaaatcaacatttttgctataaaacgacagatttcttaggcagcatttcttgttctctgttttcacacccagttgagtttaagaaaaataaaatacacacaacctcattctttaaggtactaggaattacaattacattattctggaacttggattctttctgaagtgcatcatttatcattggttctagctttttaaaaaagcaaatccctagaatcttaaaacaattgatatctagtttgctagtatgtgatattctagtcagaattcctcttgggagtgagttggaagagggttatggtggtcgctagcattctcattttcaagaccactctgttcctttcttagaccatgtttctcatcttaagcagtcatgcccgagctggagacaggaaaccagacagcagtctgccctgataagggacagcattgtctgaaggcggggaatagccctgcttttacccccaactcagctctctttgcttgaaatttagtagtcatagaagaggcacaatgctgttgacagtttctgaaccaaaactaggattcatttcttccaaagcaaaaaaatagtgtcctcggccgggcgcggtggctcacacctgtaatttcagcactttgggaggccgaagtgggtggatcacctgaggtcaggagttcgagaccagcctagccaacatggcaaaaccccatctttactaaaagtacaaaaattatccgggcgtggtggtgggcgcctgtaatcccagctactcaggaggctgaggcaggagaattgcctgaacctgggaggtggaggttgcagtgagccgagattgtgccactgcactgcagcctgggcaacaagagtgagactctgtctcaaaaaaaaaaaaaaaaaaaaaaaaaaaaaagatgtcctcttaactggccttgtccttattctgtaatgaatgtgaccatattctctggaacagtaagaaaataaaaaaatgatctgtgcattttgtatccgttggccagagagtttgtagtaaaattgtttctttagcaaaacaggctcctggaggtttttgaaactcactccattgtgtcggcaggctgaattcattatcatttctccatctaattatttagaagggctggagacagaagagagcaagttaagtggccctctagcccatgcatttcatgtaacccctgggtctggctcttaccctgtttcctgtaagggggcgctccctgaggcagaccctttgcaggaggacccagaattgccctgcttagtctgggacatcctcaggatggttgccagtctctggaaggcttgtggatcctgccagggatggcccagagctagtctcaacccaaatcagtggagtttggccaaatctggacataagagatcaaatgagtattgaggtcagcggattctgccctggagagcgacctgcaaatcaagtgtggggttttttctctggcctatatgctgttctttctactaccactgttgtttaagtgtaatcactgaaatccactcctttatctgttcctgtactttgcatccctggtaccttccaaagcttcacactccaaagcctctttcatttgtaagatcgagttcctgttccgctgagtttccaaaccagggagtttttctctcccaggctcccaaagttttcacatttactttgcattttagaagatgaggtttcaggctggcttcaccagccgctggacagagtttccatgtaggacacctggtgtaccatcattccagggcccttgcccttaatttatcctagcatgtgagaagtgtagtttgacatccattcatttattcatctcacaagtatttattgagtacctacttattagagctaatctcaaattatgtgcaatcattactctgagttatgccataggatggagtagatctacagtgatctaacctgaaaaggcattttgaaatcttaattgcctgctggaacctccccctggcactgcttcccatgggccagtgtggctgtgcacacccacaccctccctactggggaaagaccccagcattaggcgattttacctaaaagtcggtcccacagcacaggctctgaagcagaacagaaagtgcccgggtctgcaggcagacacgcttctgttcctggctgcagctccaaccagctctgtgaaattgggcgagtcatttcacctctgttcctccatttcctcatttctaaaatggggatgaggacctgacccttccacctttgtgcagttattatgaggatttccgtatttacttgggtcaagctgccaatttttctcagcagttatatcgacaatgcaggtgcactggctaggaagaataattgcctaatttggggccttcagaatgtgtcttttgatcttgcatccaagtgtgcgtactgagacagggtgggcagcaggggccagttggaaggagtggaaactgtcactaatgtaaacagactgtccccacgttctgtcttctccggggaccaacctgttcacagaaatcactatcatgtacttactgttggtggtgtaatgttgtcctctgcctggggaggtggaagagtggtgtgccaaggccaccagtcttaagtcagactaccttgggttcaagtcctggctctacgagttagcagctgtgtgatgttaggcaggttacttgacctctctgtttcagtgttcttttcagtaaaacgggaaggtagtaaccacctcattgacattaaacagcgcctggggattgccaatcacgaaggtggtggtgattggcaggaaacctgtgacatcacttagccccttgccttccttgatcccttttcaaaaacctgtgtttgtgcacacaccccttccccttgcagttcccccccacctgcctcctctcctccctttctcgctttcttttttctattttagattttaaagtacagtagagacctcgacactagacttgtttagaagacctcactgagtggataataataaattatttgaagatggtactaataaggtctctggagtacacatgatgggccaggctaaggttaggggcaataacttttccttaggaagtttggtttactaggtctcccttagagttaggcccttcatccctattacttgtttaagggagatttcaagtgcattcagagggaaagggagatgattgtggaactcctactataagctaagtgctcttatgttagctccttaggcttgacataaaaacttcattcagggaacaagcccgatctcctgtggggagtggggagggagccctctcaggaaggctgaggcctgcctgtctgtccttcccagtactggtggcggtgtgggacgcaccactgggaaagctaagaggcctagactatctaggtaagaagaggcggccttggatcccccagggagcaatcagctggctgcacagagtggggagggccttgagctggtctttgaagaattagggggatttagataagccggaaggggagggggcattccattgccggttgcccagcatcagggccaaaaatgaacaaaggcctgggggtgggcagggcagccggcatgaagggcacttgttggagcagggggcagctcgtgggtaacggggtgccaagcatgggtgcctgagcccactgtcagacccggggagtgcacgggagggaaggttgtgagctggagaaggatgggatgagaagagatctgtgaaaaacgtgggtggcaaggggtgagggctggactggagaggctgagggagaccagtggtggaaaagctgcagcaatgcaggtgggaggcgctgagggcctggcccccaaggcaggaggggagagcaaaggaggtgaggaaggcttcagagatggcctctaggtttccatggtgaaggaccagaaaataaggccaatgggaggcggggagggggcagccttagaggcaggaacaaggaggggtagggttggtttgggccacgttgatagcagtggttcaaaatgcttttctctttcttttctgcttatttttaaagggagagggtaggcttcgctcatggttttgtatccaaagtttcagtggctctctgggaggaacttcagtggagaatcctcaggagcagaggaatgatcacagccccatggttccttctggttatttttaagattctaaccatccctgttcaggccggaatttccaggaactggctgctgcccagcgccaactggtccctcccaacctcccactccctgcagggtggggccccatgggtggaggctccttagggtggagttgggtgggtctccagtgatagggagggcactgagcagaggcagatgagaggcagtgtggcctcacgcagcccttctggatttgattatataacacttcatagaggagaattgtgagggcttaggcgaggccttgtgagatatgtacacagcaggattagacattatgggtatttttcaatttatcttgggttgcctgcccttaaaactaaaacacaaaattgtcagagagcataaacaagtgtgtaaccctagtagggaaaatgattcgagtttgctgcagtttctctaagaagggtgtggaatgccactagccagatggccttgaacttagagggtagcataggtgtgggtgtccccgcccccagccctgctttgctaggcctcagtttggaaacttgtcaggcttctgcttggttgttacctttgcacctgtccttattgacatgcaaaatcaattgcttcacttggtctttccgaagtacagggtgtgggcagaatcttatctgaagccatgtcctgtttggacaagttggacttgccttggcaactctccatagggtggagcagatgggtggaggcaggaaagtaaaattgggtggcttgttagcagagagaggagagagggtgggttgtttgctcactggatcattatatttcatctgaaatgaaataattaacttctttcccatttataatacacattaatgcaaaataactaattcatgaggggcgaagatttagaaacaccccatggaatttttctccttttcaaaccagtcatagaagagtaggacaggtgaaaatcacagagtggcatgaaaatttccaagaatgtctaggtaggaaattccaggtaggtgccagtgcttagctttgtttcagggagcctccagcttaaaaatgcctgctgacatctgttgcctgtcccctgtatttctggctagggcaactgtccttaaataatacttgagccattgggggattttgaagaatttgggtaaagaaacgaagagagaaaagtttctctggaaaggaagtttagctacagggatgttgcttgcctgcccagttttcctagccaagaattacacacacacatgcacacaccgccttttttttttttctttttttgccttaagttcctttggggagtaagggtaggggaagataacatgttttctctttgaaaaatccaaaaacttagaagagttgaaagggaggcttagcgatggtgtgttagtgtattgctccgtatgcctagccgaggtcagctgggagacggaagtttgcttggaggaaggcaggtgatttggagcctcggggtcagtcctgggttggggaagataatgcaggcaccctttgaggatctgtgggaagaaatgagggcatggagaaaggaagaaatagggagatgagaagggagaacgtcagaggcaggtcttgctctaaccccaagaaacaggaaactgctcctgatacgtacacattctctctccaccttcctcctccctcaggaaggggcaggcagttgtctgtaaggtcgtttctgtaataaatcatgctctagcctccaggcaagctgctttcagaggaggtttagtaaccccctaacctcgtcttccatgaaggactgtgtgtgtgtttctaagccctgcagctcacctgcagccccgctccccactccataaagccattgtgcataggtctcagacaccactggatagggctccaaagcaggactgcattacttctgaaacttcatgtcaatgattcaccaacccttttaatctataatcacgcagtcttgcattttgacagaaatttgacccttattttaacatctgaaaagtcagaagtgcaggtggaaagagcatgaagggaaatctgtttctcctttttgaggaccattcatttttattggcctttctctgcaaaataacacagctggggaagatggcatttgctccagttatggaaaattattttggcggtggtgatgttcctgtatatttttgcttttaagcacctcaataacttagaatttttcataaaaacaattttgcccttccccccccttttggatgcagttttgttatcctggtattgcttagtttagcattagaatgtatttctaagactagctaatgtatttctaaagctagctaagctagttaaatataatgaagatgtaaatgtgtttatgattggaaaatagtcgtcagaaaaaaatagaaccacatttagagcctcctcttctctgtgatacccacataaaatgattaatagaattcctgagcctggttaaaacccactaggtttaaagaccccgaggttggccaactggattgatttactgccggtgtcctggtctctaatgcctgttttagtgcgccacctactggttctgcttcagattgccgtcagtactgtatgatagattttctaagcatttgtggtttacttagcattctttcagaatggtaataaccccagtgcactgagccgcccatgggtaccaaagactgccaagtttagggaccctaattcttccagggcttaagttacttctcagttatgtggaaggcactttgaagactgtacagtcactcttttatgattgtagatcagaacctgtaaacaaattagtaccaatgacaaaagtggtccctgtagtcagagatatgggtgcaaagtatagaaattttttgcaaatacataaacagaagcctcatttctgttcatgtgtttgattctgtttctaaatttagttccttcctagcttggcttccctatcttgtctttgttaaaagttttgattatggaaataataaacttggccgggtgtagtggcttacacctgtaatcccagcactttgggaggctgaggcaggcagatcacttgaggtcaggagttcgagaccagcctagccaacatggtgaaaccccgtctctactaaaagtataaaactaagccaggagtggtggtgcatgcctgtaatcccagctactctggaggctgaggcagaagaatcccttgaacccaggaggcagaggttgcagtgagccgagatcgttccactgcactccagcctgggtgacagagtgggactccatctcaaaataaaaatacatataaataataaactttaaaaatagaacacagatgtgtagaaagctgtcccacccaccgccactcccaagaagctcctgttaacagtttcgggtgtgtggttccagacgttttctttgcatgtcctttatcttcttgttttatatcctgtgactatcactaaaagcatcatcatttaaaagctattatcagaagctaccaaattggaaacaaagtgcttgtagacatgtgaaatagtgagtttgattctattctttgtgatatttgaattttgcacggactttttttttaatgtccagggatgcattatttagttaggaatttcaaaaataggtattctaatcctatcattccttctttgtttattaacttaaatacttctgtaatgagaacatcccttcatcaacatttggattactttgaggtacatttctgggcaaataaacatacccttgtaattattttttagtaaaagcaaatcaggttctgttagtgccagtgtgtttttttttttttttttttttgagaccagagtttcgcttttgttgcccaagctgagtgcagtggtgctatttgggctcactgcaacctccgcctgctgggttcaagcgattatactgcctcagcctcccgaatagctgggattgcaggtgtgcgccaccacacctggctaatttgttgtatgtttagtagaaacggggtttcaccacgtcggcaaggctggtctcaatctcctatcctcagtgatccacccgcctcggcctcccaaagtgctggaattacaggcatgagccaccacgcccagtcagtgccagcgttttatactagactatgtttctcttaggattacaagtcttgcatttccttaaacttagataaaacaaaaaattaaagaacaatagtgatttaaataatgtcttaatgataaaaagatgtagcacattaatgtgtaattcatttctaaaaggattcagtagtcgttgctgtgggcattagacaaagtcattgaaagctatgtgagctaaatggtagacttagaatttgaacgaaaaggaactccagagcccatcatcttaatttattctgctgtgctgcaattagtggtcgtaaagcgtgcaggatgacatgaagtggggagatgctggcctcgctcagaagctgttgttgcagtggtacagttgtgaagtgacaaggccttatatgagacctcatacaggatgtaggcagctgttaactttgaaactgaatctagtcagagttttatttaagggtgggggatagacctctaaggctagtgtatgttagcaaagaggcaaacgccagacatttttgctccggaagttggaaccaacacatttagtgttgtgtgtacagaatatacatccagattttatgtgcatatggatataaatgagggcaaaaggagtgtgtgtgtgtgtgtgtgtgtgtgtgtgtgtgtgtgttttaatctcacttgatagacctaaatccttgagaagcagatagggagccatgctctgcattttacaaatgatcactcttgccccatggctgcgttagtttgcagcctgcttgagtctcaaaaccatggctccttccttatacacctgagaatgtgaatgctttaatttagaagcatttgcatcaagatactctctagtgggatagatgagtctggaagagtgaattcagtgtaaaaagctgggggtgaggaggtgggaggctgccacagggtgaccagccgtgagtcagggctgctaaatgatctgacctcattgatgtaagcaggagatctcacatcttttgtttatggtccactgtgaggcactggacaacaattcttagaaccatgttcatccgtacagctgctagtctgggaactgcttaataatagatcccaagacacaaaagcgttttcatccctcattacgaaatcatctatttttcactggctgttgcggttagttcttgctggaatacataagagggtagtagcactattgatttgagcagcttggtatcaaattgtgtttgcagattacaatacaccctgtgatggaggaaaatataattttgaagtcaaggccttatgtcgagttattgatgaaattcgtgtgttgtcatgagattcaaaacaggctttcttcaatgaatcaacgaagcacaagaacgacatagtatcacttccatcattgtatatgaagatatcttagtataacccgtagagcaccaacacaacaaattataggattgctatcatggaggtggggatgggggtttttaacactgaaatacaagaaggaatccagaacccgggattcctgcagcttcttcagctggaactcactctagaacttgttcactttgccactcaaaccagggtgatctatgaagaccttacctctaaccaaagcactgagcacttaaaccaaatttggctaatgagtgcctgaagtcgatttctgaaagtgtgtctagtagcaggacagtgtttctgtaactgaggagacacatttgaacattgagcagactgaatattttgtcctgtgaagaagcagttggcttgatgtagattagtgttagaagtggactgtacagaacacagaagaaaatagaagggatggcaagcagagaacaacagaagaaaaagacaggacaggatcaaggtggacatttcctttacaataggctcatttcctaatgaggagaaatctgagtgaaaacaagctaatattcttcatatgtgaaaagtgcttagaaaacaataagaagtggtggaggctgtcaagccctaagtaggcatttctcaaaagaagaaatccaaatggtcaatagagctgaaaaaaaataacttcaataaccaaatcaatttagaataaaaatcatttgccatcttgagacttaacaagttggcaaggtgtttatcttttataacacaagtgataacacatgttgctggtggaggtttggggaaacaggttgtattttattaatgaaaataatagttcgtctttgccaggtgatggcatcaggcgctttgggaaatgtatatacttctcacccaggaattcccctacagaaaacttatcctaaaaattaatggtgtgcaggaggatatatttaaagaggctcattgctgttcgtaatggcgaaaacttagaagcaaccctaagtgcctaataaagaggaagaagttaagtaaactgatgtgttcacacagtggcacgggggatttgatggtgcagaaccatacttggtgcagaaccatacttactgtaaaagaaacattttcacataaattgttcagtgaaatgataggtactaaataccatgtacactatgagcccagttttaaagagggtttgttagaataaaaatgaaattttaatgatggttggttctaggttttctttttgctcgtctttttttcccctaatttttctgcgaccaacatcggggaaaagggaaggtgtttaacggtcatatgtaatctgaacccctaaagagttgcacggcaatcccaagcaagctttggcgctcagaaggggctgtacatagtgttccagaaaagtcagggtttctgtattgagttagaaatgctggttggctctcatctggttatgaccatggagtctggttttaattatgtaaatggcatctttcataggtaagggaaacaaattccagccattccaggggtaggggagaaaaaggagtagagaagtggggtgaggtattatatttcattttattatttatttatttatgttttttttttgaggtagtgcctcgctccatcacccaggctggagtgcagcggtgccatttcggctcactgcaacctccgcctcctgggttcaagcgattctcctgcctcagccttccgagtagctgggattatagacgagtgccatcacgcccagctaatttttgcatttttagtggagacggggtttcaccatgttggccaggctggtcttgaactcctgacctcaggcgatccgtctgcctcagcctctcaaagtgctgggattacaggggtgagccaccttgcccaggctatattttatttttactagtttgtatttaaagtaaccttgagacttagatggataccttgttttgttttctaggccaaacaccagagcaccctagaaggtttaactaaaagaatgctcatgtttgacccagttcctgtcaagcaagaggccatggaccctgtctcagtggtaagttttccaagattgaacacctcgccttattttttccaagtgatgataacattattgtgtgttgaattattccttgaaatcatggccgggcgtggtggctcacgcctgtaatcccagcactttgggagaccgaggcgggaggatcacctgaggtcgggagtttgagaccagcctgaccaacatgaagaaaccccgtctctactaaaaataccaaattagccgggcgtggtggcacatgcctgtaatcccagctactcgggaggctgaggcaggagagtcgcttgaacccgggagatgtaggttacagtgagccgagatagcagagatcgcaccattgcactccagcctgggcaacaagagcgaaagtccgtctcaaaaaaaaaaaaaaaatcactcattgcttgacaggcatttcataggcaaacttttctcaacgccaccaggtatgagtgagctaaatactgtcctagcagctgtggatcctttaaatgggatctgcgcttccttaagacccgtgcccggtgtccccctaagatatgatcagcatagaacttaggccacaggtgaatcctctcatgacagaagtaagtttacaaaaattcctcagcccttttgtgtgtaaaaatatattaagaataggatgatttgcttaaaaaccaatgacaacagccatatggagctgtaactatatgagatgactgagggaagccagcgagagaaagacttggcagtgaggacggaatctcgtttacttggaagagtctggctgggtaggaattacgttcattgtccttttcagcaccttagcgctaagccagcccctcatgggagccaggccactggctgcttttaggccgccagggactagtgaggagtctggggtttctgcaggtacaacaccagtgccatgaaggtgagacatggtgacagaggaaggtgtctgacttcagagcagggagtggtttcaacttgaggattctggttgagtgaatattgaataacaaggcaatgctcccactctgtcttgctcttttcttccacgggcttggaaaatattcacaagggggaaaacttggcccgaggtgtgtatctgaaggttggtaatgacacgcttgcaaaattagatcatccttgtgcatgggctctggaggttcctgccaaaaatgtttatacaagacacgggggtcacgccgaggcccttggagctgagttgccatggatattactaagccagtaaagtgtttaccagtatctataatgcaagttaagtcagaggggctttaaggaaataacatttacattccagcatgataactgaataaccaagtgtctgaatatggtagcaactgagcaataaggattttattaatcaaaaaactaaattactttttgagatggagtctcactctgtcgcctaggcgggagtgcagtggtgtgacctcagctcactgcaacctccgcctcccaggttcaagtgattctcctgcctcagccaccatagtagctgggattacaggcgcatgccaccacgcccggctaatttttgtattttcagtataggccaggtttcaccatgttggccaggctggtcttgaactcctgacctcagataatccacccacctcagcctcccaaagtgctgggattacaggcatgagccaccgctcctggccaaaaaactaaattacttcgaatgttattcagtgctgtcattgtattcatcaaatccccctccccggcatcactacatgatcacgttagaggaaaatgaaggtataaaatttccccattagttatattcttgaaataggaataggtttttagcactggagaatatgattcattttacaattggtgcagagccatcagtgaggcattttactgttcaatgtacctccagtgcttttaatcaagcatgaacataaggctcaagagtctaatataaagctaaaatgaagatccacattgctaaattggtgtgatatatataattaagtgcaaggaaatgcacttaaccgaaaaaaaaaatgtggaataaaatgaatttgaagtaactgttaaacttgtattgttgtaacgtagtaatacatgaagttaaaatatgtagaactgattttgcagttaatggtctttttctccttcatgtgctagatttcaactgcagctgacacttttagaatttagtttcaccaaaagttactgtcagtcctttaaaatgaaggtgtttttttttctttttctttttttggttttaactttcttcagcaggaagtatttttttcttaattcagtgcaacctcagttaacagaaacatttgagcagtggggtgttaaaatgattttacttaaacaaattaaaaagcttttgtttccactcttaagtgttcaaatttcgtctttcctgccttcataggtgaagtatattgaacctaatttattattcctttttctttttaattcagtctttgatctgaaggtaaaagtctttcgctattcaagtcaacgttgtaaacattaaggcacaataggacatttgtaaaagtatttttaatttctatagatgaataaaaatattttatggtaacttatttctccccctcttcccaccccctaaaaggatagcacagcagaaacaatcgcttgtttgtgcttttgctataggttagagaaagtgaggacatgtcatttccctcttaatcaaatataagccctcatactgttctccactagccttgtgctttgaggcttggggtcaccctgttaaaatttgctagaatgaggaacagaggagactctccctccccaagtctgtgccttcagtctctgctacttacatccacccagtgttggcaaaatcaccagcagctccccgagcttctgttttttttttttgaaaaaattataaaatatgaaactgtgtgtaaaaaaatgcgcatgtacataaatttttttttttaccatttcccaaaagattgaaaattaaaggatttaattcaggaagtgagcaaggaaacaaattgtaaaaaaacaaaacaaatcaaaaaacaaactttaaaagtattcttctattcctgtggaaagattacttttgaagaaaggattaataatattctgttatcttcagtcatctaacagactccttatagataggaaagtatgtcacatcagtaatttcctctgctcttttctaacagaaacttttcatggctttttcaagcctggtggaaagagagctttctacctctgtttgcatgggggtgcatgccatttgctcttcccagagtgtgtgtttatacacgcaccatgccttcctgtgcctggaaccctctcttggatgaagattcttttgacttgacctgtaatggacattcactttttttcatgttgaggaatagtgaaatagagatttcatccatgtttccgtcattccgtccactgaaactgtcttataatggaaagctcgccaaaactattcctcataaaatgagaaactattgcaattatcaccttagcataaagtgatagagctttgggaaattatccaaacatggtacctctttccctgttgcaattaaaatcattttttcaaagttcaaaataattagtatattattcttcaccttatcagtaataaaaacctgctaagagagtgtgtcaatttactacacattcatcaagtattaattgagcacctattgcaggccctcatcacctcacagtgcagtgagaagcagcagtcaataagtaaatgcacactgtgcaggggtgtgaacatctgagtacatgttacagacggaaataactcttatagcagatcagtggttttgtggaggtttttttgttttggttttttgtgttttttttttttttttttttggtttggttttggttttgagacaaggtattgccctgttgcccaggctggaatgcagtagcaagatcactgcaacctcaaacgcctgggttcaagcaatcctcctccctcagcctccccagtagctgggactacaagcaagcaccaccatgccccgctacatttttgtttttttctgtagagacaggatctcattatgttgcccaggctggtctcaaactctcggccttaagatatcctcctgcctcagcctctccaagtgctggagttaaaagtgtgagccaccatgcctggcccagcccattgttttaagcccttaagatccctagtgggggccagaggcagaagcgggaaagacccatgtctgtgtcttgtctttggactgctctgttccaggacacagggtctcttggactaagcagcatgcacagagggcactggaggtccatccgtggccagaggcacattttttgcttcatcaacatttgtctctgatttggatatggggccagtacagccgtgcttgtatgcattgctttgatagaacataggaactgtctggaacagagcggggaagactgttaccaggttgtacctgcccagagcacacaccctgccgtgtcagtccctacacggcaccagattgttggaagctgattgcaaaagcttgtgtgtgccacccaaataaagtgaaccagcttgagggaccacatgtcttcacccttttgtgaggcagttgggctggaaacagttaattatctgcccagagttgggtgtctgtgtccaaatgtgtctctccccacagttagtcttgtaccttacaataatcgcacatccaatagagggaatgagggcattcatttgagaacagacttatcagcaaactgcataatgttgataaagcttagctttatgtgtggctttttctgtcttaatggcttgagaaacctgagaatattattagatttgcaaatctggaggttctaaattcctactctcccaaaactcaccccatgcatagaaaaatccagcaatgacagcaataaaactgtgtcctcattttgcttcccatttagctgccaataactattggcattaaaatctaggtcatagggaggtcttggaagaacagggctgaaaataagggagaagctacattttcgtcaatagaaacaatgctgcctcccatttcctaaagttttttcctagtaccagaaccattgccctttggagaattatataaagcacattagactttaggactaggcgaaatcattctccttcctatatttaattactccctgaaaccctccagtgtacatgatttataatggatttattttgttgtgttgttaatgaaccttgtgcctcttttaataatacccatcttaatatttaaatttaaatctatttaatacttaatgttgctatcttttggatctcttgcgttggtactgtgcgtgcctggctttaaagaaaggtagagaatcttttcttcatttgatccttgatctataactcaaagctgtttttatgcattttgtgttttctgattttatatccttcatgttcttgtttttaagcagtattagtagtgaaaactggctgcgcgtggtggctcatgtctgtaatcctagaactttgggaggttgaggcaggcagatcacttgagcccaagagtacgagaccagcctggacaacatgacaaaacccagtctctacaaaaaaatacaaaaattagcgaggcgtggtgtcatgtgcctgtagttccacttcctctggaggctgagttgggagaatcatatgagcccaggaggtcgaggctgcagtgagctatgatcataccactgcactccagcctgagtaacagtgagaccctatctcaaaaaaaaaaaaaaaaaaaagaaaagaaaattctttttccctcctttaaatagacctttagtatctttattttttatctctgtcatttagagcattgctattcaaaaggtagcctaagttcccttggtccactccccggtaattcaaaatttgcattttaacgagtgctccagggagatggatgtgcacagtaaagtttgagaaactctggttgggagcagtagagcccgtgacagtgagcatctcttgtataagcagggacaagaagggatttccaggatggcatgtgtataagctcgttgtgtaggttatcccataaccttgatcttaaccatgaggacctgacatccaaaccagataaagataaacacagttatgtgataaagtttcactgactgactcctccctaacaggctgctctgcaggcctggagcagggactgggcatctggaattttaaaaacaacacagatgattccaatgcataaccagccgaggattcgcccagaccaagcccagagaggaaagagggtgatctcagtaggaatccctatcaaaaccactgctgccccacagtcataactcacaatagtggccaccagaggggccaaggagacccagaaattaatagtgcatttacgctgtttaattacaaggcaccattgggttttcttggttgcatcccaagttagtattgcctctaactcttaaacacatagggttttagagctggaagagaagcacaatatgttgtttatcactgtcactgtcagacattcaagtacaaagaattttctgcaggtaagcaggcttgacatgcaaaatttcagtttccctaaaatgcctagtaaagatgatggtttatgttgagtttaatttttttaaattaaaaattaggttgcattctacaaagaaaatttacaacaaaatgttagttaaggaatagaagtaatttaggtgaactccatggtcaaggatagtgcccattgtgtgaaattatgatgactggtttgtatttaaagctggcagatgaaagttaggttatcctgatatttaaagagagaaaggtgtttgaagataaatgaggtcagttgtggaccagatcttgggaaggaaacagactcttctgtctcttctgcactcccttgtttgtgccccagcctcatttgatgagtgggtagcagggtatagaggagagaacacagggcctcagcttgtgtgaatgactttgagctccacatttccttatgtgagtcatatcacgttagctgtttcttatagttccgtgtcatccacagacttgccattcaagtctacagcttcattcagattctgaataagaacactgagcaagttagggccagggacatcattgccgcagtgagggtggccttcagtacaaaggtgtgtatggtgactgaccccctcctggtttgcctgagactgtagagtttcatgggatgtgggactttcagtgctgaaactagcacagttccacgctgactaggattgttggccagtcctaggcatggattgtacagctgctgaagcccatcaaatgaaaggtactgcctatcctgcagccccattcttgcttattatacacaagtatgatgagaaatcaatgtcctgctgaagttgaagacactacttatcctgagaaagagctgtcctgccgaagttagacatcaaagctagagagcatttcctgctcatcaagaaaccccaccagaaaagcaaccaggttggtttggcttgactggttcttgtgatgcccacctctgactcctaatgataatggcccccaagcctgtgctatcacctgtcttagaattttgccaggtatcggccttaatgtttgacacaggaatcatcttaggattaaatttcagatttttcatctgcagtagtgaccacattgatcttagttttaatatttttgagaccgcctctcatagcatttttaatgttgagaccacctctttgagcatttttttaaggtcacatatatatcgaaatctaaactattttgtaaagcccatgtaattgttaagtgccttgttagcatatttttcttaattcatgtttcaagtaaatggacttatttggctgttgacacgttttccttttcttttctaatagtcatacccatctaattacatggaatccatgaagcctaacaagtatggggtcatctactccacaccattgcctgagaagttctttcagaccccagaaggtctgtcgcacggaatacagatggagccagtggacctcacggtgaacaagcggagttcacccccttcggctgggaattcgccctcctctctgaagttcccgtcctcacaccggagagcctcgcctgggttgagcatgccttcttccagcccaccgataaaaaaatactcacccccttctccaggcgtgcagcccttcggcgtgccgctgtccatgccaccagtgatggcagctgccctctcgcggcatggaatacggagcccggggatcctgcccgtcatccagccggtggtggtgcagcccgtcccctttatgtacacaagtcacctccagcagcctctcatggtctccttatcggaggagatggaaaattccagtagtagcatgcaaggtaaattccgccactgctccatgctgctgcacttgcttagcgtactggcgcttcaccagatggggtgggtgaggaagcatgggggcaagagctgttgaactcttcaaaggaaatactcatctgcctaaggcatttccttcccccgcccccccaaagtgttgatactggaagagatcccaagaatcaggctgtctgtttgataccatgacatgattactttcactatgtaatggtcaacttggggatagaaagaatcttgactttatgttgctttcttgaataccaacatggttctaggtacaaaaggcatttaataaatcctttttgattgtggtgaaaactaatggtgatcaaaagctaccttgtttatcagctggtcatagaggactaaggggttgaaaggaaataatccagaattataagaacgaatcatttcagggctggtgtcttataatctaggtccctatatttgctgcttactggcaaaataatggtcaggagaggtgagaatctcccacagatttgttcctgctatagtctgccaaaggcaaataaacctgtcatatctgtgttgtaggtaggagctatgcagtaagcttttaaaagctgaaattggtaaactgtacgtgaagtgacttttctatttttattttttagtacctgtaattgaatcatatgagaagcctatatcacagaaaaaaattaaaatagaacctgggatcgaaccacagaggacagattattatcctgaagaaatgtcaccccccttaatgaactcagtgtcccccccgcaagcattgttgcaagagtaagtatatttaggtctacccagcatttgcatagtagtgtgcatcttggaacctggagcagaagcacaagatttcacacgtgtgatgtggtgtggatgaccaggaacggcttgtgatctgtggccgccactggtccagtaccactggtcaagatgggagaatctctccaaaaacaatatgctgttacactgacaacgttatgacaaaagttacatcaagttttcatggaatcagtcatccatgattttgcaccttaccacatgaattatttttgttttttttccattcttccaggctatgtatacttagtttttccattatgagaatccttgtatagattaaacttggtgttctgtggatcatgtaaagttttcatgtggacacacatagtccttacagagtgtatagtatcctgtagaattgctatccagtaggaaggctgtgcagtgttggtcagcatccaagcacctgaatggtggtttcttgtaggtctaacatggtataatgtggtagttgccacacacagcttcagtaacctcatttgtgggatcctgctgtagataaccttgacctccaccagtgattacactgaaggctgggtttgtagttgctaagaagatggttttcgggtccaacaaggatcccacctctgctctctgccatatgtatgatcttggactagtcacttaatcttgctgccccatttctgttttcattattgattgtagttgtgattgtcttgtgttatggtgcttcagcattggattcagcagccagcttcctagtacgaaggcaacgattacctccacagggtcccttccattgtcctcctgcatcattttcctccaacttgaataaatgttctacccacctttctcctttattttctctaccccctgtaccccgctccctctcacaattaactctacagcagaatgtgaattctctgattttagaataactattttatggtaacttcaaatatatcctagttgtatccacattcagcttgggtaggtaccttcatagtagctcatggattaattgtccactgcacccaatcatagtcatttttggtttgggttgtcatatgctccccaatagatgaagaagagaataactcttagccgacttcatcagcaggtagggagagagtctctgatggagttatatttcattattcctcacaattgcatagtgccctcttacctcaaaaaaaaccttcccaggtgttttcaaaggaattattttattcctccacaacaagcctgtgggagtcggagcaaaaggcaaagtgattacctgagacattagataactcgccaatattcaccctgctaacaactgaggggccttgggcttgatctcctgcttccgaatcagggcttttcctgccatcttgtcatatccaacccattgcatctgctcatgcactcaagtgaaaggaaaaaatgactaggcaaaatggacacatcttagaggtggaattaactctttttttatgttgagggatgtttctggcaaggtaactagcaacgtggcctgcacttatagttgttcctgcatgggtgatgaaagagatgctataaaactaaataaaaccaactgcctccaagggagggatccgttgactggacaagtgttattccaaagtctgggttattatgagttgcaacgtaaaacattacataagaagatttgaaggcaatattctgtgctctgaatgctgctcaaaagaaaatacttttattttaagtaatattcttttgatgatctcaagctcagtggcttttaatgattaatgagtaatatgcttattttaatgctgacctaagaatacattctgcttctcaaaaaaacgcaacagattagccacagctgggacatgtactctttaagtaatgttctcacagatgtgattaagtaacgtcttggagtatgcccagtagcagcccacgtaggaaaccagctagccaggaaagaatcacttgaaactaggcacccagtaccactgcagtgaggcagccccaataatatttgccttaagaaacgcttcctttccagaggcagacttaaaagtacagctttgaaatccatttgctcgattgtggtgtggcaactttaggattatttataaaggcactcaaaggtacatcaaattctatttgttacagatttacaaaaagatttctttgttctaaatatacaaaactatatttagaacaaaaagcataaggatcagatttccctattgagttgtgtatgcgaattatagcaaacttaagaggggctgtctcagctcaaaacagtggacaagatatcttatatgtattagctctgtaacttcttggttataataatcccaaaccatctctttgaaaatgggagtggagaccaaaaagtgtgagatcccaagactcttcatctagccttggcctgaaccaacatcagcgtcttcagagatgcggcaggttaactgtgctcagaatgtttgagggacacagctcaagcagagatatcctggtttggggacatcctcaaaaaactcatgaaattaaacaaccatagggtacaaagttacaaatagactattttgaacctgaaaatattcatggctaccatttatagctttatcttgggaacagacattgttccgagatataaccttctgagataacattattatcatccccagtttacagagaggaaactaagacacagagagggcgagatcttggcccaggatcacagagactgtcagtgacagagctggatttgtaactggagcccacagcctttcggtgcacctttatgtgtaaaataaacaactggaaagggcagtcagaattactgcacagaaacgattagattcccaacccataaaatccaataattgggagagatttctaaagttatctgaaaaagatagtctcccagtatcccaaagacatataaaagttttatagttaataattaaatttctaccccagcactttatttcctgaatttcttttaatggaaatgaaatattttcattagatggcattaaagctgaaagttaaaaataaactgaacttttttctttctattgaaggattttaaatgaataattcagccttataaaaactctgtctgtaaacctctcactttgctgtgttctctgctgtttgcacatatatatatatgtatatatatacacatatatatacacgtatatatatatgtacatatatatacatatatatatacgtgtatatatatgtgtatatatatacatatatataattgaagtcatttttcttttctccctcctcactactttatgttcacttttccatgtatctaaacttggcctattttatccatctctaccacccttccaggtattagagtaggaaggtgagagtcaaaactgacagtttcctttgctcataataaagcatgagcagtaaataaataatgttttttttaaaaaaaaaaagcatgagaagtaaggtcacttaagaaacacaccttttattctttttctagtcacttcttagcatgcctgaaaaagtgattgacaagggatgtgtattcaaatatttaccaagacaagttttataccaagagactcccttttgatttttatggataaatttcttttattctttttttaagctcacgagttagagtgtttactctcatcaaattctttttttccttttcacacaccttttttctcctcaaacacttaggcaaaatattcctgtattatatggaacattttaggagctatagattcaaatatgaaagagaaagaagtctttcattacagttagaggccaatgacatacacttgtgatatatcaagtaattagtcattaggaaagtgaatgagcagattagaacattataattacttacattaatcagcaggggaagcctgaggaacttaacagacttttcccagctcttcctccatctcccttttctctccaccaccttcttgctgaaaaaaagcttagattgtaagatttttaacaggatttggtttctaatccacccagggaaggtgcaaactcaggaatgagagagaaatcaggaaggtagggagaacgtcaggcatgccatgggggagccggcaccacgtgagccagcatcatgggtgaccacaacactacattgaaattctccctcatacaggaatcacagtgacagtggaggtttgagtttgtgaagacagcaatgccaacttttttgttgttttttggaagagctggcatttgaaaattgcacatgaattggcagtctctaagggactccaattaaatgccaattacataaaggataaaaacgtagatataccctacaatgtggtttcctgagacttaggagtttgatcttttccatttttccctagccaacaataatgaaaatcagagcagcctgtgaaaaaatatagtgttcagcattgcctagaaccacaagattctataagtaggcagaagttgactgaggaaaagagcctccccagcacttggtgcctgcctctagcatagcacttaacccttcttactgtcattacttatctccatgtctgtctccccctagagtgtgagctcctcgagggcaggaaccctgtttttattcatctttgtgtcccggtgccaagcacagtgcctggctcatggtaggtgctcactcaatgtttgttgaatgaatatagcagtgcttcttgggttgatcagctaatttctttttgtttattttgttgggattttttgtttgtttgtttttgcccagtgttgttaatgcttttagtagactgatgaaaaaggaagagcgtgctctcaacatttggcctgtaaccttggctttcacaggaatcacccttcggtcatcgtgcagcctgggaagagacctttacctgtggaatccccggatactcaaaggaagcggaggatacacagatgtgattatgatggatgcaacaaagtgtacactaaaagctcccacttgaaagcacacagaagaacacacacaggtaatagaaacaccagacccacttcatctttcttcttaagaagtattagaatggaatgcaaaggttgttacgatcaaagttttcaggcatcttgaaagtcaccacagtcatctccagatgtgtcttctccagattagttgtgcagaatgaagatattgctaatgatttgcctttgtaataagttagaatagattcaaagtaatccccaaaacaaggccactcacaatcacttgcagttctgtgctctctagcaaaggagggagaaagggttggagccttcgccgctggaatgggggaagtgctttcacagtcaaggatgtggccttcctgtgagctatttcacatacctgcattgtaaattcatgagagcgaacagtctttgtgcagcacaaattaatgcaacagtttaacacaaacaattcaaatagaagactgtccttcaaggaaagaaaagtgaagaaatgtggttaatatttgtcttctaaacttgagggaactcttatgccgttgcctaccatatttgttctaggatttcttccatctcgcccaatactgaatatagagcatgagcagccagatcatataaaagtcattacatggccgagaaaaatgtgaaattggtctcagtgccaaacattttggtagtaaaacatcttaaggaaataatacaaaaatgttttaacagccaggtgcagtgacgtgcacctgtggtcccagctccttgggaggtggaagcaggaggattgtttgagcccaggagttcaagtccagcctgggcaacatagggaggccatgtctctaaaaaatattaaaaatgacatcttttaacagcctgattgaccattagtagtggtgatgtatgtacagtaaggctcatctcacctcaaactctttgatgtggaattctagtttgacagcagtttgcatctgtgtacattttccttagcagtgtaggttgcttttctgagtcttgcaaatcatttttactcagaaaatttacaaagaggaatctgaggtttggaagagaaaagggaaggaaagtggcaaaatggaagtgaagtttttaagtgaatcctgggaggaggcagaggaagctaacacccacagagagagctgagggtgatagccttgtatctagagcaacgcccaaacagcagtgcaaatcgatgattactgagggcatccttgaggcattagtgggaccgaagaggtggatgttacccacttccagcctaaaattaaaaggacattgaatatttgggtgacagtttagatgtaggaaaaaaaaaaaaaaaaaaaaaacgcctctttgtgtgtgtattctgtaccaggaagcagataatagaaatcctgcatatctcattcaaatgccaaggaatggtaatccctcaaggcttctagagaacaaagggtgttaaatgggagttaattttgtcatactcatgacccttatgactaatttaaaaggtaagattgccataacagcctttttatttgtgagggtctcccttcatcctggttctccccatcattttctcacaaggagcttttgttcctcatctgtaaatgatccttatcctacaggagggggttgtgaaaacctggctcaggacagatggggaagaattcgtatattttagtacccctgaattaaagcattatacttaggcctaattgttattgactaaacaagaaaataagatgttaatccctaacagatacttcagttgttagagacttcatatttttggaaaactattgaaaagtttaagaaaatcccacaaactttcaatttggagttctcattatctcattaaatgaatagcactgcatataattaagctcccaagcaggtttaagatttgggagatgtgcaaatacagatcaccatgtgttcattcactatttggtagtccctcagaatggatttcagtgactctgtgttttaagaactcttaaaattctcctcccgtttttttggcagagagccaatgaaacattacggtattagttcattttcttcttgcttgtcttgcagtagtttataatgcactgtgttattgaagaacaaatgtatgaacatatcttggaaataatatttgtcaagcattaactcaaagatctttactacctttacagaaaaaaaaaatagctcttttctttttccttttgcaggagaaaaaccctacaaatgtacatgggaagggtgcacatggaagtttgctcggtctgatgaactaacaagacatttccgaaaacatactggaatcaaacctttccagtgcccggactgtgaccgcagcttctcccgttctgaccatcttgccctccataggaaacgccacatgctagtctgattgcctctgtgtcctgcctcagcgtgactccccactcacctggctctctctctgtcctgcctcccattatctaacacattttttacatgtacattttaatttgattcagctggtctgaatctctgaatttatatcatccaaaacttccatatggtcagtagtagatgttctctaatcctccctctccttaccacgggtcagacctaaagaatgtgaacacttttttttttttttctggggatgctaagcaaacccttcttacagatacgtttaatgtaataagaacaagggaacatgtaaactaacataaccaattgtcagttctccatgtattcctcaaaagaatgtcagagtaaatgtattagaaatacagtatccagactgctagtccttgccagagacattcttacctctgccctgtgataatattttatgcttgacagtgaaaacaagtgtggccccttgcaccggttagctagaagtacagccagatttcaagctagtgcagtcacctcttccgtcattcttcacaaatcttgtcaacctggatcttagacttcatctgaatcgagttctttgccctcctttgtgcctgcagctcatatggaggtctttgccaccaatgggagatgagcccaaactttcgatctaggtgggtgatgtgtagcagttcaagggaagggtgctgtgttttcatagcatggagtcggaggagagggccatttagcagggggagcagaagaggcaattcctcctgggctaggggttgtcagtgaggtttcaacattttgttagctgtgtgcagcattcccagagcttcagtctctgtgcatactcagctttgtagaaccatgctgcaaagccatataccgatggggttatccatgcaactatctccattcctacaatgtccttaatatgagatcatcaaacattgatagtagggactccatggaatatttgcccagtaatggtaagaaatctttcgggtaagagtatggatggttcttcttttacccaatctgcttatagctttttttgtaaacagggaaatgttgagtggtacttgtattcccttatcaaattaatcacatagcttttatacagaaactcttcctgtgtgagctgttaaggtgccaaattggctgtcatttgtattcatgacacataccataaagcatctgctaatgctttaatggattgattcaattaagacctgagtgacactatttgtaaatataactagttgtgaagcacacatacctttattttgggaatttatgagaaaatatagaaaaccacagatcagggattcatatatgtagctcaaaaattcccaaaagtttactgttagagttggcaatttcctatcactatttcagtgtcagaacaaactgaaaataatggctcgtgtttatgttgaagataaatagcaccattattgggggaagttattcaaaagcaggcttttgagcaccatagtctaaatgccaataaaaataattcatacatagaaatgtcattggtcctgaatttgaagaaagtgagcaacagtagttaaatgtgggtgcatataaccaaattccccttcatcaagaatggaggagaagagagaagaatgaaatcctgaagattcatcccagccgcaactcaggatccaacacaactttaactgggaggaatacattgtttgatcatttttaaaacatctgtgaatgagtgattccggaggcctgtgaattgtgtggggagcttgctttgatggcactgtgttaataaaagttgtagggactgtgcacctaagaggctaagaggtcccactcatccgccctgtgaaccagctgtaaagaaatgtagttaagaaatgcaaagaaatgtgttatcttggcacttgggtttgattttcctttttttaaagcactgcaaaacttctttaggatactaaaacatcctaattgggctgtttttttgttttgttttgtttttcagctaaaggcaaagataatttttttttcagctgaagtttttcttttttgcaactatgacatgaattgagtgataaaatggctctttgaaaagtagatattgtctgtattgtaaatgcttagtcatattcatggcaaagtgttcatttcttgagatggttctttcacaacacacaagaatcaagatggaacgcaaggaaaatctttttgttttgaccgaggtaaccagtttatgtgtgttccaatccatagagaagtgggggaaagggcgagaaaggatcagattgatctgggatcagctttgagcctgagttcagtgaatagcctcatgggcatctcatggaattgatgcatttgctgtggcatatttaaattttgttcaaaagatttgaagcaagaccttgcaaagactcttaacattactgttcagcttgcttagattgtgttaacagttcatttaacaaagatccgttttaactctgaacaaaagcaacccagagcggccattctctattcccatgctggtcaatacgctttcattaccaattggcccttaccaaacttttcttatatatatatttgtattttactatgatagttgagaaatttagcctcttagtcatttttagctgttattgtggaagacctcaaatacaagattagatgcccttgaacatgttttaatgatgtgtgtcatgttactatcaatggtgatttcaatcgcaatattttaaattgatgagaatgatttgtaaacatgaagttactattacgtaaattctgtttgttatagagtttcttcagttgttacccaagtgtcatcctagagaagtcagaagaatcagaatccatcgtattttagagttatgtgaatctacatcataaatgggcattaacattctaaattgcttggtttggagaatgtgttagcagcatagctatattcaactagggagatgctaaatacacagaagtttcaagagccttggaacagaattacaggggaactatatatgtatatgtatattttattaaacacccatctgcactatcagtattgcactaatgtggaatttgaaagactattttgctgatactgtatatatgcgcatcattcctgattagattgttgtaaagacaatctgaaagatctaaggttttaaaataatttggtttgaaaatatacagttgtcttgaaggaattgctgtcatacatgaagttgctccgagctgtctttattctcttcttggtcaaggttaacaattgctaaatgatcgcaaattcacctaaacaatacatttacaaagccatctttacatgcattaaacgagggctacaacaatattgttttacaaatactagcacttttttttctgttatgtacttagtgttagagggtcaaaataatctttctgcttagcatctcttaaaccatacctgcaaatatagcaggattattacatttacagtactttaatacttgtataaactatgcagaaatttttaataaagtgtaatatattttataagctaataagactgaatgggtaaaggtttttagcatgcattagtatacttgcagatactgaaacattttggtaatctttcttactaaagatgtgaatgtttaatgtaccttctctgtttctactctgtagtccaatgggaattcagtaatgacattttgtcatgtcaaactgtgaacataaatttgtactgtacagtcctcatatactatatacagtatgcaatatatattatatacttgttaataaaaccatcagaatattaaatgtgatcatgtgattacttcatatgcagtgatcactagagcaaaacttacagagcaatgtaagaacccttgcttagaacattacttactctgatgggcagttattgttgatggagggacagaaaaatagatctaactggaagatgaactaccggaattaactcagccctcaagctatgtccctggttttctgaaaacagccaacaggaagtctcctaggctgaaatcataaaactgcagacaatccagcaaaaatctacaaactcacctagttcattcttgaaatacttcttgtatttgttatttatgaacccctgcctgcttccaaaaagaacttgcagcattttgtattaaaagacgcatgtgtataatactttaaacttttagagtaaaatatcaagactctcatgttggggagtggggaacgaggaacagaacaataacgcattaaagtaaataactctggataaaagtaattatttttcaagcctttagtaaccatgttcatggacactgcattctccagcatcacatgaagaagaagtagtttccgatagggatttagagttgagttttgttttgttttgtttttgtttttgtttttgtttttgttttttgagacagtctcgctgtgttgcccagcctggagtgcaatgttgtgatctcactgcaacctctgcctcttgggttcaagcgattctcctgcctcagcctcttgagtaggcgggactacaggtgcacgccactgtgcccagctaatttttgtaattttagtagagatgggttttcaccgtgttggccaggctggtctcaaactcccgacctcaagtgatccacccgccttggcctcagaaagtgctggtattacaggcatgagccactgcacccagccaaggatttagagttcttttgtttaaggcaaaatgtaattacctctcctcttccctctgcatccctgcaatgtaattgaaactgaggctagcttgttagatctcagcagtttcctccagcctggacttcatcttagcaaaacacaagataatgtctggccagcacttcccacatgacttactttcacaggttggagatgaaaggaggttgggagaaggctaaattcagcctttggggcactctccagccttctctggggaacttctctgtttttataccaagatagttgattgcaagatcaaaagcaagtgtatatgactataaatcctaatggaatattggcttgaattagtccagttgactggctgtaatccttccactatatttcttttttgtttgtttgtttgtttttgagacagagtctagctctgttgcccaggccggagtgcaatggcacgttcttggctcattgcaacctccacctcccaggttcaagcgatcctcctgcctcagcccccgtagttgctggaattacaggcacgtgccaccatgcccagctaatttttgtatttttagtagagacggggtttcgccatgttggccaggctggtctcaaactcctgacctcaggtgatccacccacctcagcctcctaaagtgctgggattaccggcgtgagtcactgtgcccaaccctttcattatatttcttatgcatgacttgacacttgctgagttcaaagtaagatccatccttctaggaagaattgttacaagctggattctgcccgggtgaatgatgaggatggtaacaaatgtggattctatgagaaactaaattctttggggaaaatggttgaacaaatttaagatgttccaaacaaaaaaatatatataaccatttcccattacagtcagccctctgtgtccatgggttccgcaatacagattcaacctagggcgaatagaaaatattcaggaaaaattaaaaaaaaaaaaacactacaataataatacaaataaaaagaacacggtataatagctatttacattgcattacattgtattaggtgtaaaatccagagagaatttaaaatatacaggaagatgtgcatcagttgtgcaaatactatgccattttatgtaagagactttagcatttgaggattttggtccctgggggtccatgcataccgacggatgactatattttaaatgctatcaggttaagaaagcaggattaggaggcttactgtgggccaagtaagattatcaattctaatctgaaagagaagaaatggctgtgttcagggacggatactgctaaaagataaacttgggcacattaaaatcttaaaagagtttatttgagcagacagcaattcatgaatctggcagtaccagttgcaaacagttgcctgattccaggagactgaataagctgttctcagaagcaaaacaaattatttgatggttgaagtcgaaagtttgtagttagaggttagttggcagtttctaattggttaagattgtttccctaggctatgatcattccctctcatttgggctttggtttgcttacacggaaaccaaggcatgggagcggtctctgcctaatgatctcccaattcaattatcaaaacaatggattgagatggaagtaaatacatacacatatacatgtaaaagttaaactactagagacctgacttaccggtgtgtatgcataaaactcaacaatgaattttccttcaagtgtacattcattttaagaatgtaaacggaacctggtaccatttcctattgtctgagcagatcatagtcacactagttagtaatagtgcagtatgtagagagagtgactccgaaattagaataacatgtgctgtaaattagaattatttttaaacttatggggaagtgggaggttgattctcaccaagtccagatatgcttattggtttgagagcttctgctcattatatctctggttttgcattccctacaggcaccctgagtggtggggttaagaatagaaaacggaagctggatcttcaggctcctggatcatggctgtttcacactgcatgcacttaatgaattcgatgtttcttccttttctcatgattcaggaactctaagaacttggtgtttaaagaactcagaaaggtggctcttggggactttcaagccttgctgatctgctccagaagaggtatcacctcctgctgcaaagtacaagagcttgcctgtcagttacacatctccaaagctatgttcatgtgttccctcaactaaaataatatcccacccacacattcaccaccagaatgagatcctcatggctgagctgggaattgctcgtctttatgaagacattgttagatggtagtttgtttccaaaccaagctagagtccactagtccagtgcagtaagaccaaacatccacaccaaggttttgcagcaggagaaaggagggcatttatttgcagggcaccaagcaaggagaactgggcagctcatgcttaaaacccaaccttccccgtgacttttaattaagcaagggttttaaaggcaaaggtaaatttcaggaaagcaaaagttataagcaaaatcttaaatgtatccatggagtttatacattgggttggcctaaaaagatgggatatcttgcagtggggctgtacaggtcatagggagattcagagattttctgatttgcaattgattaaggaagggaagatttatctgaagacttggggtcagcagaaacgaatattaggtctggcccatgggtgtgacttcctccaggatcctcaggaagaactttagaacaaagagctatggtcagagctcggtccttagttcccccttatctgaggtctacatgccagcagatggcattttccatttggtggagttctgggtttctgaaaagcaactgagggacgtgagttaaaatgttatctttagtttctacagggaaccaaacatctggtaactctaacctccttggctatggtttaatgctactattaccttcttgcttatcaggttgctcatttacttctcatggctagctaggtgcctggaattccccttaaaggaactccagaatttcttttatttccattcttgggggcccaacaggcctctcagagaagttggtgatccatctcagtttaaggaataggtgagcctgagttctgctcctacctctgaccctaacttctctctctcgccccttcacagccagctaatcgcttctgaggccacttctgggtcttttctcttctgtccattgccattgagctcctgtgtttctcactggggctagaacagaagtgtcttcactctcccacttcaatcattctccaccagacaccaaagccatctttcccaaactaagagctgactgttatgcccctctgcttagaatccttccatggtcctcactgtactgaagctggttcttcttaattcagccctacccccctttaaagcctcatcgtttatcattaaacttttgttttcattttcctgtttttttctaagaaccttcaaacacctcccatactcagtgagattgataggtgcacaaggcattcagggagatacaaaactcttactcatttgtcaaaatcccactcaaaagttacctattctttgagctttccttgaatgaactccactcaccctctctgcggagatactctctccctacttcttttttttttttttttctttttgagacggagtcttgctctgtcacccaggctggagtgtagtgccgtgaccttggctcactgcaacctccacctcccaggttcaagcgattcctcagcctcctgagtagctggaattacaggtacacaccaccatgcccggctatttttttttttttttttttttttttgtatttttagtagagacagggtttcaccatgttggtcaggctggtcttgaactcctgacctcgtgatccacctgcctcagcctctcaaagtgctgggattacaggtgtgagccactgcgcctggccctctctccctacttctttctgtaaccacataatccttgagtttccctcaattttcagcacttatcaccctgcatggtcagtctgtccatctgtctccttccctccctagatctcagatcaccctaatatgattctgttctgggtgtccagtgtccaatccccagcaccaggcacaaagcatgcctgggtgtgtgttggaaagtgtgctacggaaggtgtgttgaatgagcgaatgggtactaatagctaacattaagtgaacacttactatatattttgcactattctaagcaatttgcagccattaattagtttaattctcaacactgtaaagcatgtaaccattatcattttctttttacagatggaaattggggcacagacagattaagtaatttacccaaggtcacaaagataggaagcgggagaaccagcttcaaattcaggcctcctatgtccagaacctgctgtcttaactattatatgggtctctggccttggtggccctcaggccatttcgtgcttcctctcaaatttcaacccaggtgtgctatgggttgaatttttttcatacttttactgtactgagccatctgctgggataccctccccctccatcccaggccacactcatccaccccttcactagaaaaatactgctaattcttcagtacttgtaaagccagaaatccccaatgggtaaaggaagggggaaatttgctggtttctataaataagaggtttgagatatacaaatacatatacttgtatatatgtatacatacatatacttgtctatatatgtatctctatgtatgcgtacatatatacgtatatatgtacgcgtacatatatatatgggattacacctgtaatatacaaaatatgcaaaaattagctgggcatcccatacatatatatatatgcttatatgtatatgaatatatatctacatatgtatatgtatatatgtatatgtgtatgtgtatattcatatatatatatttaaaaaattattttttctgagacaccgtctcactctgttgcccaggctggagggcagtggtgtcatctcagctcactgcaacctctgcctcctgggctcaagtgatcttcccaccttagcctcctgagtagctaggactacagccacgtgccaccatgcccagctaatttttgtatattttgtacagatggggttttgccatgttgctcaggctgaccttgaacccctggactcaagaaatccacccgccttggcctcccaaactgctgggattacaggtgtgagccactgtgcctggtctcgatttatttttttttatgtcaggtgaagtgtatctttagataaaaatcattctttttagtgtacattcagtcatatcattacaatgaagacatagaacaattccatcccttcttaaaattccctcaggctcctttatactcacccatcctccaggcctattttatttccctgtaatttcacctcttacatatgtttgtgtcacctttttgagtctggtgtctattgtttcacattatgtatttgagattcaactatgaggttacatgtatcagtaagtttttccttttaattattgaataaggatatacaacaatatgcttatacatttaccagtggaagaatatctggattatcttcaatttgaggcaattatgaataaagccaccataaatattcatgtgcaggtattattaacttttttgttcaatttttgggttttgtgttccttactcttgggtaaatacttaacagtgggattgctagattgtgtgctaagtaaatatttagctctttaacaaattgccctactcttttccagagcagctatgccattttgcatttccaccagcaatgtatgagaattccaaggtattctacaacctcacccacacttggtattgtcaagtgttttgttttgttttatccaaccgaataggtggggcagtatctcattgtggttttaatttgcatttccttcatgacttatgatgagcatcttttcatgtgcctatttgccagccttgtatcttctttagtggagaatctcttaaaatcttttgcacattttgtattgggttgtttgttttcttattattacattctgagaagtctctgcacattctagatatgcgtcatgttttgctaatattttctcccagtctgtggtttgtcttttcattttcttaacagtggtttttgaatagaagatatttttaattttgataaagtttaatttatcaattttttttcttttatgaatcataatttttgtgttctaagaaatctttccctaacccaaggccacatacattttctcttattttctccttctagatttcttatggttttaggctttacatgtacatctatgatctatttgggtttaatctttgcacatagatataatttatgaattaaggttcatatgtatgtccaattgtcccagcaccatttattgaaaagactttccttctccattaaattgattttgcatgtttgtcaaaaaatcaactaaccatacatgtgtgggtcagtttctggattctctgttgcgttccattaatctatgtgtctatcttttcaccaagaccacactattttaattacagtagctttacaacaagtcttcaaattagtatgaattcgctaactttgttattctttttaaaaattattttggttgttctagctcctttgggcttccatttaaattttaggaacagtttatcagtctttcaaaacaaaagactgctgggattttgcttgggattacattgaatttatagaacaaatgaatctttccatgtaaaaacatggtctattactccatttatttaagtcttctttgatttctttcatcagtgttttatgggttttgcatacaggttatggacatatttaattagatttatacttaaggtttctgttgttgttctgtgcaagggattgagtttagcagtcatagagggacagatgacaagtcctggctttgaatgagatggacagttaaaactaagaccctctacataaatctctgaacataagcaaacacaaaacactgctggaagaacatacttaacccatgacacagagagttttcacagagaaagctctactttaagttcacaagccaagctaacaaaactcataaagaaacatatattataagcaaaagcacagatgctgcaaagaccacaacaccagaatttcctatggtagaactgtcagaacactgtaagtatgtttaaagacataacaggattaatcaaagccctaagaaaatgggtatctggaaaagggttccagtcacaatattaataaatggattcattccacactattccttctgctaattacctcccaaagtgctgggattctgggcatgagccactgcacctggctgactataacagttatatcaaaggggtccagcctacagagccattctcttcctggtcttttgggcaatgggtgaggggagtgctgcacctcttacagtgtttacctggagtataaaagtggttttttttgttttgttttgttttttagatggagtctcgccctgtcccccagactggagtgcagtggcgcgatctcggctcactgcaacttccgcctccaggattcaagtgattcttctgcttcagtctccctagtagctaggactacaggcacccgccaccaggcccaggtaatttttgtatttttaatagagacggggtttcaccatattggccaggctggtcttgaactcctgacgtcgtgatccgcccacctcggcctcccaaagtgctgggattacaggcctgagccaccgtacccagccaacagtgtttttaaaaatttttttaaattagagatgaagggtcttgctatgttgctcaggctggtctcgcactcctggacttaagccatccgcctgccttggcctcccaaagtgctgggattactgcacataagccaccacattggctttcaattatagaatgagggagaggattatagagagcagggagcagaaggaaaagatattttaaacccacgtctgaagtccctggctcatctgtgggtagcccaagcatcaagctgaccagaatcaacacagaagaagctttgagaattgaactgcagcatggaatatcaccatgtttcaaaatgacctctgtgcacactgtggctgaccagaatcatactacaaagcttcaaaatttaagttaacattcaaaccacagcccacaaaagtgggccaggatgtgtgctctaaatctaaatgggtggatggccagctaaaatagaagatttaaacaggaaccagagtctcataacagtacacacagagtttctaagacataatccaaaattactcagcatagccaagaaccaggaaaatcttaccttgcatgagaaaagaaatcgacactaacactcaaaggacagaaacgttggaattatctgaaaagggttttaaagtaactattataaaaattctcctaaaagcaattatgaacactcctggaataactggaaaactagaaaatctgagcaagaaatacaagacacaaaaaagaatcaaaaggagattttagaaccaaaaagtataatattcaaaataaaaaacccactggatgggcttaatgacagaatggaggttacagaggaaagagtaatatgaagatagatcaatgcaaattatccaatccgaacaacagagagaaaaatagattgaaaaattaatgaacacaggctagggacctgtagcacaatatcaaaagatctaacattcggaattccaaagagggagaagaaagttcagggctaaaaaaattttgaagaaataatgtctgaaaattcctcacatttgttgaaagatcaaaaaaaactacaggttcaagaaggtcagcaaactcccaaaagattaaacccaaagaaatctctacccagatatatcataatcaaactgctgaaaactagacaaataaaaaaatgaggggtcaggcataacctgcatgaagcacggtattgaatttttgcatccacaactagatagatactaaatactagaattgtaagtggttttatttgtattaaaacatttaatattttatttttgccaaaaaataaataaaacttcttagcttctccctctgcccaatcctgttcccctcattttcatgcaagacttatttattgcagatgtttccccccctttaaaccacctgcatgcaaatctctgtctcagaatgtatttccagggaacctgacctagacatgtgccaactggcacagaggtagaaagaaacggccccctgcctcctctttcagatgttggtatagtgagacaagcaaatggttagcttgctgatagatactattattaaatgtacaaacgtgtcaataaatttataatttattttaaatatctttgatttcaaattgtagatatttaaatacataatggtattttcccttgtattcttgccccaggtcccacaaatatttagagtaa

SEQ ID NO: 443 - DNA, 53886 bp, Homo sapiens
gaatctctgggacacatttaaagcagtgtgtagaggaaaatttatagcactaaatgcccacaagagaaagcaggaaagatatacaactgacaccctaacatcacaattaaaagaactagagaagcaagagcaaacaaattcaaaagctagcagaaggcaagaaataacaaagatcagagcaaaactgaaggagatagaaacacaaaaaaactcttcaaaaaaatcaatgaatccaggagctggttttttgaaaagatcaataaagttgatagaccgttagcaagactaataaagaagaaaagagagaagaagcacatagatgcaataaaaaatgctaaagggaatatcaccagtgatcccacagaaatacaaactaccatcagagaatactataaacacctctatgcaaataaactagaaaatctagaagaaatggataaattcctggacacatacaccctcccaagactaaaccaggaagaagtcgaatcactgaatagaacaataacaggctctgaaactgaggcaataattaatagcctaccaaccaaaaaaaggctacgaccagatggattcacagccaaattctaccagatgtacaaagaggagctggtaccattccttctgaaactattccaatcaacagaaaaagagagaatcctccctaactcattttatgaggccagcatcatcctgatgccaaagcctggcagagacacaacaaaaaaagagaattttggaccaatatccctgatgaacatggatgcaaaaatcctcaataaaatactggcaaactgaatccagcagcacatcaaaaagcttatccaccatgaccaagtcagcttcgttcctaggatgcgaggctggttcaacatacgcaaatcaataaatgtaattcatcacataaacagaaacaacaacaaaaaccacatgattatctcaatagatgcagaaaaggccttcaacaaaattcaataggccttcatgctaaaaactctccataaactagatattgatggaacatatctcaaaataataaaagctatttatgacaaacccaccgccaatatcatactgaatgggcaaaaactggaagcattccctttgaaaactggcacaagacagggatgccctctctcaccactcctattcaatatactgttggaagttctggccagggcaatcaggcaagagaaagaaataaagggtattcaattaggaaaagaggaagtcaaattgtccctgtttgcagatgacatgactgtatatttagaaaaccccattgtctcagcccaaaatctccttaagctgttaagcaacttcagcaaagtctcaggatacaaaatcaatgtgcaaaaatcacaagcattcctatacaccaataacagacagagagcaaaatcatgagtgaactcccactcacaattgctacaaagagaataaaatacctagcaatccaacttacaagggatgtgaaggatctcttcaaggagaactacaaaccactgctcaacaaaataaaagaggacacaaacaaatggaagaacattccatgctcatggataggaagaatcaatatcgtgaaaatggccatactgcccaaggtaatttatagattcagtgccatccccatcaagctaccaatgactttcttcacagaattggaaaaaactactttaaagttcatacggaaacaaaaaagagcccacattgccaagacaatcctaagcaaaaagaacaaagctggaggcatcatgccacctcgctttaaactatactacaaggccacagtaaccaaaacagcatggtactggtaccaaaacagagatatagaccaatggaacagaacagaggcctcagaaataacaccacacatctacaaccatctgatctttgacaaacctgacaaaaacaagaaacgggacaaagattccctatttaataaatggtgctgggaaaactggctagccttatgtagaaagctgaaactggatcccttccttacaccttatacaaaaattaattcaagatggattaaagatgtaaatgttagacctaaaaccataaaaaccctagaagaaaaccgaggcactatcaatcaggacacaggcatgggcaaggacttcatgactaaaacaccaaaagcaatggcaacaaaagccaaaatagacaaatgggatctaattaaactgaagaccaggccgggcgcagtggctcacgcctgtaatctcagcactttgggatgctgaggcgggtggatcacaaggtcaggagttcgagcccagcctggccaatatggtgaaacaccatttctactaaaaatacaaaaattagccaggcatggtgatgtgcgcctatactctcagccacttgggaggctgaggcaggagaatcgctgaacccaaggaggcagaggttgcagtgagccaaaatcgtgcccctgcactctagcctgggtgacagagcgagactccgtctcagaaaaaaaagaaagcaaaaaaataaataaataaatactgtctgcacagcaaaagaaactaccatcagagtgaacaggcaatctacagaatgggagaaaatttttgcaatctacccatcagacaaagggataatatccagaatctaaaaaggacttaaacaaatttacaagaaaaaaacaaacaaccccatcaaaaagtgggcaaaggatatgaacagacacttttcaaaagaagacatttatgaagccaacaaacacatgaaaaaatgctcttcatcactggtcatcagagaaatgcaaatcaaaaccacaatgagataccatctcacaccagttagaatggcgatcattaaaaagtcaggaaacaacagatgctggagaggatgtggagaaataggaatgcttttacactgttggtgggagtgtaaactagttcaaccattgtggaagacagtgtggcaattcctcaaggatctagaactagaaataccatttgacccagcgatcccgttactgggtatatacccaaaggattataaatcatgctattataaagacacatgcacacatatgtttattgcggcactattcacaatagcaaagacttggaaccaacccaaatgtccacaatgatagactggattaagaaaatgtggcacatatataccatggaatgccatgcagccataaaaaagaataagttcatatcctttgcagggacatggatgaagctggaaaccatcattctcagcaaactatcacaaggacagaacaccaaacgccgcatgttctcactcataggtgggaattgatcaatgagaacaattggacacagggcggggaatatcacataccggggcctgtcgaggggtcagtggctgggggagggatagcattaggagaaatacctaatgtaaatgatgagttgatggctgcagcaaaccaacatggcacatgtatacctatgtaacaaacctgcacattttgcacatgtaccctagaacttaaagtataatttaaaaaataaaataaattttttaaaaatgttaaaaaaaaaatctgtcatcccttcacaaagctaattccttagccacaactaagagttctccgtatccagagtaatccattcttccaaaaatagcactttattttatctatgcaaaaacctttacagtaacaagacaaatcctaaactcttctgctgggtttaaggtctttctaattcagcttctctttattttcctaattctcctctccaacctgggacataaacatattcttatcttcatgtgtttgcttctcaactgcatttcctatcttaagcgtccttttcccatctcacctcctttaagaccatgctagaaatttgatctcctttcaaactagggtgtttttaaccttttggtcctgaaatacctatggcatacatttttatctgttatctgttatcagtggctcattcctggaagcagagtatgcatgtgtgtgtgtgtgctgaatgagctctcatctctaaataagtctgaaaaaatccctcaagaatgttctacaaaatccttggagatataccagcacacatagctttcctcaatcacccagtctgtaccactcattttagcccctgttcatatacttccttgtaccatttttcagtgtgtatttcttgtaccctcagtaaaactaagctactgtcactgaaaccatgctttatatttctcttgtataattacccaaatacaaggctgagtgtcctttaattgttaaacaagtattggttcaattaaacggaagtatttcatagaacttccaaattagggccgggcatggtagctcatgactgtaatcccaacactttgggaggctgaagcaggtggatcacttgagctcagatgtctgagaccagcctgggcaacgctgtgagactccatctctacaaaaaataaaaaataactagccaggtgtggtagtgcacacctgtggtcccagctactcaggaggctgaagtaggactgcatgagcccaggaggtcaaggctgcagtgagatgtgatcatgccaccgaattccagcctgggtgacacagcaagaccctctcaagaaaaaaagaaacacaaaattaaaatacaattttcattaaaaggaattatcatttcaaagttatgattagtctcagctgggcgtagtggctcacgcctgtaatcccagcactttgggaggccgaggaaaagtggatcacctgcagtcagaagtttgagaccagcctgaccaacatggtgaaactccgtctctactagaaaaacaaaaattagctgggtatggtggcacacacctgtagtcccagctactcaggaggctgagaggagaatcgcttgaacccgggaggtggaggcttcagtgagccaagagcacaccactgcactccagcctgggtgagacagagcaagactccatctcaacaacaacaacaaaagttattagtctcaactactacacaattacccttttgaaaagttttttacgaataaaaagttatattactatatttacttattttattttattttattttttgagatggagtctcactgttgttggcctgggctggagtgcaatggcgcgatctcggctcactgcaacctctgcctcctgggctccagcaattctcttgactcagtctcctgagtagctgagattacagctgcccgctaccatgcctggctaattttttgtttgtttttttttttgtatttttagtagagacagtgtttcaccatgttggccaggctggtcttgaactcctgacctcaggtgatccaccagcctcccaaagtgttgggattacaggtgtgagccaccgcactcggcccatatttaaatagtattatatttaaaatagcacaggttgagcatcccttacccaaaatgcttgggatcaaaagtgtttttgaatttcagattttctcaaatttgggaatatttgtatcacactggtcaagcatccttaatccaaaaatctgaaatccaaaatgctccagtgaacatttccttccagcatcatgtcagtgctcaaaaagattcacgttatggggcatttcagacttcagatttaacctgtaacttctatttcaatatgttagactaggacaccatttatatcttgcacaaaactccacaaattaaacatgtagtcctagcatggacaacacagcaagaccccatctttcaaaaaaaaaaaaggaattagcctggcatgatggtagtcgtagccactccagaggctgaggcaggaggagtgcttgagcccaggagtttgaggctgcagtgagctatgatcacaccactgcactttagtctgagcaagagtgagaccctctctaattaataaataaataaatacataaactaaacatgtagcattatttgtccttaaagctcaaataatgtccagagcaagttcatataccacacaatttatttatttatttttagaaatgttcatagtagctttattcataatagccaaaaattgaaaacaactcagtgggtgaatgataaataaactgtggtacatccacaccatgtaatagtactcagcaatgaaaagaaacaaattattgatacatgcaacaacttggatgttaaagccaatccaaaaaggtcacatataaaatttcatacatttaacatttttaaaatgacaaagttaaaggaatgaaaacagatgagtggctgacagagatcagggaaagggaagagggtgggagggacataaatgtgactataaaaaggcaacacaagaattccttgtggtgatggaactgtatcttgactgtagtgaatacatgactctacaccagacaccacacaatttaaatagcagctattctaaagcatcctagctttaaatgcatattgaattacctatttcaaagggaattttaatcaatcctacttagacagaatgtttccttcaaatttgttacttggtacaataattgctaacacttattgagcattcatcatgtttcaggtactcttctaagccctttataaatattttctcatttaatcttcaaacaaccccatgaagtagatcatgctcccagctaacaaataggaaatcagacaagttaagtaacttgccaaagtcaacaagttagagtggaagagtcaggatttgaatccagacagtctaactctgcaatgagtgcacttagctacttctttcacgttgccttttaaacagggatcaattatgaggcaacataagccctgctgaatttgactccttaaaagagaaatgctatgaatcccaaaaagattttaaagtctaggtgactttaaaaagtctagcaataaatgtaggtgagaaaaagactatcagcactaagagggatggttttgaaaaaacatgtcaattgtgtatttaatgttaacgtaaaatagcccaatccacgaattaaagattagcaaatgatttatacttattttaccttctcatctcacactcaagaatgtgtaatttttgcccagcacaataatccagaggttattaatataccttggctcaatatattactgtcccaatactcttccttccaatcggaagcaaagaggtcctcttacttgtatctcccctggacaccatctcctttgtgtacttcagccttttttttttttttttttttttttgagacagggtctcactctgttgtccaggctggagtgcagtggcctgatatcactgcagcctccacctgctgggctcaggcgatcctcccacctcagcctctcgagtagctaggactacaagcgtgcaccaccacaaccaggctgtacttcacatctctatcatctttaatcactcctatacaggatccttttctttcactgccaagcatattctagtatttctaacattaaaaatttgtgtttaaatccaattcgtctcattccttctgagaccaatctcctggaaacgtcgtctacacctattgcctccagttactaataaatattttactagaaatcttcagcaatctctttcttccatctatcactacaaagaaactgtactttcgaagatcattgtttttgccaaaaccatggccaaatactttgttcatcaagtttgttcatccttactcctctaaactttctgggaccttgtttcctctgacattccattttttaggggcttttctcctccttactttttatagttccaatttatttactgattctttttttttcctcatgttccaatagtaggtggccccagattctgaaaatcattcattctacataggaaaataatcattctatatgactcctaaatctctgtcttcagaccattacagctgcaacccagtcctgcatttccaacctccgtcaaactcattaagttcaaaactaatcatcgcttcacatcttattcaatctttctttgccaactactgtactctgttttgctcagtaataattccattcttccttttcattttctttccccactaaaaaaactttcatcatcttttactcttccttcaacatcacctttacatctaaaaagttaactttgttaactttatcatcaaattctcacatatttcttttttgaagacagagtctcactctgtctcccaggctggagtgcagtggtgcaatcttggctcactgcaacctccacctcccaggttcaagtgattctcctgcctcagcctccccagtagctgggactacaggtatgcaccaacacgcctggctaatttttgtattttttggtagagatggggtttctccatgttggccaggctggtcttgaactcctgacctcaggtgatccgcctgccttggcctcccaaagtgctggattacaggcataagccaccacacctggcctctgacatatttcttaaaaagatatacacttgtcctcttagatgtgggcttcactttcattctcaattatagctacttatcttgttcccaatcttagcccctttccctaatccatcatcagtctttcattgtcaccacttttatcattaccttgcttgagatcccataacagttcccacacatctatatgaagtcaaatcagaattcctgtctggctttcaaggcactactgtatttgatcttattatctgatcctatccaggttcattttctactacttcagttcttccccaagatccatcgacattagcctttccaaaatccaacattctgcatacacttcctctaaggttttgtatacaacattggggggtggggggatgggagtgaagaaagttccagtagacaattctttaagaggttaaatgacagccctatacccaaacatgcaccccctactctagacagatgatcactctactgttctccctgcctttttattcaccttatcgccaattaaaaacacttctctactcccgtttgtctcagtaaatcttatccattttccatgtgccatctcctcagaagttttcctgagcttggcagggctagttctcttgacaattccacttgcagttgtggttcacagcacacaagtaaagctttgttgtttctcttgtgattagtccgtgaaggggctctgacttgatcacttttctacattgccaccaatacctaaatccaaccgccccaatgccaatacttagccagtgttaagcacgtagtgtttaaacacacctcaacacgcaagtattgtaagataatgaccacacaacagggcaaatacaaagttaaagcaggtccgggaccaatacaaagcatctttaccaataaaatgccgtgatgacgctgtcacccattccggattcacgaatcattcttcaaaagtccggctccaaaactatgtggagactgaaatcccctgaagaaaaaaaaaaaaaaccgccaaaatgacagctaagacagaggccagactaacccctggccctcccaaattccctctcgctccacaagtgggttcacaagagacacaaacgcacccaggaagacctccgctccctcagacgcggggcgggccctgcgacttcactctgggagggacatttccgctcacccagctctgcgaccctcgctcctgcggagtcagcttctgctcgcggagggggaagggcaaaaggacagtgcgtcccaacccgtccctctccagctgagcctgtcagagaccagcccagctctgaaatcaagccgttgagaaaagggaattcggccctccgccgcctcttcagtttaaaatcgtttcccgactcgctctgcggccccacgcaggaagcctccttggcgcctcgccgattccgtatcagtgaagcaactaaaattgccattttaactgagggcaaggccgagccacttaaccactatcgtcaacctttccaatcgtgctcggttgctcctcagttttcctaccggtgcgaagctttctctcaaatttccgcccgtagtaggcatggcggcggcacctcaccactgattcgttgaattccttcccggtaatcttgggcactagcgggcggagttgaagggcgcttggaccccagcggcgatctgtgtttgggttcgcgctctgggagaattttggctttgctcgccttcctctttcagaagactcgaaatcggccagcaggtctgcgagatttgaaacgcgactgttactccttgttttccggttctggccgcgggagcctctcgagaagcgtggaaagaggagaagggcgtataccttgtgaccgcctctggttgtcttgggctcgcgcctggcgccgctacgtggagtcgctctctcgtcgtcacttttggctgccgacttgttgagtagaagtgcagactgatgctttaagactcagggagaggtctttcccttatctccaccccagcaagcaccccagagaccttggagatttgtcttgtttctagacacgtgtactccaatgttgtgcggaggaggccttaaatattcgagaagagagtgggaactcctggaattttaagggatttctgtgtatttccaaaactgacttttaactaccggcagcgtgggatttcgtgattgtttttcgccatcgtgtggctccaacatgtacttcccttcttggttaagtcagctgtacaggggtttatccagacccatcagaaggaccacccaaccgatctggggttctctctacagaagtctgttgcagagttcacagaggagaattccaggtgaaaatagcgaagagatctatcctatgaacagtacttcagcctgttatctacggccggagagcttttattccatttttcattttttcccccattattattattattattattattattattattatttgagacggagtctcgctctgctgcccaggctagagtgaagtggcgcgatctccgctcactgcaagctccgcctcccgggttcacgccattctcctgcctcagcctcccgagtagctgggactacaggcgcccgcgaccacgcccggctaatttttctgtatttttggtagagccggggtttcactgtgttagccaggatggtctcgatctcctgacctcgtgatccacccgcctccgcctcccatagtgctgggattacaggcgtgagccaccgcgcccggcttttcccctgttcttaactggatagccttatgtgtagaagcgaaattcactctcattatattcattatacggcagttttttttccctgagtttttagaaagaccacaaaaaggtaaccacgtaatatatagaatactctgcttttggttgatgccttaaaaaaatccttcttcggccgggcgcggtggctcacgtcgttaatcccagcactttgggaggtcgaggagggcggatcacgaggtcaggagatcgagaccatcctggctaacacggtgaaaccccgtctctactaaaaataaaaaaaaaattagccgggcgtggtggcgggcgcctgtagtccccgctgctggggaggccgaggcaggagaatggcgtgaacctcggaggcggagcttgcagtgagccgagatcgcgccactgcactccagcctgggcgacagagcgagactccatctcaaaaaaaaaaaaaaatcatttttcacagaattataatagtgttttctagtgtacaagtggctgttaaacactagattcatactaaagctaaatagttcctacaccgtccatttctgcagtttctaaaatcctatttcatttgaggaagaaatgtgcaatattaagaattgggtaattaggattttaggtcaatgcaaatgctagaagatcaaaaaaattttgatttcctaacacaagacagaaatttacattcagttattcacttggcttttgacacatttgcaggtaaatttaatagtgaatgaattaaattacatactctgacttattttattttataaatttcccctgtagccctgacatacctaagatatattttgagaattttcatttttaagcaacctgcaagtgatgtatttttaatcttgccttttaaagtttctttttttttttttttttaaagaattcagtagctttgttgtccggaccaacacatgtggagagttgcgttcgtctcacttaggccaagaagtcaccttgtgtggatggattcagtaccgaaggtaaattgagaaagacagtctaagaatgcatggtggtggttttcccagggcaattccaaacctttactaatttacaaccagtccgaagaataaaacgttttgcaactcctgcaggattaagaacttactgaattttcaactttgttttagttttgaaagacccaagtgtcattctcagtagacattttgaaagacccaaatgtcattctcagtaggtacatctcagtaacatctgttgaagggtataacaacgaagcttgatccaccagtggactgaaatgatactgggcttactaagactgaagagttcctataaccagtaattaaaaatgggccagcctcctataaaccagctgttaaactccaatagcatgggggaaaagctcatcttattccatgtaggtagagaagaagcctagaaacataaacagtgattccttaagatcagagcccattttttgttgttgttcatctctctattccagaacatgcctgaatagaacattaattcacatggaagagattcaaaatacataggttatatgaccttcttaaagaatatgtcccagcctggcgtgtaagcctgtaatcccagcactttgggaggccgaggcgggcggatcacgaggttaggagttcgagaccagcccagccaatatgatgaaaccccgtctctactaaaaatacaaaaaaagttcgccaggcggggtgatgctcgtctgtaattctagctactcaggaggctgaggaaggagaattgcttgaacccagaaggcagaggttgcagtgagctgagattgcgccactgcactccactctgggcaacagaacgagactccgtctcaggaaaaaaaaaaaagtttgtcccaagtaggtggatatttttcccataagtttagtgactgtttcctgaacccaaatctgaagagggtttctgtacctgttcctgatgctgaggatagtatgagaaatagaggttggatgttaaaatgttggcatttctgggaccttttgatgattcatagaggtattaaattagtagttggaactcttccagaaaatgttagattgtatctttttttagaaaaagactatattgctatatttcaaaaatgatccatcagatgtttctattatgctaaaatactatctttggattttactatatgcaaagtttccaaatttaataaaattttcttaaaaggacttaagccaatgaaatttcttttaattgttcatctataataatttttcattaataagccatctgtataagattaatataccaggtaagtagacaataaaaattgaaactgaaataaaaaacaatcttttttttggcaatgagctacatagataacaattgcatgaatgtaactaatgaaggtacataattatcataaaaaacatgaaaaattataattatcataaaaaagaaacatgaaaaattgcatggatttttgtttgctttttattttgtatgcttcaactttggacttagagattttatcttaaaatgtttcttttccccccccccattaatcaggcaaaacacattcttggtcctaagagatttcgatgggcttgttcaagttatcattccccaggatgaggtaatagaaaatttcctgttattatctaaaagcttctttgatgctattgctggggtaagctaagtagttagatgaatatgttagaggttttaaattcagaagtttattgttaatgaaaactgaaaaatataagcaatgttaagacatagcaaaaagaccagtgacccagtagaattaggaacccaggatacgaacaaaaaatttagaggaaaaaaatatataaatggcttgtagacataatgaaagtatgcccagcctcactcataggtagagaaatgtgaattgaaactgcatgtaattgtcatttttaacacattagattgacaacacactgtgtttgggaaagcaggtgctcaatacctggagggagtacaaattggcactagctgaagggagagcaatttggcaatatcaaaactataaatgcatatatcctttgagccattaatttcacttctggtaaattatcttatatctagacttatacagatataaaatgacatatgtacaaggatattcatttcaggattctttttaacggaaaaaaattgggaaccacccagatgtcctccaataagagactggcttaaaaaataatgtatattcttacaatacaatactctactcagccgtacaaaaaagaatgaagaagttctattctaatagggaaaaaaaaatccaaggaatactgttaagtgaagaaccctgtattcttgagtatacaaaagagcagctgttaaactccagcactctaagtgctgtcatctgtataaaaactgggggaaggatgcagaatatacattcagtgtgtgtgtgtgtgtgtgtgtgtgtatttgcttgtatatatgttaggaaatgtctctggaaggatacctaagtatctggtaacattaggtgctgctgggggaaggaactgagggcgttgaaaacaaggataggagggaagctttttactatatctttttgtaccccttgaatttgaagccatgtgacggtattactgctcaaaaaagtatttaatttaattaccattgaaattagataaaatatgacagagtgatattctgaaaaaaaaatttttttaattaaaaaattcaaggccaggcatggtggctcacacctgtaatcccagcactctgggaggccgaggccagcagattgagtacaggagtttgagaccagcctgggcaacagtgaaacctcgtctctactaaaatacaaaaaattggccaggtgcggtggctcactcctgtaatcccagcacttttgggaggctgaggcaggtggatctcgaggtcaggagtttaagaccagcctgaccaacatggtgaaaccccgtctctactaaaaatacaaaaatttagccgggtgtggtggcgggctcctgtaaccccaactactcaggaggctgaggcaaaagaatcacttgaacccagaggcagaggttgcagtgggccgagatcacgccactgtactccagcctaggcaacagagcaagactctatctcaaaaaaataataataatacaaaaaattagctgggtgtggtggcatgtgcctgtagtcccagctacttgggaggctgagttgggagaatcacctgagcccaggaggttcaggctgaagtgagccaaaattgcaccactgcactccagagtgcacaccagagtgataccctgtgtcaaaaaaaaaaattaaaattaaagaattagataaaataaagaacttccatcatacttactgggcaaagttggtttctattgcaatttttactaacgcttgtatgcctaagaaaaatattatttattcagctcttaagttttgaaataaataaagagcaatgaattatcttttagggatcaacatccagagatgagtatagctaaccctggagaactcctttgactctgacccattattgctatgggatttaactgcccctaagactaaccctggagacaattgcttttcaagtatgtgggacttgtttgcactaataatagtcattcttacccttattttcctttaaggaaagtttttttaaagctcttaactaatagttttacttgctgtattatatagagtcaaaatggggatgcagtttttactaaatttggtaataaagtcattaaggagcagccccagcctttatggtaattaagctgtgactattaacgttttttaaaccatctacttataattactgaagattcctgtaagttcatttgtttctcagaactcttttcccccttgttctgtagtcggcagcctctgtgaagaagattttatgtgaagcccctgtggaatctgtggtgcaagtgtctggtacagtcatttcccgtcctgcaggacaagagaatccagtaggtagtttcgaagatatctgtgtaatttttgcttgtatgcatttgcaccatctgtgtacacattctggcaacacatgactggacattaggcactaaagttgaataaattctacaaatgaactgacagatttcaaaatcttgactataaacaaacacatctatgtaaatatgcatgctaagtctcactctgtcaccaggctggagtacggtggcgtgatcttggctcactgcaacctctgcctcctgggttcaagtgattctcctgcctcagcctcccgagtagctgggactacaggtgcatgccaccacgcccagctaatttttatatttttagcagagagagggtttcaccatgttggccaggatggtcaccatctcttgacctcatgatctgcccatctcagcctcccaaagtgccaggattacaggcgtgagccaccgtgcctggccctttttttttttttttcaggacgggtcttgcagtattacccaggctggtcttgaactcctgggcttaagtgatcctcctgtctcagcctcccaagtatcagactgcaaggatatgccatgacatttgttgatatctgaacacatcagccacatatgcataagaatgtcaaaatcatgcacagacatgtatgttttatactatacactataaggactttgcacattttacatatgtaaataaatgcatagattctacaaatgtgtattttgtgtatatcctgatgagtaatttttaaaacccttccttctcactctccaagaaaatgccaacaggtgagattgaaatcaaagttaaaacagctgagcttctgaatgcctgcaagaagctgccctttgaaattaagaacttcgtgaaggtaccaacctctgttattaataaaatagagtatctagaaaatgttgatgactagtcaagtattttcagagttttttaaagaaaagtttaacttctacaaaattaagcattttattgtagacacatcatgaagtgttctcttagttctacaacttcttggcacactgtcctgaaataatgacagttcagtaaactgttgcagtccctaaatacctagactgttttttcagacagattaaaatgtgattctctctttaaaacttgaggtgttatattattcaagtttttcgttgctattgtttaacatttgaaaggaaatttatgtctagcttagaaatggccagatgggacaggggatcctgtatctattaagtgataaaatgtgtgcttagagcaacgcttgacctcccaagcatataaatataaataggattaccataatttagaatgttctttgccaaagtttaagggcttgatggagctgtacactcatatgattttcagctttgtcacagtttatagacttatatattcctaatttttaaactgatctattaacagatttttaattagtcttaattaattagtcttacatttaagttcatggccaattagtcttacatttaagttctcaatacttacgtttaagttcatggccaattggtcttacatttaagttctcaatacttaattatctaattagaaagagcaatgtaattatagagttgaccttattttgaaaaagaaaatatatagttttccccagatgagcattcaaaaagagaagttatagacatttcctaagttttcagcacaaagagggatgcagagatttgtagccttgaaaataagcaaactaggctgggcatggtggctcacacctgtaatcccagcactttgggaggccaaggcagacagatcacaaggtcaggagttcgagaccagcctggccaatgtggtgaaaccccgtctctactaaaaatacaaaaattagccaggcgtggtggcaggcacttgtagtcccagccgctcgggaggctgaggcaggagaatcgcttgaacccgggaggcagaggttgcagtgagccgagatcatgccactgcactccagcctgggtgacacagcaagactccatctcaaaaaaaaaaaaaaaaaagagagagaaaataagcaaactatttctactagtacagccatggagattccatccactgtccctttgcattctttacacttgtagtcagcgtcccattcaggtgaatcttctactctgatgtatctttttttaggagatggggtcttgctatattgcccaggctggcctcaaactcctgtgctcaagtgatcctcccacctcagcatcccaagtagctgggattataggcacatgccaccatgcccagatacagcataatggtgctgtgtatttttctaagagacctttgaaatctttaaatttttttcaagattcaactatgggcttaaattaatggataaatgtttagtaaagtaggcaaatttcagtcagtgaagagtgatattattaataatgaatagtaaaaaaatgtaaaatctgcactgatgacaaacttagaagttgtaggaattaacagcatacagtgggctacttaatgatagaaactaaagacagagctaaaatttttgaaaattcaaactctttctaaagataatacctttctaatattgaaaaatatttaaatataaaaatctttcaatttctttagaaaacagaggctcttcggttgcagtatcgctacttagacttgcgtagtttccaaatgcagtataacctgcgactgaggtcccagatggtcatgaaaatgcgggaatatctctgtaatctgcatggtaagagaaatgcctggatgctctttggagctttgtagcatctcttctattttattcagcagttttattgtatcctttccttagcatgaggtcaagatgttgccagaagtctggaattcactcaatgtgtaatgtagtttttgaagaaaagttaacattattttaaagatgataaagatgatagtcgctattacattgattaatgtattatagtatttcccatcatcatcaaaggcaggacagccctttggctttttctataagatttcttttcttttttttttttgagacggagttttgctctggctagaatgcagtggcattaccacaactcactgcagcctcaaccttttaggcttaaccgatcctcccaccacaccttcccaagtagctaggaccacagacatgcaccaccacacccagccaatttttaaaaattttttgtagagacagggtctcattatgttgcccaggctggtctcaaacttctgggtttaagcaatcctcccacctaaccatcccaaagtgctgggattacaggcatgaaccacgatacccagccagttttcttaattctttatcatgtgcatacatcacttattgggagctcaaaaatgtcatgtgaattaaactagacatctcattcagtcctggactttttctgctatatttgtgttatttctacactaacagaacatttaaaaaatcagaatagttcagtagacaagaatccattaaatatttagaattattttatgtgaacagtatgctttatgaacagaatagtatttatgaaaatcttcagcttccttcttagatttgtagaaaccagcaccagtaggcttggtagcttatttcagctaaaattcttaattaaagggaagcctcagatttgttgtactatattgtggacatcatatatgacaaatttcacattcctatctactaagtgataatgtttctctctttttagggtttgtggatatagaaacccccacattgtttaagaggaccccaggggtatgtatattccttcaatcagtctattaataatgtcctattagttataaagctagactactttgcttttatattcacttggtccacttttatttactgcctcaggatggtcatattaactaggtttttctgaagaattgagaaaattatttgggtattttgagtcagaatcattttattccacataaattttctttcctttgagtttttttgtttttttttttttttttttttttttggtttgttttgggtttttttttttgttttttttttttttttgagacagtctcactccatcacccaggctggagtgcagtggcatgatctcagctaattgcaacctctgcctactggatccaagcgattctcatggctcagcctcctgagtagctgggattacaggcatgcaccaccatgcccggctaacttttgtatttactttagtagagacggagtttcaccgttttggccaggctggtctcgaacacctgacctgaaatgatccgcacaccttggcctcccaaagtgctgggattacaggtgtgagccaccttactcagtctcatttgagttttatagatgtaatcattaataaattggtattttttgtttttgtttttgtttttttagacagtctcgttctgtcacctgaatccgcctactggattcaagtgattcttctgcctcagcctcccaagtagctgggactacaggtgcgcaccaccacacctggctaatttttgtatttttttagtagagacggggtttcgcatgttggcccagctggtctcgaaatcctgacctcaggtgatccacccgcctcagcctcccaaagtgctgggattacaggcgtgagccaccgcgcccagccaatgaattggttctttaagaacaaatctattggccgggcgcggtggctcacacatgtagtcttagtactttgggaggctgaagcaaggaggatgacttgatcccaggagttcaagaccagcttgggcaacaagaccgtatctcttgtcttaaagaccctaaagaaaaaaaaatggaaaagaaaaaaaattattttaaagaacaaatctcttatatattaaaaattgacatttttcggccaggcacagtggctcacacctgtaatctcagcactctgggaggccaaggtgggcagatcacctgaggtcaggagttagagaccagcctgaccaaccatggccaacatggtgaaaccttgtctctactaaaagtacaaaaattaggccaggcacggtggttcacgcctgtaatcccagtactttgggaggccgaagcagatggatcacctgaggtcaggagtttaagacccgcctgaccaatatggtgaaaccccgtctctactaaaaatacaaaaaaaattagctgggcatggtggcaggcacctgtagtcccagctactcaggaggctgagacaggagaattgcttgaacccaggaggcagaggttgtaatgagccaagatcacgccattgcactccagcctgggcaacagagcaagactccgtctcaaaaaaaaaaaatattagccaggtgcagtggcgggaacccataatcccagctacttgagaggctgaggcaggagaaccgcttgaatccagaaggcagagtttgcagtgagtccagattgtaccattgcactccaacctgggtgacagaccaagactctgtctcaaaaagaaattttttttaataaataaaaatggacatttctggccgggcgcagtggctcacacctgtaatcccagcactttgggaggccaaggcgggcagatcacgaggtcaggagttcaagaccagcctggccaacatggcgaaaccccgtctctactaaaaatacaaaaattagcggggcatggtggtggcaggcacctgtaatcccagctactcgggaggctgaggcaggagaatcacttcaacctgggaggaggaggttgcagtgagccgagattgtgccatcgcactccagcctgggtgacaagagcaagattctgtctcaaaaaaaaaaaaaagacatttctaaacattaatagttactcgatttatacagtctatgaaattataaaactacagtttaatttggaaatgcaattaagaattacttggataggaaatgatacacaaaattcattcatctagtaacaaaattggaaattcaattccgcaagcataaacttaacacctaccgtatacaatggtgtttaaagtctactatgtccaagtctttttagggactcaaagataagcaggaaattgtctctgtcattgtaggaactttgttctttagtcattcattgataaactgaagtaacaacttctactagttagttatactttgggtttgtttttgttttttaataatctgtcttctctctctttctctctctttgaaagggtgccaaagagtttttagtaccatccagggaacctggaaagttttattctctccctcagagtcctcaacagtttaagcaacttctgatggttggcggtttagacaggtgagctttttttatgctagcagttgtcagaaaaggaaaagagaaaaacaaagggaaaaaaggaaacacaaaatcctctctgttctcaagagaaggatagaaaatttatgagagtttggagaatacttataaaatgccctcataatttatagtcatcctttattaaaggtttattgggtggccactatgtacaaagctctatggtagtagatgtgagaggggatttaaaaaaaaaaaaaaaagaataggttctactctcaaggtgttaaggctagtaagccagaataggataatgaataaaaccaactgtgatataaaccaaatgtaaatgtattgagatttgcaagttaggtgttaagagctttaaaattatactttttgaggaaatatagaaaactttgtgagctagatcgttgaggacagagctacatttcagcaggtgaagatgagagttggaatggcatagcacagaaagtctcaagtgtatccatggcacagtaaagatttcactttggccaaagcaaaagagtatatatgaagaagcatgggctaaaaaaaatgttttaataaaaagagctggcatggactgatttgcatgctagtctaaatacatgaatatccagaggtgccagtgtttattttgaaaacaatatatagaatagttaacttctcataggtcagctgtatgtctaattcgattaaagcatcataaaaaataaaagtatttcttacttttttttttttgagacagagtctttgctctgtcacccaagctggagtgcaatggcgcaatctcggctcactgcaacctccgcctccctggttgaagtgattctcctgcccttgcctcccgagtagctgggattacaggcgcacgccacccacgcccagctaattttcgtatttttagtagagacagggtttcaccatgttggccaggctggtcttgaacgcctgacctcatgatctgcccgccttggcctcccaaagtgctgggattataggtatgagccgccatgcccggcccttcttacgttttttaagtatcattgttttatagcttgcattgctttaaacttttggggaaaagtgtgtatgtcttcctagaatcataactcaattaatgctatttctcaattgtagatattttcaggttgcccgatgttatcgagatgaaggttcaagaccagacagacagcctgagtttactcaggtacaaagttatattcacttgtttcttaaaattcaggcttactattttgaaatagtattttcaagaccagtgcagtattaatactttacttctcattacattttatccatcagatatttaattaaactcacctgcagttgagaaactaattattcttttttttttattcatttcatgtgtccttttttaaatttttttctttccttggatagcacaggggccacactgtcattcaaattttagtatgtgtgctgccaaaacgagcatgtgtccttttcataaagaatgtggtcagcaactaaggaatgccagaagttcctaaagtgttctaatgttcatgataaagtccttaaaacaaatctcttatatattatgaataattttatatattgatattttaatctaatatgtggacttaccaaagctgttacgatttgctttctgtatgatagcattttattttactttatattattttatttattttattttttgagacagagtctcgctctgtctcccaggctggagtgcagtggcgcggtctcagctcattgctgcctctgcctctcaggttcaagcaattcagctgcctcagcctccgaagtagttgggactacagatgcgtgccaccatgcccagctgattttttgtgtttttattagagatggggtttgaccatgttggccaggatggtctggatctcctgacctcgtgatccacccgcctcggcctcccaaagtgctaggtttacaggcgtgagccaccacgcctggccaatagcattttaatcatgtgttgaagtgaaaaaattatgagctttggagttggacagacctgggatcagatgtagcttcgctgcttactaattgcacatacgcaaataagtaacttagttctctgagccttcatgaaatggttgtgggaactaagcaagttaatgtatgtaaggccattagcacagtgtctgacataaaagagatgtacaataatatttataccctctgcatgtattatgtgcaaaattctatagtaacttgaaagcagaaaaatatataaatgtgtatatattgtggctaaattagtttccatatggtactttggtttcagattgacatagagatgtcatttgtagaccagactgggatccagagtttaattgagggtttgctccagtattcctggcccaatgacaaagatcctgtggttgttccttttcctactatgacttttgctgaggtgctggccacctatggaactgataaacctgacactcgctttggaatgaaggtacttatcttcacttttctaggactctgtccccaaataatcctgcagtctttttaaaccactttgaaattgacaagtgttacacactgttagatgatatttttgttgttaccttgttaccttcgttgttacagagctagagcaagagagaataatagcatgttagcaatacagtgctttctatctttcatgttccaagatccatttccaagagcgagattcttgctataaagtttttattacttgcaagttattgattatatggatatgaatggtaacttgaaagaaaaaataactattctttccttttcagttttttttttaatccaaggagttactaagtttccttggtccataaaaagctcaaacatatgacaatgtttattcaaattattactatctgtaagtatttaaagcaggggtagaatttatatagaacagtttcattaccaggcctctacttgtttgctcttaaagagcaatatcccttgatccctgtaatgctagtgacatttctatatctcagttctcagtgcacattctttagaaattggtcctgcctggtctgtgaatagtcagtggtcaattcttagaatgaaaaaaatacaatacacaaaaagtcataactaccaacttacagctgccaactcaactacttcttgtttcttcgtttgtaatatggaatagtggttctttttttgtatttttttgagacgtagtctcgccctgttgcccaggctggagtgcagtggtaagatcttggctcactgcaacttcggcctcctgggttcaagcgattctcctgcctcagcctcccgagtagctgggattacaggcgcataccaccacaccggctaatttttgtatttttagtagagatggaattttgccatgttggccaggctgacctcctgacctcaggtgatctgcccacctcagcctcccaaagttctgagataataggcatgagcctctgcgccgagcctggaatcttaatctggttcttaagtcagactgcttgtgttaaattctggctctgccacttactagctatgccatcttgggcaagttccttatttctgtgtcttggtttcatctatgaaatagggataataaagagtgctaacctcatatgaaatgaatgagtatatgtaaaacactggtcatattgcttaacccatggtaaacactctttgaatgtattctataaatgttaaattatcaagatctattctcttctttaaaatcttgtttgtaaaatgttttcagataaaaattacttcatatttagttatctctttttgttacccattttccagattatagatatcagtgatgtgtttagaaacacagagattggatttcttcaagatgcacttagtaagccccatggaactgtgaaagccatatgtatccctgaaggagcagtaagtgaagtacagttctatgtttctctagaatgtatgctttggaagtaactttgtccaatactgtcatatttaaacttcagaaagaacaattctttttaaataaaaatagggatttttgctgggcatggtggctcacacctgtaatcctagcactttgggaggccgaggcgtgtggatcacttgaggtcaggagttcaagaccagcctggctaacatggtgaaaccccatctctactaaaaaatacaaaaaattagtcaggcgtggtggcatgtgcctgtaatcccaactacttgggaggctggggcaggagaatcgcttgaacctgggaggcagaggttgcagtgagctgagatcataccattgcactccagcctgggcaataagagcaaaactgtgtttgaaaaaaaaaaaagtaggtatttttatacagaatctaaagtatttctaaaaccataagtagagaacaataaaattttatgaatgtgagtttacattccagatccggggtgtttttcttttttcttttttttccccccttttaaacaatgctatcagccaggcatagtagctcatacctataatgccaacactgtgggaggtcaaggcaggagaattgcttaagctcaggagttcgagaccagcctggggaacatagacctcatctctacaaaaattacctggcgtggtggctcacacctgtagtcccagctattctggaggttgaggtccaaggatcacttgaggcaaagtgttcaaggctgcagtaagccatgattgtgccacggcattctaacctggataacatagcaagaccgtgtctcaaaaataaatacataaataaatgatgctatgaagtactcctgtacttcattgtggataatatgtgagcataaaataatacgtagtattctgtctgcagcctcagttgtctgtctatctcttagccctgtatcagcaccagcatggccattgcatgttgattctttatcttctgagagttctcatctcagttgcactaataacagggaaataaaaggagatggagctaaaaaagcaaaaaggaaggggaagaagtgggagtagaagagagagagagaatggttgggctgagcaagtgctgactctaaagcaacggtacacgtctcttttctgtaggtagtacatctgctttaaaaaataatttcataagaagtattccagttatattttaaataagattatgattttgaaagtctatactcatttggatacataagcattatattcagaatggagtaagaactcaggaactcagtctcattactttctttttttttttttttttttttttttttttttttagagtgagtcttgctctgtcgcccaggctggagtgcagtggcgcgatcttggcttactgcaacctccgcctcccaggttcgagcgattttcctgccttagcctcctgagtagctgggactacaggcgtatgccaccatgcccagctaagttttttttgtatttttagtagagatggagtttcaccatgttagccaggatggtctcaaactcctgacctcaggtgatccacccgcctcggcctcccaaagtgctgggattacaggcgtaagccaccatgcctggcccctcattactttttatttacttcatatattcagtaaaaagtaatttattgtcatgcggggcacggtagcccacgcctgtaatcccagcactttgggaggccaaggcgggtggattacttgcggtcaggagtttgagaccagcctggccaacatggcgaaaccctgtctctactaaaaatttaaaaattagctgggcattgtggtgggtgcctgtaatctcagctacctgggagactgaggcaggagaatcacttgagcccagtaggcagaggttgcagtgagcatgagatcataccactgcactccagcctgagcaacagagcaacactccatcttaaaaaaaaaaaaaaaaaaagtaatttattgtccatactctagtccagacataagaaatatgttcaggtaagctcagtatgatattttgcctatcattatttacaccatttcaagtttgttctttctcaagtagatataagaactgcaggagtgtggatcatgttttcatctttttataccttccgtacctagttaaatgccacattaatatagttaatgatatgtggcatatgggagaaataagatggttaaagtatgatttcacaaatcacatggtttattgccatacaaagaaaattttttcttaggttcacaatgcttaaaagagagagagaataagggccaagcgtggtggctcatgcctgtaatcctagcactttgggaggctgaggcgggcggatcacgaggtcaggagttcaagaccagcctggccaatatggtgaaaccacgtctgtactaaaaatgtaaaaaattagccaggtgtggttgtgcgcacctgtagtcccagctactcgggaggctgaggcagaagaatcgcttgaaccccggaggcggaggttgccgtgatctgagattgcctcactgcactccagcctgggcaacagagtgagactccctctcaaaaaaaaagaaagaataacatgaacaatcctcacagggaaaacactcagtagctgaggtgcattaatcacatagcgagtgagttccaaaattattaaagtccacttgctctattaggatggaagtagtcctctggggaaggtaaagtctaattaaagtttgaggtgtactcttatatgagctgttcttgggagaagctggtttgaccaccacagtacacactgtatctaaggtccctcgatgctagagggcagtgccagtgtgggtgggtgaggcttcagagattagctccaagactaacagggtatcacccatctcttggctgtaggagaagcagttgacagagtatagccagtcacagcatgtgctatcaaagtgtctgtcgaactcttaagtttatatgtatttttgaagtccagtagttgaggtcagtaattcacacatgggagttatgataaggtttgaggtaacattcctggggggaagagggagttcactcgaagttctcacataggggatctgataaaacatcatgctctcgaaaggagggggaatacaccccaaaacatcaaaccatgttaagtgtttggatcatttcaaagttatgtaacatgataaccataatgtctcacttgaaagacactgagataatttcaaaagaaagattttaagaaacctcaaataatcaaattctgaatccttttattgatctgaaagttttctttcacaattcagttgtagacattcatgttgaacatttatcctgcatattagatatagagggtctcctgtggaatacattcacagctatttccaataagagctgcatgcccagcgtggtggctcacacctgtaatcccagcactttgggaggccgaggctggccaatcacatgaggtcaggagttcaagaccagcctggccaatatggtgaaaccccatccctactaaaaatacaaaaattagccaggtgtggtggtgggcacctgtaatcccagctacttgggaggctgaagcaggagaatcacttgaacctgggaggtggaggttttagtgagctgagatcacgccactgtactccagcctgggtgacagagctagactccatcgcaaaaaaaaaaaaaaaaaaaaaaaaaaaaaaaaaaaaaaatctgcataactggaaaaaataagcactgtaacaagctttaaaaatgtgtcatttggtagcagaaattggatttttttttttttttttttttttttttttttttgagacagaatctcactttgttacccaggctggagtacagtggcacaatctcggctcactgtagcctctgcctcctggtttcatgtgattctcctgcctcaacctcccgagtagctgggatttcaggcacctgccaccataccagactaatttttgtatttttagtagagacggggtttcaccatgttggtcgggctggttttgaactcccaactttcaagcagtccacccgcctcagcctcccaaagtgctgggattacaggcatgagccaccgcgcccagcccagacattgaatttttattaaatcttactattgtaatagaaagacacaaaatatatttgtcatttgatcgcataaccatgtttatgaagctaagtgtcatactgacaagtttactttgatttttctttcatcagaaatacttaaaaaggaaagacattgaatccattagaaactttgcagctgaccattttaatcaggtaaggagttaattagagcagtttttttccttatacagattcaatatttttaactattattaactaaactatcattatcattagttttgagcatcttgttatttcagatcattcttctgcttttatttactttttattttatttatatatttattttgaagatgtagtcttattctgtcgcccaggctagagtgcagtgttgccataacagctcactgctgccttgatttcttaggctcaagcaatgctcctgcctctttctctcaagtagctaggactacaggctcaggccaccatgctgcccagttgcacccctagtcccagctacttaggaggctgaggtgggagaatcacctgagcctgggggtcgaggctacagtgagctgagatcgcaccaccgcactccagcctaggcatcagagcaagattccatctcgaaaaaaaattgggctgggcacggtggctcacacctgtaatcccagcactttaggaggccaaggcaggcggatcacttgaggtcaggagtttgagaccaatctggccaatatggcgaaaccccatctctactaaaaataaaaaaaattggccgggcgcgttggctcacgcctgtaatcccagcactttgggagggcaagacaggcggatcacgaagtcaggagattgagaccatcctggctaacatggtgaaaccccgtctctactaaaaatacaaaaaaattagctgggcgtggtggcgcgggcctgtagtcccagctactctggaggctgaggcaggagaatggcgtgaacgcaggaggcggagcttgcagtgagccgagattgtgccactgcactccagcctggacgacagagcaagactctgtctcaaaaaaaaaaaaaaatgcaaaaatgtgccgggtgtgttggtgctcacttgtaatcccagctactttgagaggctgatgcaggagaatcgcttgaacacaggaggtggaggttgcagtgagctgagatcacgccactgcactactgcctgggccacagagcaagactcagtctctaaataaataaatattagctgggcatagtggcacatgtctgtagtcccagctgcttgggagactgaggcaggagaatcacaagcccaggagttcaaggctgcagtgagctatgattatgccactgcattcttgcctgggtgacagagtgagaccctgtctctaaaaaaaataaaggatccagccaggcacggaagcgcatacctgtaatcccagcactttgggagcccaaggtgggagtatcactggagcccagaagtttgagaccagcctgggcaacatagtgagacctcgtctctacaaaaaacagaaaaaaaattagctgggcatggtggcacacacctgtcatcccaactacttgagaggctgaggtgggaggatcacttgagcccaggagatcgaggctgcagtgagctgtgttcaccccaccgcactccagcctgggtgacacagtgagaccctgtctcaaaaaaaaaggaaagaatcttaggtatgataacaggaataaaatgaaaccatataggagtaattaaattatgctataatcaaaggaattaatattaaagttcctatttaaaatcttgttttctaagacttaatagaggaaaaatgctcttataatgatatgtaagaaaaggaggctataggactatatttatactgattataaccatgtaaaaacactatatttgtatattgaaaatggactacctacctctactaccactatttcccaagcctcatacctcaagcacaacgaacaataagtagatttttatataagaaaaaaagatcaggttagtggttcccaaaatgggttgagacaaaatcagaaaagtcagggcaatataacaagcttttcataaagttaaacaaatttaaagaactatcctttttttctctgtcggcggtggggatggcggggggatgaaatatgtcttttctttataaaattaaaaattggcaaccctttatcttccaattttgtttatttttattttattagtatataaaatctgcatctaagaaccataggaccaggaaataagcctgaaggttaactttggcagctttcagttgatgggactattattacattttcttctttcattcttctctctcttctcctgttttctttttctttcctaatttcctgaacttttatataagaaatgggtattactactactattttttatgagtgttttaacttgatttggcttctaattgctttcagaagatcttatgtgtttttagcaacatatggcatacacatggttcaaaaaataaagaaccattaatgatgaaatgcaataatcatttgctctagcctgccccatccatcctagtattctgccagagtatctctgtttttggaaatatctctacatactttttttttctttttacttaattcatttaaaccttgttaacttcctgtcatgagagatgaggctcacatatacagacctcacctagttactctgtaccttctgcacagctgtctttctgaacctttttttttttttttttttttttttgagacgggagtctcactctgtcgcccaggctggagtgcagtggtgccatctcggctcactgcaagctccgcctcccaggttcacgccgttcttctgcctcagcctcctgactagctgggactacaggcgcccgcgaccacgcccggctaatttttttgtatttttactagagatggggtttcgctgtgttagccaggatggtctccatctcctgacctcgtgatccgcccacctcggcctcccaaagtggtgggattacaggcgtgagccaccgtgcccggcccttttcttcattcttttctgagttgaagccacccatcctggatcccaggttttcctctttcttttttgtgttggagtatgtaatcaagtaacttcctaagaaagcatgtgagagatcaacttactgagttcttacaaaatgtctttatgtttaaaacctcacacttgatcaataataatttggcttagtacaaaattttgaattgacagccatatcatcttagaagagtgctgtccaataaaactttctgtaatgatggaaacgttttatgtctgcattgttcggtgtagttgttgctagccaatgtcgctagtgaacacttgaaataggatagtacaactaaagggctgaactttttactttatttcattttaattaatttaaatgtaaatagcaacagtgcattgctagacagcacagctttagaacatttaaggcattgctttactttcttctcccatctgttgttactgatgagaagtctgatgctttgatgcttgtgtgaatttattccattatagcagagctggttttttctcattggaagctttttgccttctgattctttatgttctgaaatttcagagtttgtttgccttttgatcatttttcatttaatgtgttacacacttgaagagccctttcaatacgaaggtttatgtctttttatgtgtagaaaattattttattatctaatgattttgacctcatcattttttctagtctctctttggaatttctactagttgtatgtcaaaccaatttaacctcttttcttttgcatgtcatttttcaccattttctttgtcttgttctattttcctggggatttcttcaactcttctgttgaatttttttttatttcccagtagcttttttcactgcatcttattctggttttattcataaaatatatttttgagtacctttgaggattcaagttctcttttggtccataacttatgttttctctggggctaattttttgggtttatcttggtcttttttttttttttaatgctgcagagtttcttcaatgtacagtgattgttggttatctgtacatattcaagaaaggggcattttaaaagctggttggggccgggtgcagtgactcacgcctgtaatcccagcactttgggaggccaaggcgggcagatcgcttgaagtcaggagtttgagaccagcctggccaacatagtgaaaccccgtctctactaaaaatacaaaaattagccaggcatgttgacacacatctgtaatcccagcgactagggaggctgaggcaggagaattgcttgaacccgagaggcagactgcagtgagccaagatcaggccactgcactccagcatgggtgacagagcgagactccatctcaaaaaaaaaaaaaaaaagctggttggaagctcaagagagaggctttgtaaatggttaggtttagtttagcatgagcagcaaggctgctctaggcactcaaggcttaagagtcctgagcctctccagaattctgcagggtaaaatcagttccttcttgtgctgaggctgcctccattgttctttatgccagaccttcctgcaccttgcttctttaatcattcctactcagttcacttgcagtctgccaaaaattcgcagaaatctctcatctgctgatattattctccattcttcatcccctccccctttttttcattatgttgaaatgacttttttttttttttttttttgagtctcactctgtcacccaggctggagtgcaatggcccagtctcagctcactgcatcctctaccttccaggctcaaatgattctcatgcctcagcctcctgagtagctaggattacaggtgcacagaactggcacagctactttttgtatttttagtagagatggggtttcaccatgttggccaagctggtgttgaactcctgaggtgatccacccacctcagcctcccaaagtgctgggattacaggtataagccaccgtgccaagcctactttataaaattcccttagtatcattttgaatgggttcatggagataatagagacaatctcttttaaattctcttctattgggaaccggaaatctttgtattataagaagataaattaatcccactgttcaaaaaaaaaaaaaaacgtgaataagtctttttcttttacacaggaaatcttacctgtattccttaacgccaatagaaactggaattctccagttgctaatttcataatggagtcacaaagactggaattaatcagactaatggagacccaagaggaagatgtggtcctactaactgctggagagcacaataaagcagtaagaaaaattacttccaagcatcagtgctgttgatgctgaacaatgccttactctcctatgtatatagtatacgtttgaactgtagactgttaattcataaaatggagctgctctgcataaatcttttttttttttttttaagagacggagttttgctctgttgcccaggttggagtgcagtggtgcaatcttggctcactgcaacctccgcctcccgggttctagagattctcctgcctcagcctcctgagtagctgggattacaggcgcacgctgccatacccgactaatttttgtattttagtagagacagggtttcaccatgttgcccagactggtctcaaactcctcagcttaggcagtccacccgccgcagcctcctgaagtgctaggattacaggcgtgagccaccgtgcccagcctgcataaatcttatagtgctttataatgcactgtataaaaacttaagggttggccgggcatggtggctaacgcctgtaatcccagcactttgggaggccgaggtgggtggatcgcctgaggtcaggagtttgagaccagcctgttcaacgtggtgaaacatcatctctactaaaaatacaaaaattagctgggtgtggtggcgggctaatttttgtattttgtagtcccagttcctcgggaggctgaggcaggagaatcacttcaacctgggagggggaggttgcagtgagccgagattgtgccactgcactccagcctggctgacagagccagactccgtctcaaaaaaaaaaaaaaaagggttttttttcatagctaccagcctccattggcattacttaaatagattagacctgaccctaattagaaaagccacttagattaaggggtagtgaaattagtcatataaccatgaaaaaatattttcagtgtcaagatttcacaaatgaagaaaattaggagtctcaaatttttatacatcatgcattcgtaaattgtggagggacggatcagaccactggcgagctggagggctggcagacacccctggaccaacttggtcaaagtgggaccctttttcctcaagaacagcagctgtaggtgatgagtgccatcatgcactggctgagtcatgattcttcaggggatatggaagactgaattagctttagggatctttgtaaaatatagaaaagtatagtacaaagtcaaatatgaatattaaaaatgtactgtaaagatcaagcatgatataaatttattttttcactttagtatatagttttttcaaaatgatagtgtgtctaactagtacttcatcaagttctttcttctaatctatattttcatttgtcattgtttcttccacagaaaaagtttcagagttcagcttcaaagctaaatgtaatcccccgtctccccttcccctacaatagtaaaatgaagaaagctatttatttccaaattttattatgaatgcatttcttaaaaaagaacatgggattttgttcctaactaatttggctattaaaccttctcttggtatgaactaaacatgctggtgtttcattctcaggaagttataggtctgattcctacaaggccttccttgaaagagagctagaaaccagactttcgaggaataacattaacattctgaaaatgtcacaatgaaggtccgttatgtagacgtaaatgtaagatagaatgggctgcaaaataataccctatcatgtctctaggcatatgtcactgttctaaccagctgtcctttctcagggaagtcctgcataccataggtagcacttattaagcacttagtatttgccaagcccgttctaagcactttgtatacattaactcatttaatcctcatgccaaccctatgaaagaagttctgatactgttgctattttaaaaataagaaaagtgagtcacagagcttaaaattttgctcacagtcacacagctaggaagtggaggagccggatttctaacccatgaagttgggttccaaaattcacactcttatttttttttattttttatttttttttgagatggtctcactctgttgcccaggctggagtacagtggtgtgatctcagctcactgcaacctctgcctcctcccgggttcaagcgattttcctgcctcagcctcccgagtagctaggattacaagtgcatgccaccacgcccggctaatttttgtatttttagtagtgacggggtttcaccatgttggtcaggctgatctagaacccctgaccttgtgatccgcccgcctcggcctcccaaagtgctgggattacaggtgtgagccactgcacccctccgcactcttaaatggacctctaatctgcattacctatagtgatagccagccttcactgaacattaacagtgtgccaggcacttaccaaatcctcaccacaacccttcaagagaagtgaggaaataatcagaacgactaccactcacatactttgtcaggtcctgcaccttatgtatattatcttaagcttcacagcagtcttttggagttgatatttttatcccaattttacaatgaaaaagggtacagagaagttcgtaattagccacactgagattcagacccaggtctatgaagtgctgatccctgtgttcttaatcaccgagttatcagtactcacccagttggttgagtgtgatgattgttctcaaccttgttgcaattagacttatcctcagatctttgtgtcctgagaagcaaagggcatcctatctgttaattggctaatcctttcctagagaatggcctggcttcggaatccaggctgtgtcatttcctgcctgctctgtcaagaagttaactcaatgtttacgtcttctgtttgcagtgctctttgttaggaaaattacgactggaatgtgctgaccttctagaaacaagaggagtggtgctccgtgaccccactctgttctctttcctttgggtggtagatttcccactcttcctgcccaaggaggaaaatcccagagagctggaatcggcccaccacccatttactgctccccaccccagtgacatacatctcctgtacactgagcccaaaaaggtaccgtatctatacttccaaatcaaaaggaaatgtgtatataaaggcaaagaacttcagacttcaaggtctgatgaaagataggacccagttctggaagccccagaagaaattgtggagtttgagttagtagtaatacattgtctttaaaaatctacagggtcttcaacccgtagaacagaaaaccagacattttctctaacataaagtatctgtgaatcttctaggcccgtagccaacactatgacttggttttaaatggcaatgaaataggaggtggttcaattcgaattcacaatgcagagctgcagcgttatatcctggcaaccttactaaaggtaacaaacatcatctgctatcctgggcttatttttttaccagaatatttttcagttttgtgttgttgttgttgtttgcttgtttgttttgtttttgagacattctgtcacccaggcaggtgtctactggtgcattcatagctcactgcaatctcagtctcctgtgcttaagccatcctcccacctcagcctcccaagtagctgtgactacaggcacatgccaccatgcccggcaaatttttttatttttttgaagagataagatttccctatgttgctcacactgctctcaaactcctgccctcaagcactcctcctgcctcggcctcccaaagtgctgggattataggcatgaaccactgcatctgacttaaatcagcctattttattaaacatttgttatgattggaggattcacaagatacaaaatagcatcagctatctctctacctttaatgtaggacttggaaaagtaaataataatattaaaagtaaataataatattaaatgcttaaatagtatctggcacatagcactattaaacagtactatttaaatactaattaatagtgcatattaaatacccttattataatagtgcagataaatatccttattctgcccactctaaagatgagatttactgaggcaacttacttaacttgccaaagtgacagtacaaaagtaagcagagtcaggatttgaatccaggtgaggtggctcttaagcccatgctcctaaccactaccctgcttaaaaaaaccatgcagcttgaaaaaataaaaatcaaatcaaatgaaaaccatgcagtctgaagtgactaaaaatgttgataatgttagagaaagagagagaagtttgaaaagattttatatcacttattagatactactttagctatatttaaggcagggatatattttagtgatagtggagtaatcaggattttttaaaagtaaaagaagagtctgtacaggtgcagacctaagaatttgaagtttgttggtgatgctgtagaaggcttgggtaggtttcagaaaggaaaaggtctgagagagtctggtcctaaaagatcgttttgtgggattaactgacaagtgtgaggtaggatggaaggagaactcagaccatgagatgactcctttagctttaagccttcagagtccttaaagtttaagggcattgtgaaatctgttaacttttttttttttttttgagacagagtcttgctctgtcgcccaggctggagtgcagtggctcaatcttggctcactgcaacctccgccgcctgggttcaagcaattcttctgcctcagcctcctgagtagctgggattacacgtgcgcactaacacacccggctattttgtatttttagtagagacagagtttcaccatgttggccgggctggtctcgaactcctgacctcaagagatccacccgccttggcctcccaaagtcctgggattacaggcgtgagccaccgcacccagccgaaatctgttaacttttctcctgccaattcaaagcctccaatcacccattgggttttgtgtgtttgtttgtttgtttgattttaaaaagatggagtctcactctgtcacccaggctagagtgcaatggcatgatcataacttagggcagcctcaaactcctgggatcaagcgatcctcctgcccagcccagcttccagtcagcagttttcagcctttttcattcctctcattgtcaaacttttcaagagtcactaagaatacattacttttttctttttctcgctttgtcacccagactggagtgcagtggcgtgatcttggttcactgcaacctccgcctcccaggttgaagtgattctcctgccttagcctcccgagtggctgggaccacaggcacacaccatcacgcccagcatttttttttttttttgtatttttagtagatacagcattttgccatgttggccaggctagtcttgaacccccaatctcaggtgatctgcctgcatcggcctcccaaagtgctgggattacaggtgtgagccaccacacctggcctagaatacattacttctgttgcttccctaaatagtggttctcagccctgctgcaccttacaatcaaatcacctggaaagcattaaaaaaaacactggtgccttggctacacatcagaccaactgaataaaagagttctaagcataaggctttggcctctgtttgtttgaagcttcccacttgatcctgatttgtagcctggttggagaaccatttccaaacacactttcaacatttctacatgtactgccccacaaaagttactcacaagatcactaaatccagtggcctgttcttggcccttaagttctccttcctcccggcagcatttgacaatgttgcccacttagtaatgctctcttcccttggtctctgtgacaggagagtttcctgctttttatccccacctcctcatttggtctcactctgtttgcattgtgaatacagtaaaagctgcatttactgaacaccaggcatttttgtacatgttataatcatctatgacttgtctttttcccttactaacctgcaaatcacttaaggtaattttttctttacacttttccaataaacttttattattggttaagtcagttttagctgttttaaaactcaactttgtttcccctttatcatctaagcctagatggtggcacttagtggaccttcaaaatatatttaaactgaattatcttttgaatttcaggaggatgtgaaaatgctctcccatctgctccaggctttagattatggggcaccccctcatggaggaattgccttaggtaaacaacttttccttttataagataaactgaattccattgcactgtctcaaattcaggttctcagtttgtgttggtagaggtggaaggatgagtccaagagttccatgagaatgtaagtttctgttgaaatttcagtaatatattttttaaatatatcttaacagttataaagatataacttaactgataatttgcatttgaaagatcattaatagcttaaaactgcagatcttaagtcaatattgttcaaatccccatggcctcacatacgcactcattggagtctggaaagcactgctccataatgttcagcttgtatgaaaacaggaagatgccagtgtccttctgattgccatggttactcactttgcttgttttgtcaaagcaaggaagagtaagaaattctaggaagctcacctagattgtaggccccaacaacagggacttccttctgtgtttatggagttccctgccaagcaccaaatacactgttgaatctgttttagggcctttagtaagcctttactaggaacactaatcgctgtgacaatccaagtagcatgtgaacattagtcctgaatacttttccagaatgagatagaaaagaacctctcaaacaaacaaaagttctctaaaaaggtagggaacgatggttggctacagtttgttaaagattcttatttaaaagttttctacaacttttatagaaaaactaagttatttccaacattagattacatttctcatctgttatctttgtattttactcacagggttagacagactgatatgccttgtcactggatctccaagcatcagagatgtcatagccttcccaaagtccttccggggacatgacctcatgagcaataccccagattctgtccctcctgaggaactgaagccctatcatatccgagtctccaagccaacagactccaaagcagaaagagctcattgaatcatgcataccatgcagaaagttgagcttttaggttttgtcctctttgcttccccaaggctaaagtcagatctagagttctgccacaggtctaacaatcaagtctttagatggaaggaatccaggcaacattcttcaccacaacgaagaaacagataaaagatacccaattttgacttgatttcatgcatcatttggattttttttggttaggactttttttgaagttcctttttacttaggtgtgaaagatggttctttgttgaaataatatagtggtttagtgttttcaaatcatgtttctcatacccagatagtagattattcacttaggacagaggtaatcaaattatgtgtgaaatgtaggaaaatgcttgcccctgtaaactagtgagttgatggagcatttgcttcatcatcctcatcaagagaatcatataaattaagctttataatgacatttcaaccatcaacataatatagtgaggagtagcataatattttttaataatgcagaaaacatcactgaaatgagagtcacaaatttttcttcagtgtttcagcctgagtaagttacataaacctcgcttagcctcccttcctgctaatgtgtaaaatacatacttgccctggctacctcaccgggctgttattgctggaatcagaggagataacatatatggaagataaagtgaataaaagtactttgaaaaactataaagcattccacaaatatgagatgatggtattatccatccataaataggtagatatatctctattttatagtttcagattaaacaaaactgatatcaatagtaaaagtcattttacttatcaattttctgtttttttttttagttttaaagatattattggccgggagtggtggctcacacctgtaatcccagcactttgggagattgaggtgggtggatcacttgaggtcaggagttcaacaccagcctggccaacatagtgaaaccgtctctactaaaaacacaaaaattagccaggcatggtggcgcatgcctgtaatcgcagccactcgggaggctgaggcatgaggtttgcttgaacctgggagatggaggttgcagtgagccaagatggtgccattacactccagcctgggtgacagagcaagactccatctcaaaaaaaaaaagacaacaaagatattattaatcactgaacactattttctctcaattataagtaattgaaaattctaatcaaccttagattaacctcaaatgtgcgaaaaagtgaacaccaaaactcattgtgattttaagttctaatcatacacataaaagttttaataaactaataattataaaatgaggccgggtacagtggctcacgcctataatcccagcactttgggaggctgaggcagacagatcacaaggtcaagagactgagaccatcctggccaacatggtgaaaccccatctctactaaaaatacaaaaattagctgggtgtggtggcacatacctgtagtcccagctactcaggaggctgaggcaggagaatcacttgaacccaggaggtggagattgcagtgagccgaggttacaccactgcactccagcctggcaacagaacaagactccatttcaaaaaaagacaaaatgagaacaaggtcttgatcagtgattttgaaattgttttcttctactcagtcttcacttctgccttgaaattcttttgatttataccttttttttttttgagacagagtctcgctcttttgcccaggttagagtgcagtggcaccatcttggctcactgcaacctccacctcctgggttcaagtgattctcctgcctcagcctcctatttaattaattaataattgatttaatgatttagtttaaaatgttaaattcattttaaaataacccattacatgttaacacaaatagcatgtttttattttattttattttgagacagagtctcactctgttgcccaggctggagtgcaatggtgcgatcttggctcacttcatcctccacctcccgggttcaggcagttttcctgcctcagcctcctgagtagttgggaccacaggtgccctccaccacacctggttaatttttgtatttttagtagagacgaggttttgccatgttgaccaggctggtctcaagctcctggcctcaggtgatccgcctgcctcagcctcccaaagttctgggattacaaaggcgtgagccaccacactcagccatgtttttattttaaaaataattattttcaaaaaaaaaatagaagagtaacattgttttatatttctgcaaatattttttatttctggcttaatagaagacactagattctgatatctgcttctgtatcctatctgttgttatatgctgttttggttgaagtctgtgaagaaaatctgaccccactcatatataaagttggaaaagggaggagtattttaatagctttgtctgataattatggatactctctttgataccacaccaaaatatgacaagtagtagagttccttaaaggctagttgcaatgtggattctgaaatcgtattgatgagcttttctaaagtccattggtgtaccttgtatttaaatagaacttttacctatgtgtgatatttgtaacaccagtccagtgattgatcatttggaaaatattggttcactgagttatgcaaatcttccaaatgttgacacattttgatatacaatatctaaaacaaaataccattaattaatattaccaccaatcccattacaaaagtctaagtctgaggaagctataagggcacagaagtgtatacaagccttccaaaattttaggtttcatttggaagcttgagttttatcattggcaacaaatgccatcagttttttccaagctgacttgttcttttttgagcaaatctctgccaaaattacccctaaaatatgaataatcaatttgtcaggttttttcaaactaaaaatgttctgtgaaaacaagcagctagttcagcttgtatctcaaacaattgtaactactttttctagggaaaaaaaaatctagacatccatactttatggcagatgtgcttcatgcatacttcccattttgtcacacagaatatcaaaataacgtgtactcaaggtcaagatttactaacaactaaaattccaaaactgctaaacaacagaatgctgaataaggtgatccaatttttaatattttatttgagacaacatctcaccctgtcacccaggctggaatccagtggtgtgacacagctcactgcatcctcaacctcctgggctcaagcgatcgtcccacctcagtctcatgagtggttgggactacaggcatgcaccatcatgcccggctcactttttttttctttttttttttaattgtagacacagggtctcactatgttgcccaggccggtcttgaactcctggactcaagcaatccccccaccttggtttcccaaagtgttgggattacaggcatgagctactacatacaactgaaatcttttaatatgcttgtcaaaaagttttctgattcagcaaatggcacttatatataaaagagagaacaagaagctggatgcggtggctcacgcctgtaatcccagcactttgggaggctaggtgggcagatcacgaggtcaggagttcgagaccagcctggccaacgtggtgaaaccccctctctactaaaaatacaaaaatagccaggcatggtggcccacgcctgtaatcccagctacttggaaggctgaggcaggagaatcgcttgaacctgggaggtggaggttgcagtgagccaagattgcgccgctacattccagcctgggcaacacgagcgaaactccgtctcaaaaaaaaaaaaaaaaagaatagaacttggctggatgcagtggctcacacctgtaatcccagcactttgggagggcagggcagttggatcacttgaggccaggagttcaagactagcctggctgacatggtgaaactccatctctactaaaaatacagaaaaaaaaattagctgggagtggtggcacacacctgtcatcccagctactcaggtagttgaggcacaacaatcacttgagcctaggaggcccaggctggagtgaggtggcacgatcttggttcactgcaacctccacctccagggttcagagtagctgggactacaggcccacactaccacacccggctaattttcgctttttttcagtagagaccgggttttgccatgttggccaggctggtctcgaagcctgagccataacctggcgaaaagatactttgaaatgtaacatcgtttttcacttcaaaatcaaggtattttaccaacttgtctttggtacctccccaaaaactgatctactacatttgcagtttcattcatttttccaacattaaggaataaacttgaagcgcttacattcttgtgggggaagtaagaacaaaacacataataggtcatggtggtcacatgaaaagtaaagggtaaccgattggggtaggtggtggtagttttgtgtgtgtgtttttttttgagaccaagtctcgccgttgcccaggctggagtgcggtggcatgatctcagttcactgcaacctccacttcctaggttcaagcaattctcctgcctcagcctcctgagtagctgggattacaggtgcacgccacacctggctaacttttgtatttttagtagagatgggggtttcactatgttggtcaggctggtctcaaactcctgaccgtgtgatccacccgcctcggcctcccaaagtggtgggattacaggcatgaaccaccacgcccagccttcttttttcctttgagaaagtctcaccctggcacccaggctggagtgcagtggcaggatcacgggtcactgcaacctcagcctcccaggttcagttcccctgcctcagcctcccgaatagctgggactacaatagcccaccactacacccggctagatttttgtatttttagtagagatggggtttcaccatattggccaggttggtcttgaaatcctgacctcaggtaatctgcccacctcagcacccagccaggtggtggtagttgttttacagcctgtgtgagacattcgggtgagccccaggaaatgaaagaatgtgcttatttgggggagggggaggccttttttcttagacaaaattgggcattcccaacttacacgcatttagtgcataagctgacatttcaatgagattgtgaaatgacaatgggaagggccctgaaaaaaacatcaagcataaaaggcctgggaggccgggcactgcggctcaggcctgtgaaatcccagcactttgggaggatggggtttcgtctctactaaaaataccaaaatgagttggttgtgatggtaggtgcctatagtcctagctacaagaggctgaagagaatcgcttgaacccgggaggtagaggttgcagtgagcagcggttgagatcatgccattgcactccagcctgggcaacaggattcagtctcaaaaaaaggaaaattcagagagtaactgaagttttatcattaatgggactaaagtgctttagcccagaaacagatttgtaaaaccattactgctaacaaagacatcattataagcacagctgtactgacactgaaattaaaatttgacccatcttggaattttggccccttggtcctgtttccctgggacagattgccttaaaccagttgtgccctttatacccacttttggcatccctaaacacttagtgcttgccaaaaacctatcaccatggctatggattgtagattttcccaattccattaatgcctatcactagttgggcatttctatagtattttctataacttattttcccagcctcagactcaacatgactttctccaagtagctccatcaatactttaagctcaaaaccaattagcacaggggcctatgaaacctgacaatttgctcatatggagaattaggaaatattgcactttaatgcataagacaccttgtaaaatacccataaaattttaactggctgcagtgttaatgaagcaaataccatggagttataatagcttttgaatgtgatttatgcttacagctaatgaacagatgaaaagcactgtccttttttaagtaaacactacacactccagatggattgcaaaaatttattaaaattggagacactgttttaatcttcttgtgccatgagactccatcaggcagtctacaaagaccactgggaggctgaggatcacttgagcccagaagtttgaggctgtagtaagcttcaaaggccactgcactctagcttgggtgaggcaagaccctgtctcaaaaaataagacaagacttttagccacatttacagacttcaattaaaatgctacatgggaatgcagaatatcagatattttattgtcatcaagtaatcagtgagagagttcaagttggattgagatcatcatgtattctgcaattataatagtcccaacatttccaatcctcacctttcaagcagtaagctgcatgcttgcttgttgtggtcattaaaaaccctgaaagcgaagccaacatattaatcagggcaaaatacaaatgtgtgatgcttgttagtagagtaacctcagaatcaaaatggaacggttttacagtgatatcattatatttcatttggcagaatcattacatcattggttacactgaaaatcatcacatgtaccaaaagctgactcacctagtttaggataacaggtctgcctgtttgaagatgaaaaataatacccatttaaaatttgccctactcaatttccttctcagtcacattttaacttttaaacagctaatcactcccatctacagattaaggtgtatatgccaccaaaaccttttgccaccttaaaaatttccttcaaagtttaaactaacctgcatttcttcaatcatgaattctgagtcctgaaattaagggacaatacacagtaagacaacttgcatacaattaggagtaatccaaaatctccaaacattatagaatggctatattccccttttcggggcataaactagaatgttaccgccagatacatcagataggagcgaaagacttaatattgctcatcagcgttagtctgctgaactatgttatcatcattgtatcggctttacaacacttaaaaaccagacttgaggcggggcatggtggctcacgcctgtaatcccagcactttgggaggtcagtgcgggcagtatcacttgaggtcaagagttcgagaccagcctggacaacatagctgtacaaaattagccaggcatggtgtcacatgcctgtaatcccagctactcaagaggctgaggcaggagaattccttgaacctgggaggcagaggttgcagtgaactgatagtgccgctgcactccattctgggcaagagctagactcttgtctaaaaaaaaaaaaaaaatacttggaactgctatacctttgcttctttaaaacttgctccacacagtgtagtcaagccgactctccatacctgtagaaatttaatctcctttaccaataggtagtaataggtggatttctaaaagatttcccaactactgtttcagtttaagattaatctccattttctttctcagagagattcccatctgctttaattttaaaatcatcactaacagtagctcaatcaattaacgttaacatcaataaaacatgtacctttaaaaggtatgacaggaactgtcttcatgtccttacccaagcaagtcatccatggataaaaacgttaccaggagctggaatacaaatgaggacttccattaaaatgctaaacatcattaaactcttttcaaagttgtctgtcacagggttcttcagtgttacctttgtctacatgctcatttcaggtcagacatttgatcaacatcattacacaaaccccgttccaaacatgctcaaggaaaacacataaacactgttccagacatgctcaaggaaaatacagtcagtattcatcagccaagccttaagccattagctcagcagtaagcatatcaccatcagcattttcattaagtctatctactgttttcattaatacttaccagaaccattaagctggtccaggcaagttggactccacctaagaaataagagtggtcttagaatagccacagatgagtgttcaccccctgccaaaactaacaaatgcctttagtcagttagagctaattaagaccttcatgttcagtcagcatttgcttatcatcatccaggctgcatttacaaactttcttattaatcataacaagacaagaatccgccatttatttaatgcattcagcactaggaggtaactaaaaagccatttgtgccgtaggaagtttgcccagttacctgcttacttggatacagtttcacttaccatttcaacttccagctttctgtctaatgcctgtaattttaatacaaaattgtcagcaaaaaatattttaatggtagattggtggtacactgcttaaccattaacagcaaaccacaactaccccagatacatcagacagatagtacatctcttcatgattaaatctgctgaactatgcaaccatcatagtatctgttttcacattttcttcagtattaaacttagtatcaatatgagagcaaaattctcatttgaaaagaggggagagaagcactaacatagataatcatcattgctttggctattttctaatcccttaaaagtgagaagtacaaaatagaggtgtctcacctgtgtgccaatggcttgagttaggcttgctctttaggacctgggaagaaacaacttcatgtgaacttaggtgtactctctatgttccccaactcaccattttgggtgcctcagttaagataatggtggttaagatcctcatcattctagcactcaagagtagcaaataaactgtcatcattgtggcacatccaatggctttaaacctttttgagagggaattttcaacttacttcagtagctattctcatccttccttggggacacaactagaaaacaaaaagatgcaagcaaaacagtgagaatgaacctcacagcagtcacgttaaatataaatgctgttaacattaaagcctcagaatagaatttcagaaatcccttctgtccactactcttaaagcatcacaggctgagaccacctcttagatttcattcttcccaccatactttccccaattcttacctgtccataaggtgctatccagagccacactgcatctgcacccagcaccatacctaaagagatcaggtacagattttaattcattgttccacggttcttttttttaaagagtgttctttaaaaaaacggttcgtctttttaaaccaatgatgcaggtaacataccattcattatctagcgacaggtaaaggatacacttaatgttacaaagaagcactgcacccgcagttaagaaccaccgatggcggccgggcgcggtggctcacggcttgtaatcccagtatgttgggggaccacggctggtggatcacctgaggtcaggagttcaagaccagtctcgccaacatggtgaaaccccgtctctactaaaaatataaaagcctagcatggtggcgcgcgcctgtagtcccagttacttgggaggctgaggcagaactgcttaactcgggacgcggaggttgccattaaccgatgtcgagccactgcattccagcctgggtgacagaacgaggctcggtctcaaaaaagaaaaaagaaacactaatggaaatattggtgacactgcggaatgcaggcacttaagcacgtggactaccaccgacagcctttcatgagagcggacggctgatggaggctcgggtcacggcccttaacaatagcttactcgggtgactcggcatgtgccaccatcagagcggttggcattcatcattactctcagatgtccctaccaacacaggcttcatcagaggcagggcacgagagccgaggcttctccgcagttctactctaacatagtcgcagcttaggtcacgcatgcaccatatgtgcaatcccccaccatcctcaacttgtaggccctgcaaaggcgcgcgactggcttagaagtcccagtcaattcagggtgaccttagcagacaaaggctggagcgccccaaaacccgcaacattcgcaaagataaaacatacctcacaggagtcgactcctacctcgaaaagacagtatggtgcctgggctcctgtatataagagttcttttgatgacgtcacgacgcacgctcccggcagcgtccgcttcggctcctccccctaacctccctcaatcttcctctcatccagtatcaccttcttcccaccccttaagtccgccccttttccccgcccttcctcgccattgtgggcagagacatgaccgtccacgtgatgccgtgctcccgccctcctcccgactgaggaggaagagcagagaggggagggggcgcgaggcaaggaaagctctggggatgggggaagggggggcggtgtaaggctgagtgatttccttccggcacgtcgcccgctccgtgggagggggtgggggatttcacttccgggacggtgttccggcccattccggcccatttccacccccggaggtaggtgctgctccttgactggactcgggccccacaccccagtgccacttccctgcaccggggtcacctcgcccgccctccgccgcagcgcgctcctggggcgctcagctactttccttcaccccgcctccaggcaccg

SEQ ID NO: 444 - DNA, 129577 bp, Homo sapiens
tcggtgcacactcctgcctccctctcttcctcccagcaacgccgccccatccccaccaggctcccagcaagtctccaaatgctgacttcccgggacccacagaggttgaattacagccaagaggggcccaggcgactcaggaacacacactcacacgcacacgcacacacactgcaggtgggtgagcgactcaagacacccaggaaaagacatgaacacccatgcagatggacacactgacaactgaccgatacacagacatggagtgtgggctgacacagaccgaccacacattgtaatcacatccacttgcataaactcttcacccaaacgccgatgtagagaccggccatgacccccacaacacataccacagtggatagcacgtgccctggctcaagtctgcaaggccctgagagctgaacgactgtcacatggaatatccaaggacatcaacgctggtctgtcccccagccagccctctttttgctcccataatcgtcctgccactctccatcatcttaactgtggtgctcacagccccctggctctctcccaccccggctcggagctgtccttcaagaacctagagcagtggctctcaccctgaccccaggggtggtgagaggtgatgaaatgcagatccccgggccccaccctcctggaaattctcatccagaaggtgtccgtaggcttctggagcttgtcttttttctttttctttttgagatagggtcttgctctgtcacccagtctggagggcagtggcgcaatcacagctcactacagctgtgcctcagtttctctggactcgagcgatcttcccacctcagcctcctgagtagctgggattacaggtgcatgttaccatgctcggctacttttaaaatttttttagagatgggatctcactatgttgcccaggctgatcttgaactcctggcctcaagcaatcctcctgtctcagcctcccaaagtgctgggattacaggtgtgagccgccacacctggccatttttcttttttaattgagacatgatcttgctctgtcacccaggctagagagagcagtgatgtgatcatagcttactgtaacctcaaattcctgagtttttaaacaagtgcccagtgcactgtgggcagtgggctaaggcccacccctgagacatgctgttccagatggctgtgcttgcaacacccttaactccagggatgttcttggcctggtggtggccagaccccagccttcttcccctcctccagggctgagtatgaaaatggttggaaggttgtttcagagaatgggcggacacactgcaaggtcaggaggcaaacagggcaggtagatttctgacctctgccccaacaaagattaaagtcctggagcatgtaccgtgtgtccttcggaggatggtgagcagctttgctctggggaagggggtgagcaggtgacagctgcagctggggagccaggctaggcagaagcggtcaccacctttccacggaggcatgaggtccagcgaggatggcgggaagcgcagaagacctaaagccgtgcctcgcagcctgtttagcactaagcgcacttggtttatctggtctgcgatcatgtccggaacacagggtcttctgtgtccaaagaacttgacacacatatagtgggagggagctgggtgggatttagaggttccggagttgagctgagccctaggaccaaaggtgaatggggctagggctgtgtcttcaaggaccctataagtgaagggcctgggggagcatgggggagccacaggtcaggagttatggcctactccatcccatcccaggtgcaggagcaccgggcactccaaggaggcccttccatgggggtgaggaggctgcaagaggggcagaaggttgagtaaacaaagccagaccgtgggagggtgatgagctgtgggggcagccgaggtggcagggccatcattagggccttatctccagatttgtttgaaggggaggaccaaccagggtcttatctgggtggtagaagtgctcccgggagggagggaggcatgtttgcgtgtcactgagttagttttgtttatcttgcagtgtgtatacatctacttcaggtacatatctttggctctgtatcttttaattgtggtaaaatacgcataaaatttgcctttaaaaaataattcgtggccagacgctgtggctcatgcctataatcccagccctttgggaggccgaggtgggcggatcacctgaggttgggagttcaagaccagactgaccaacatggtgaaaccccatccatctctaataaaaatacaaaaagtaggtggctgtggtggcaggcgcccataatcccagctacttgggaggctgaggcaggagaatcgcttgaacctgggaggcagaggttgaggtgagctgagattacgccactgcactccagcctgggtgacagagcgagacttcatctcaaaaaaaaaaaaaaaagaattagagatggagtcttgctctgttgcccaggttactctcaaactcctggcctcaagcgatgctcttgcctccgcctcccaaagtgttgagattacaggtgtgagccactgcaccaagccaaaatctgctattgtaaccatttttaagtggtacgctttaagtgtcgtaagtgcattcacactgtggtgtaaccctcaccaccatccatctctagaactcttctcactttgcaaaactagagctctgtacccactaaacacgaattccccatttccccctcccccagcccctggcgcccactattctgcttcctgtctctatgaatttgactcctctaggtatctcatttaagtggaatcatacggttttgtccttttgtgactggctcatttcacgtagcttcatgtcttcaagttccttcacattgtagcgtatgtcggaatctccttccactttaggctgaataacatcccattgcatgtatgtagcatgtgtgtagcacatttagctcattcctccatggatggatgcctgagttgcttccaccttttggctgttgtaaataaggcacaggtgtacaaatttggctctgtatttttgtatacttccccccacgcccaggtttgtactagattccttttttgtacataagaaaccactgaatattggcaatttcatatggtttgactaaatatatacaggtgtacctatgcagaactgtacctgtgcttgtatgtgtgtgcacgtcctgtctgtgatgtttgtgtgcccgtgtggcacggcagtgtgcatggacctgtgtgtgcatgtgtgtctgggtggcgggatagtccttgagtcggactctgtgttgcggtactggggctgtgtgtacaggaagcacaatggagaggggcaggggtgggaagactttgttgaaaggcaaggggttccagtggatcccggacatcctgataatacttgtgtgcaaatcaaatcaaatccccccaggctgcgggaccagctgcctctccctaggcagcccctccctgtgagttgagttggtcaagggcaatgggagggcagacaggtggctcccggcattggggctgggcctaggggtggtggccaagggtgatgggagcgtccagacagacccaagccctgtccctggctgaggtatgtcaggcacaggccccttaatgactgtaattaagaggaaggaaactgttttcctgtataggaggtgtgtcaggcgcctgcctggcatcactcagctgtcctggaggccacttagccttgtctattgtctctcacaagccaagcggcgtctgggcaggcaatgtcatgtagggtagggggagcagaggctgggttgcagccctccaggtgcaggctgctctgaggccagtgctgccgcatacctttcctctggcaccccgggtcaggagagacagggctcccgcagaggagcagctgggactgtagggcccggagtgccctaccagggatttggagtgcacccaaatcccttgaatcaaggcaaagtggacacatgctgaagagtccccgaggctggcttgagccaggtagcaaagggtgagaaagatttcaggtgcagaggggtaagtggagtgttcctggctggagaaagagggcaaggacatgcccaaggaaggcaggtgggggccgtggtgcaggggaagatgctaacaggaaggctagagccgcactaggaagagctcgagggccttctaaagtgctgggttcttacctagagatgatggcacaaaggctgggaagactccagagcatcgtcctaggataactcagaaacagctccaatggcgagagtgggccaaagcaccagaaacaacccacattggttgaacccagtgtggttcactgttcactgagtgtgacacaggtctcaggaggtcaccattccgcactcttgtctcatcctgataccccatgggctattgtgccactggactgagtcgaccccctggtaggaacacaggctctgccacttaatgggggagccgaacaatcacaacttctctgagtcacagtggctgactctgtagagtgggacccacactatctcctttacagggttgtcttgaggaatatatgggctcagctacgccaagtgcctggctgagagcagctgtggttgctcagtacatgctgaagtccagagctttcccagttgtgaaaggacaggggctcgatgaaggcctgaaagctcaggaagccaccgggggagctctcctggtcagtctctggttccttctagaccaaaggctggtgccaaggccaacacggtcccagccgagtcagtggggtgtggtctgtcaccactgcctctgagatctggcctctcatcacacgcctgctcacaggaggcggggtgtccatctgtctgtctcctgcattttatttctccatttgttttgaacttgggaggggaagaaagaggtgcatctgctgactcctggagccccgttattgaggcagcctccccttcccaccccctctccctctgtccaatcctcccagcatggatttagtgtccaccttcagccggcaggtgacccaaagatgagtaagagtttgtctctgccctggaggagctcacagttcagtggggaagacagactcataaataattataaaccatgcattaggctgaggtataaaccaagctcctggggtttagagcctggacctattgaagaacctcagacgagccatggccccacctcccgccccttcaagcaaggcacagcgcagtggcgggccctctcccaagtgtgaggtgaatgctgttcctggccacagggagagaaaaaaagtaagagcacccagcccaggcccgtgggtgctggttcctgactgaaacctgcagtgaggcctggcagggcctcagcctcccccgtccaacgcgctggctgggcgggaggtctccaggtgcttccggcgctaccgctgtagtccatcacttgttgacgccacgggttggtgcttggaggtcccttcctggaaattccccagccagggtctccaggatcttttctccttgttctcccctccacacggaaaaggggagcccgtggcctggtcagggtctgggtcctaggctcaccaacgtcactccagggaagtcccctggaagctacagagaacctgatgggggagcggggagggtcggggccaggggcctgaggtctggcctccccctctctaaggccaagcccagtggatagggtgggtgaggcatggtaggtgcagtggacagactagaagtgggaaccagagcaataggtacaggagggctgctcccaggggaagcgttcgaacacccctgccagctccacttccctcccactccacccccatagctgataaactctagatcgagaccagctggcatgagctctcccttcccccttagccctctcctcagaaactccttttccccctatcagtcctcctaatcgctggtctcaggaaaggattcccttcaccacctccaaagccaggcccttgttctcaagatcaggcttccatttccagagggatctcatcggagtccctaacactcatgggaagttccctactccactaagtgcttagctcatcagggtgcttcctgcccccaaatacatcttcagcacgttcctgcaaacccccttgtttcaccccctcttccgcctcctcccagtatccctccatctcttctcagcatgctgctccgagtctccttctggaagctctcctcttccctgggtccagtctaccttctgcactggtgcctgctcttcccgccacctcctgtgaatgctccttgcactcccaacccagtctcggggctgccctcacctccgggagctcatcaacttcaggatctctatacccaagacaaagccaacatccttcgtccctgaggtccatcctgaggttcgccaaggtccttcctcccccatgcccttgccctccctggagcatctctagcatctgaagtccatctgccaccagactggctccccacagatgcaaccaaggtgcaccaaaagcaatggagtggaacccagaaaaaatgactgttcagctttgctgcagggtcaccttgcaccagcaagcagattcttctcagtgcgcctatttccctattgcatcatgggtgcagcaatccctgccctgcccagctcatagggtgctgtaagtttcacttgaaaaaacacaacacatggccgggcgcggtggctcacacctctaatcccagcactttgggaggctgaggcaggtagatcacctgaggtcaggagttcgagaccagcctagccaacatggtgaaaccctgtctctactaaaaatacaaaaaaatttagcagggcttggtggcgggcacctgtaatcctagctactagggaggttgaggcaggaggatcccttgaacctgggaggcggaggctgcagtgagccgagatcacaccactgcactccagcctgggcaacagcagcaaaacttcatctcgaaaaagaaaaagaaaaagaaaaaacacaacacagagaggattcttctcctccaaagaggatcttctgccagacgtcaccatctctgggccccagtgagttctgtgactgcactctcttcaggctccacattaggcctcaagtcctgatgagttttttctcggaaatgtctctggggtttgagcttccctttgaattccatctgtcacccccggcatctcaagcccagatggctaaactcccttcctgacagagccaatccatcctggtaccactgtctctccactgccatcatgccccagtctttaccaagaatgcgcacagtggcttcctgctgcctggcagctgatgtgtgatctgtgctacccctactcatggtcccacctgatctctgcaacccttccttcccttagcagctaactcaacagttgctgcagtctgaagagcttcctgttctgtgccttcaactggacagctagtcctcaattcccgttttcctacctccttaagcctcactcttcacagcctgaagcggtggactgggtcagagccaccatacagggtacatctgggcattcccctcctggaatatgagcttaagaatcctcacctgcaaggcggcgagtgaggtgacaagtgaaaataccaagcaagcctggcatggagggaaaactcaaaagatgctggctgaagtgcggcctgggcttcaacctcagtttaagattcaccccgtcttgtcgtacagcattgctatttctcatcggaagaaatagcgatgatttcttttttcaaatttttaggtaaaacatcaatcttaggggtactgttcagtgtttctcatttgaaaacctctataatacagtcttctctgaagagtaaggaagacatatgtttcttctgatgagtaagtgtacttccttttatgtgacaatgggaactctacaaccttagggctttccattttccacctttgaccaggaagctcagagcaaggtctcatactcaattgcaaatctcctggctgacctgggggagggaggcagggtgacatggggacaaagcagggtccccagggtctgtcgtgggctggagcactcttggccccttcttatcctcgatcactctttctctaggcccctctaagcttcagtcccctcacttgtgttaaagggataataaaaatgatgagggcaatacctgttttacctgattgttgtgagacaatgcatttacagtattttataaaattttaaaaaagtcatatgaaagttgctcattagcagtccaggttttccaacataattattttccctctttttccctcccaatacctggatctgatctttcaaactttaaggatttttttttttttgagacagggtctcactctgttgcccaggctggagtgtggtggcatgatctcagctcactgcaacccccacctcctgggctcaggtgatcctcctacctcagtctcctgagtagctgggactacaggctcatgtcaccacacccagctaactttttgtagagacagggtctcactgtattgcccaggctggtcttgaactcctggactcaaccaatccgcccacttcggcctcccaaagtgttaggattacaggcatgagccactgcacccagcctacaattttattacaaactgtgtctcttaatctgctgtgatcttttctggaagaatacagaatacaaatattaataaatgacaaaatcattcctacagagcagtctccctgaaggcaagaaattgtgtccttcacttgttttgtacaataatgagttacactagaaaagcatttagctatggaaagaactttccattttggttcctatgctaagaccaaagggagtgctcaatattaagtcgctaaaataagtgaaactgtatgggtcacactgagaatggtccagaagggggctttttggttggggttgtattgataacacttggtgatttagtcacacattcattctttcatttatccaagtatacactgatgctgatcatgaatcaggcatttggctgagcactggaaaaacaacagtgaccaacacaaacacagtgtccactccacgctgaggcagctcacagtacagtgtaggaggtgggtaaaaaaatcattttaacatggtaaggtaagtgttaccagggctaggtgtggaggcttatgcctataatcctagcactttgggagggcaaggtgggaggatcaacatagtgagaaactgtctctacataaataaaaaggtaagtgctccagagcagagaaccacgtggggagcagcacggatatcgtgactgtacctggaggggacaggagagggagggacaaaggttctaggtagaggacacatagcatgatctctccaggtaaccccaagaggttcagtgtgctcagagaagagatgggtagactcataaaaacaggaatggaggcagtggccaaaccaagaataagggtagcctccaaggaacctggaatagatcttaaggggagggggattggcagagtcagggaaaggtgctgatggccaagaagtgagggctcaccaacatcagacacgatagatccaatctggctccttcaaaggcagctccatactgcaagttgctgtgttgcacgacgacaaactcctgagcagacaggactagctctgtaggcagggaccatcagatgctggagggactcacccagggcctgcatgaacactggctgactgggatgctaagaaggggagtcaggttctggaccagggctggaccaaatgacctttcaagttccttccaaatctgagcttccaggattctaaagcaagcccggtagctgaactggtgccatgagctgggatctgtggctggggagctaccctgggcagcaaatgggttaaagctcaaataacttttatatatgaattaatgtgtagagttgggagccaaaatctgttccattaatttttccatccattccaggagcagttaggtacacacagtaaagtttattttggtgcatggtatacttcactccattaaaaataaattaatcagcaaattcctgcctggctcagctctggtttatgtaaatagtgcccagctgtaatgagttacaaggtgttattatctcacacacacacaggaggcttcactctagagctccgctcgcaacaaaagcatcttaaataaactgagagaagcggtttgatttgtaatgttttcacagaagtgggatatacctcacccatatagagtttctttatatgactcattttatagcaagttaaatgaaggaagtttgatgggggagggaggggcaatatggttccccaccccctttcttcactttaagaaaatcccccaagagatgacccgcactgagggaggaggggctggtcctcaggtgctcagaccaaggtggctctgcagcacgtgcttcagaagttgggaagggggaccaaagctgggcacaggtctgggtctgctacaactaagccaggaggaatgttctcttctccccagtatctcatgaaaggggaggccaagacaggagacagcatgttcctcattcagttcactgggagtgacaaaggtgactttgttctcaaggcctccttccaaatgacttaggatgtgaaagcccttggtcatcagaggcctcctgggtcccagacgacaggcctggctggctgtatcttggcctgaacagagacacatctccatgaactagaggcaagagcagcagagaccatcccagcctcttccctttctccgtctctaactgagctgcgcggtgccctcattactgcgtccaccatctcaggcaagtttctaagtccctggaataaagaagggccatggcagagagaagtctctgtttcttttaatggccaactcaaccccatggctgaaagccgagggacaacgcgtggtcaccgaccggactcggcagcattacaatctgctcctaggccacagcaggccctggggggtttcccttttgaacctacaccatcccttccttggcctttgggaaaagctatcagtcacatgtagttgctggagggggttggggagtgtgtgctgggggactctcactcggggcttcccctaagggagaggacaccccgggagagctaggggttctcccagccctgtaccccagcagatcagactcctgggcacactaagaggaaactcaacacaaatggggccaggtatttgacagatgctgttcagaggtcagttcaggccactttctgcagggtcctggaccaacaggcacttctctcctggaggttcctcgaagccagctggcgggccgtgcggagggcccagcccatcaaagtccctcgtcgttgtaagtcggagaatggggcttcaggatgctctgaggattcttctccactagagggcgccagctcacctcccctgtcagaagcagatcctccccgttcatggagtccaggtactgtatctgcaaccaggggagggggaaggaggaagcgacagaggcagggcagaggtgaggagccagcgtcaggaaccagcctcccagaggagaggaaggaaggggacggggcatgaggggggcttctgaccatcccaggtcccagaccaagccgtcccaggccaagccgtctctgatctcctagataatttcactaaggtggttcagagaaagcagtcactggggagctgggtggcgggggcagttagggaattccctatcacacctctgaatggagacagacacacacctcccaaggacacgtctcccctacacgccctccctagacagctcctgcaggccaggaagtcagggcttgcagcgcacacagccatgctgtccaccccagcactgctgggtgagagtcctgattctgtcccttcccagtgctgctacccagggtggcagcttcccctctctgagatttaagttcccttgtcttgagagaggggatagaaacaggtacctcacaggacacatgaagagattcaacaatatgcatatatgcagtgctaggcactcacgctttaaacatatgtatgcctctgttgtcctctagtgggcccctggtcagtgggccccagtatcacctctctaggacagtaggggcagacagctctgccattaaaatggtcatcatccagagaagccactgctgcagggccaggagacttcatcttaggctttaggtcattcccccttccaagaatccaccactctggttgcttccgcttccagctgctgacgcttgaactcaaccccagcctctcgcacgtgtcttggctctggattcccacctgccctgccatctcttccctaaagcccactcctcccttacagtgactccatttctgcccccagtgccacccctctgcccacctcctgggttgaaaatctcaacagaacctctggttggctcttgggccatcggccacaccaaacagtctgctcaaggcccagctcctgctcttcctttcccggccttcagcactctgccctccctgtatcacataacaggctggcttactccagggttagccgtgtgcctgggcttcctcaccaaaccatgagctggctcctcgagggcaggactgggtcttattaatcgttgctttcccaagagtacatggagcagcaggtgctcaaaaggtttgctgatagaactgggtccccaccaaagctccctgctttcccaagaaccccttcacggtttttccactgcctctcactggggccacatgggacctcttgtagggacaatggttgtggcagccccttcctagagggccctcggagaagtcccagtgtgtcttgttggggcttctggcacaagcccaccatggcagatggaaatgttgggcaggtctctcagaaaacacagcatttgctttgcgaattgctactcccgtctgagggtgagtccagtcaacagagtatcagaattctctgtgagtggggccctctggccatgccgtgccctctccctggctctagcagatttgaagagtggtcaaacagaagtcctggctcctgggattctctaccctgtgggtctgcagagccccagtatgtggtttttccagcagttaacaagctagtcctatgggccctgtcttctcaagagctgaagtccagccttgcctttcctggttgttgaagaccatgaatacaagtgaacaagagagtaactgtggcgtgacaccccttcagctccaggggccaggccatgaagcaaaggtgtgactcatggcacagcctgagctgtctgaggcagctgaggcctcagtggtcacatgaatcacacagcttggggccctagggcagctgtgcaggctgactcactgggaggccctggaagagcctctatgtcctcttcgctgccagtcagctcactcatctatcaagtatgagtttcccatcaatacaggatctgagggcagggaggtcaaggaattaattccccggggcttgaggacagctatgtgggtaagcagcccccactgcggagctttctcgtagaagctttgatgtcggggagccctggggagccagaggggtgagaaactgaagtggggggactctacttgactgtggagagcatctagcaggaagaggctgtctgtgaaatgctgcctgctgcccagttttgctggaagtcaggagcaggaaacaaatccaagtgggtagagaaggggtccacagtgggcagctgctactacaccacgtgctcatatctgccaggactctgtgggcccagctgctagcatagcactgggcgcacagtaggcaatgaggtgcacagtgaatgaatgactcaaagttcctgagggcaggagactactcgatgcctctttctctctctcttcccatttcccgctccctggcccagttcatggttggacatacagaaggcgctccttcttcagcgtctagtgctgatgtgatctggtcagaattctctcaggctggtccttggtaactccacctctcatgatcccctgaaagcccaagaggaggacccactgttgccaggacttgggaggggagggaaagggtcactcacctgtttcctcacatactctaccagcaattcaagatgtcgagggtcttcacatttccggttgaagaaggttctccagagggcagcggccagcccatgatcatctgaaaggatcccctggaacatacagcacagcagtggtctcctgagggatccacagagccaggacacagacggtggggatactatgaacatgctagcaaccatggaatcagctcagaagggccctccacgcacaagaggaaaatggggcagtcacacagtagaggtggaaggggtcttacaagggtatctggcccaatcccttcattttattacatacagagggagaacagggggtccagaggggccaagccaccagttaggtgatgcagagctgggactcaggcagtactccgtactgcgcctggcccaggcaacacttgagaggctgagaagagaaacagtagcagcaatgctccccctgctgtccatagcagcaatgctccccctgctgtccacagggcacgggctgggaatattgtgaatgtatgtttctcccaggaatggaggtgggcatggactgtgccttcttgcttggtccaaggaccaaggcaaggcaactggtccttgggggaagggagccagctaccttgtcttcactcttacccaactctgggcccagcctctccctaagtaggggaacaggatgttcagcaggattgctggggccacagagggccaggctcagagcttgcatgtgtgtgtgtgcctaacgctgcctcttttggcagaggagacttctgttgggaagcttaaagattacagagcaaaataagagccccagccaccagctaaggacattttctagcttggacctctagaggagggagggctgagagtcttgcttcctggggtgaaggtggctgatggaacaggccctgagaagttgctctgtccaggtgccaaggtagtgtgtggaatcgatgtgctgacttggagttagaagggagatcaagtcctaattccacctctgccaagatcagtgatggtggcagctgactaaaccaaagtctcaatcttctacttcttcaaaacagatgaagttacctgctctacttatagcattcttgaactatttgttaagtgtaatctgttggatacaaagattaggagcatgctttggcagacagcggggatacagtcaaaaccgtggggtctgggagccagagcacagagttcgaatgccagctgtgtcacttgatggccatgcggcctttaagaagctattagccattcctgagcctcagtttttcatgagtcaaacaagcctaataatacctatcccacagagttgctgtgagaattaagagatactggccatgaatggctctgtaagtggtaaacattacccaaagacccaggatcactttattcgacattttattgtggtctgtcctcttgggcattgtggtatgtgaggtctggctccaggcctgctgccaacaagggccatgtccagtatggggtgctgacagtttggtagaaaaacattccacctgttccaaatgctctctgataaaccctccttacggttccacagcttaggactgtcctggcacaatggctgagtcaggaaaactggctttttctggcacatggggacaggagcagaggacaagctcaggcacatcacccttctgcaaacgatttgctagcacaacagcgtgcctgtgtctgctgtgcctgggcacatgccagagcgctgctggcagcaacccacatgtgctgtgcagaaaggaatgggattgggagcgcgtgttatggggacctggagaatgggcagagcccaggatgggaaaacaggcaactttagcagcgggtgagatggctgggaaggggcaaattcataatcaggaattcctgagccatcagaaggaaaaggatgactcaggacccactaatagtgagaacaacccaactgtttcagactgttagggttccctcacacgcctagctcctaatgattatgtttgccaagtagaatagatattatattcccatttgctttgctttgttttgttttgttttgagatgaagtctcactctgtcacccaggctgaagtgcagtggcatgatcttggctcaatgcaacctctgcctcccaagttcaagtgattctcttgcctcagcctcccaagtagctgggactacgggcatgtgccatcacacccggctaattttttgtatttttagtagagacagggtttcaccatgttggccagggtggtctcgaactcctgacctcaagtgatctgcctgcttcggcctcccaagtgctgggattacaggcgtgagccaccgcacctggcctatatccccatttgaaagataagtaaactgaggcttagaggctagctaactgatggctgaactagaaccagcatgcattgatgaggtgggggatgatgactgacccactctagtcagaatacagaacctggcatagagtgggagagcaatcagaatggctgaatacccagcactttgggagtccaagctgggtggatcacttgagcccaggagttcaagaccagcctggacaacatggcgaaactgtttccacaaaaaaatataaaaattagccaggcatggtggcacacaagtgtagtcccagctactcgggaggatgaggtgggatgatcacctgggcctggggaggttgaggatacagtgagctgtgatcacactgctgcactccagcctgggcaacagagtgagaccctgtcttaggaaaaaaaaaaagaatagctgaataaatcaacgaacacaacttcagccttcttcccaccacactgctagtgtaaggcagtgaaaacaaatgagagactaatctgagggtgcacatttcaaactaagaaagcagaactggaagaagggtcctgggaaccaaacatgagggcacagcataatttccccccaatctaatcgggtgcctacttgttttccctcgtgacacaatgaagcatccttcagaaattaagacacctaggtctagagtaactgagaggaagccaaggggattgtttcagctttggagggttctagttctgattaagggtttaaagtggcagagttccactcagtgaagattgatttgacatcactatgtgctcagcatgatgctaggaacacaagagtcacagcaatatggtctgagctctcagggaacttgcaatctagctgaagggacaaaatcagtgcacatctaacagcagcacagagtaaaatcccggagaatgaacacatgccaagctgcacagtgagactcagctacactctacatggctgcctccttgttctacagtcttagcttttatgacaactcctcagagagatcttcctggtccacatcaagtcattccccctgttgttctctctcactgcactctactgtagttagatatttactgcttatctgctacttgtttactatgtctctcaattagaaggtaagctctagtgggaaagagccagaccgtgtttgttttattcaccaatatattcccatgtatcacacatggtagacactcaaaagctacctgttaaatggataatgaatagatggatgggtgtggaaattcacagtaaaaacacaagcgatccagagaggtcagggaaacctttctgaagaagtaggcctttaagaattgggaggatttagcgggtgtggtggctcacgcctgtaatcccagcactttgggaggccgaggtgggtggatcacgaggtcaagagatcgagaccatcctgggcaacgtggtgaaaccctgtctctacgaaaaatacaaaaaaaattagtcaagcatggtggcgcctgcctctagtcccagctactcaggaggctgaggcaggagaatcccttaaacccgggaggtggaggttgcagtaagctgagattgtgccactgcactccagcctggcaacagagtgagactctgtctcaaaaaaaaaaaaaaaaaaaaaaaattgggaagatttggaaagctgcagatttttttttttttttttgagatggagtctcgctctgtcacccaggctggagtgcagtagcgtgatctcagctcactgcaagctccacctcctgggttcatgccattctcctgcctcagcctcccgagtagctgggactacaggcgcccaccaccatgccgggctaatttttttttttttttttttcagtagagacggggtttcaccatgttggtcaggctggtctcgaactcttggcctcgtgatctatccacctcggcctcccaaagtgctgggattacaggcgtgagccactgtgcctggccagctgcagattattctaagcaagagaaaatattcaaaatatttacagagggagtgcctacaaggtacaccaggccctgaaccagaccctaaagctgaccaagactcagctactgccctcaacccctcattgttaggtagagtctcagtcaggcacagcatgtctatagggcagtaaggcaaacggcctaagagagagcacaagaaatataaaggcagatagggcacatagcaatggcaacagttcacagaaggcctggaagttcagggagcaatttggacctaatgtcacagaaaacagggaggttcccaaagcgtccagggagggggaacaatccaagcaagattctaggaaaaggttgctgtagaacagcgctgtccaatagaactttttgtgactatggaactgttctgtatctgcactgtccaagatggtagtcacatatagtaactgagtacctgaggatctgaattttccattttatttaattaatttaaattaaaatagctgcatgtgtttagtatcaaatagctctagcaccttgtgactccaagtgtggtctgcaaaatggctgcacccccatcacgtgcagctgttagcaatgcagaatctcaggccccgccccagacttgctgagtcagaatctgaattgtacctaggtcctctaggtgactcacatgcacattaaaatacaggaaaaacttctagaattgcacattaaaatcacctgggaacttttacaactacagatgtccacctccaccaattaaatcagaatctttgggggacagggcccagacactgatatttctaaaaagtgtcccaggtaattagtatatttccccaaaatttcctgctcttaaaagtcaccttcgggtgacttgttgaaccaccaggcagcactcctactgaattgtaatcttcagagaggtgataaagatttagattttaaaagcaccccaggtgactcctgtggtcaggcacagttgggtaaaatggctctgccagaatggactggatgggggaccggaaacaaacacaattcggtacatttttattaatactgatgaaaggatcgactgagccaatagagccacctgcaataaagaccataaacaaaggctcacagagaggtgtagttcttcactcctaagcctcatccttttctatattgtaaggcttctacaattacaattcgtccacttttataattgatatgtacacttgagcaataattctcaattcccaacccataacccccgaaagctcatgttaagttaatgatgtgtatagtatgcaatgtaaatgctcccttgtaattcaggatatccagtagaataggaatcaggagaccctattttaacaaaagttaagaaactgaactccagtttcttaacttttgtccttttatgcatttctcactctttgactaccacatgccaagcactatgccaggccacagaaatgcaaacacagtaggcattgcactacccaaaaagaaatccccacccagccaaggtgacagataatgtgaatgtagtaagcactgtgagagtgcagggaggatggaatgagctgagtcacaggaagttcaggaaccgcttcccaggaggggtcatgcttgcattaaatctggaggtaaccacaaaatcagtataaaagcatatggttagtttaaaatatcaggtgttcattacaccattctttctacatgcttgaaatctccacaataaatgttggggagaaaaaagatgagatagatgaacctcgagggcattatgttaagtgaaataagtcagtcacaaaaggtcaaaaattgtgtgattctacttatatgaattatctacagtagtcaaattcatagagacataaagtcaaatgaatggtggttgctaggggatatgagggaaggagggaataattattgttcaatagggacagagtttcagtttggaagatggaaaagctctggagatgaatggtggtgacggtgcaaagcaatgggaatgtactttatgctactaaactgtacacttaaaaatagttaaaatggtacattttatgatatgtatattttacaatttttttaaaaagatgaggccaggcgtggtggctcacgcctgtaatcccagcactttgggaggccgaggcgggcagatcacaaggtcaggagatcgagaccatcctggctaacacggtgaaaccctgtctctactaaaaatacaaaaaattagccgggtgtggtggcaggcgcctgtagtcccagctactcaggaggctgaggcagaagaatggcgtgaacctgggaggtggagcttgtggtaagtagagatcgcgccactgcactccagcctgggtgacagagcaagactctgtctaaaaaaaaaaaaaaaaaaaaaaaaagatgagatagatccaaatgtcctgatgtggaaggacacccaagatacatacttcagtgaaaaaagcaagttgcagaatcatgtgtctagtgtaactccagttgcataaagaaggaaaagacaaaggtgcttgtctatgcacagacaacattcggaaggacatccaataaactagaaattaagttttcgtctggagcagggtaggaaataggtcttctaatttcattttttttgagaccaagtctcattctgttgcccaggctggagtgcagtggcgcaatctcagctcactgcagtctccgcctcccaggttcaagagactccgcctctcatgcctcaccttcccaagcaggtgggattacaggcacatgccaccatgcctggctaatttttgtatctgtagtagagacggggtttcaggctgatctcaaactcctgacctcagctgatccacccacctcggcctcccaaggtgctgggattacaggcgtgagccactatgcctggccaggtcttctgatttctatttcaaccacttatgtacagctttacaaacttttatttttatttatttatctttttttgagacggagtctcactctgtcacccaggctagagtgcagaggcatgatctcggctcactgcaacctccgtctcccaggttcaagcgattcacctgcctcagcctctagagtagctgggattacaggcacccaccaccatacccggctaagttttgcatttttagtgacacggggtttcaccatgttggccaggctggtctcgaactcctgacctcaagtgatctgcccacctcagcctcccaaagtgctgggagccactgcgcccagccagttttacaaactttcaaaatgaatatgtattgctttcataattaaagcaaaaaaaaaaaaaagtgtatactttgcctggcagaccatgctgtttacgtgaatatcctcctctctctgggagcacatggggctaagacagtgtctcatttgcctctgtccctccatccagcacccagcagccactcaacaaatgctgactagttgaatggtttgaccatattatatactgctttctttcccaaacatgtggcatgtttcccaaacatgctcagcacattcattctcgctgcccagttgatgaatatgaagaaataaatactacgccatggtggtagccagtaacaatggtccctgtggcttccctcagaggctctcatcaaaagcctttgctgggggaggccaccgtcctgcctaagccttggcaaacaatcttacctcatcatatcccaagatcgctgcatagaaatgatttgtcatgaggatcatgttcttcttcaggatatagggattaacctacagaaacaaatggcaaaaacaaaagtttgaaagaaagaaagaaaaaaacccaaaaagtatgatctttgactcttagctgtcacagactcttagtagaagagagacggccactaacaagtcaagctgccagtccattctcaattccctgatgtgtcaggattctccccaatttgccaaattcttttaggttttgatctcaaattacacaagtcagcttaatgaactgagccccaaccacatgtttagttttgtgctagatcctatgaaccaagtataagaaacagtttcttgattggaggagcacagtccaatgtaggaaaataggcatataaaaaataattatactgcaacatgttgcctcaaatcctattctaaacatgctgagtgataaatgggttttagttttacctgcttgagggagctggtaagggctctctaggaggtaacatttaagtgaaacttggaggaggaggagtttgacagaggagagtgagggggaggagggagagagagcattctagacagagcaaggtgtgcaaaggtgcagaggctggaaagaaaatggcgcagggagggtgtcagggagggtgaataggcaggatcacaagaaagttatgttgagactaggttaggagacatcttaagggccactcaaaagagtttgtcgtgatgaaaaaacagagaaggaagtggtcagaggtgggaagaggagggagagaggcaggactctgagagacatgctgaggaaaaaggggggcctctgaggccatggaaaggagggaagaacaaagcaggggcagctctgaagcaagaagaatgttaaagttaagagatcattttggctgggcagtggttcatgcctgtaatcccagcactttgggaggccaaggcaggcagatcgcttgagcccaggagtttgagaccagcctgggcaacatggcgaaaccccatccctacaaaaaaatacaaaaattagcctggcatagtggtgcatgactgtagtcccggctacttgggaggctgaggtgcatcacttgagcctgggaggccgaggctgcagtgagccaggatcgcgccactgcactccagcctgggcaacagaacaagagcctgtctcaaacaaacaaaaactcagagactgttttagaaatgcaattctggtgagatggttgagagcccagtagaactcctctctcctcttggggaacagcctggcctggaggatcttcagggcccagagtgcagttcgctgaatgccttcaatagggtacaactctgacctccagacagtaacacgctgtaaggcagggtccacgttttattcctcttcaggatcccagcagaaagccagtgcaatgtatagcacagagtaaggactctgactatctgaactgatggttttggaaatagccaaaaggcatttggaactttatgtggagaacaagatttgtgcttaacaactctgacggtgaccatgcccacagtcatctcatttacgaagcacctgtcatgggctgggaggtagatgtgttacagtcactcagactgtaagtgactgtgtgagagactcagactggtgaagtgatgccttgtgtcacacagcaaattcatgataaagctgagatcagcatccaggtcagtctgaatccagagtccacactccttacagtctgccagggttctgcttctgggaggataattttactttgggtcacaaatcaaagactgagtgattttatcctgtggctcataactagtctcggaagaaatgtagaaagggtgatctggatttagactcagaaaacctgggttcaagtgatagttttgctatgtacacaggatgttatcttaagcaagtcaacctgagtccatttcctttttcttttttgagacagagtctcgctctgtcacccaggctggagagcagtggtgtgatcttggctcacggcaacctccgcctcccgggttcacagcattctcctgcctcagcctcccaagtagctgggactacaggtgcccgccaccatgcccagctaattttttctatttttagtacagacggggtttcaccgtgttagccaggatggtctcgatctcctgacctcgtgatccacccgcctcggcctcctaaagtgctgggattacaggcatgagccaccacgcccggcccatttcctttttttttgagacagagtctcgctctcttggccaggctgtagtgcagcggcatgatctcagctcactgcaatctccgcctcccgggttcaggcgattctcctgcctcagcctcccgagcagctgggattacaggcacctgccaccacacctggctaatttttttgtatttttagtagagatggggtttcaccatgttggccaggctggtctcgaactcctgacctcaggcgatcagcccgcctcgacctcctaaagtgctgggattacaggcgtgagccactgcgcccggcccctttcctacacacagggctatttggaagagcacgtgagttagcatgcattcattcattaatttaataatgtatgtatgctgaaagccttggtaaactgcagaatgctctgcaaatgtaaggaattataagtaataacttctggtttgtttacataaaaccaaaaccagttccaatgctttacagccatggataattttcaaaaatgaaaggattgtgaagctcaaggctggaaaatgtagactggatgtaactaggagtgcaaaccatgacctatcccacacaccttcaaccagggctacattagccatccatccttggtgttctcacagctctctgggcatattttctgcctgggtacacacgtggtttagagctgcttatgcacctgtctctcccattagtctgggagctactcaagggtcataggaaccatgtctgattaatctcggcacccccatcatctggtccagagcctaacccagagcaggggctaagacaggcttgctggtaactgaatttttacaagggcctgtgtactacgccatgcatagcatgttctatccaactagtgttttaggggattttcttcttcttcgcctttctttccccctgttgaataccttctgtgtttctggaatttcagaaacatatactgccaaacttctactgtcccatcttccagaaaggggtaaagggaagagtcaagaaacaggccagagctagagttcattccttctgtcatgtgaggatgagactacaactcagacctcctgatacccatacttggaggatctccctactcccacatgagttgttctcctaattgtgttaggaataatcacagccacaaacggatgatatcagaggtgtcaaacagtaaggcaggagcatctctcagaggaaaacattcactgaacctgcctagcagagctagtttatgtcatgtatcacaccattaagctttggagcaggaagggccctcagagattacctagctcaatacccttgaggaaagggtgaactgaaacccagaaagaagagacttattcaagatcacacatcaagttagtataagagccaggattagaacctgatttctgggtaagtgcttttcctactttaccatctgcagggcatttccagagatcatcaacacattcatctgcaaacctcagttcttgctttccagcaaggcccacaaacatacaaacacattttctcctcttgggatacacctgcattctggttggctactgcccaggaaaaacggagtgcaagagtagagttccttactagcaaggctccttgacttcctggtcctatattctaactccagtgacctgtaagctgcctctcccttcacctctagctgagacaatggcaaactgccacagctagaaatgcttttcagatatcatcacccaggctggattagatcatgaaaaggggccttcctggaagagggtggaagtgagatcagtacagacacgtgatctgcaggcaacaggtgagggcaagtgacagcaccttcctcaactaccggactcactcggcagggcccttctagctagtccagcagccaaggggagcaggatattcgctctggtgaatccctgttggattttattccctcatttaagtttttggttgctggtgtgcaggttccccacctctccactgccagatcattctatatggagcactctgcccatgactacacagctgcacccagcagaagagaaactcctcccagatagtgttgggccgttctcttattaaactcatcctttccataatgctttgcttttcataaaaacccatacatacaacaccacaaggaaaaggttccttttatatcagttactcatattttcccatttatttaagccattaaaattcatgcagatattttataagccaccaggattcagtgactggtattactgaatgtttaataataaactaaacagaagaaatcagagggttaaatgatgactgcaattcctgtaatgacttaattaaatttttattgagtacataaactatgatgtcacctctagccaaccacaggcctgctttcccagcatgtcacagggagggagcactcaataggaggcttggctaaatgagcagcaggtctcagctgaaatggggaggggagtgaggctcatgtaacacactcaataaattatccgttcatttttaaacaaagtccatgagttataatatatttgccatgcactttttatgacataataaaaatgttaccttaaggattacttaacacatactacaaatattatagcagaggcaggcacaaggggcaaagaaaacaaacacgagcaggccagggacgggtcctggagtttatgtcccaggggaaacagcatagtatattaaaaagggaatgcaaaaaaaaggaagggatgcaagagttcagggttactaatcggcagattaatgaatgagacaaccaacagagaacacaagtaaggcaataatgaatcttgcagggcacatgtttaattaaagtagcattctcaaggaggaatattagctttaaagagatgccagttcatttgaggccaattcgctgctctctttccccttttcactgttgctgccttaaagatatttatgtgactgcttaacagaggaaccagactatgtggatacagggactgatgggagatcaagttttaactcctccatggactctacaaggcttctagtgatctgctcttggccatcttttttgcctcccctcctcttgcctccccatcttacttcaccctgcagtcagtaaagtatgtgcacagatacatcatgctgtcatctatttcttagtcatactgctgccaggaattcttctcttctttatccactgatggaagggatgctaactccttatcctctaagacttagcacacatattttctctactaagtctgccctctcccccatctacaggtgccccaaagtgattcaagtctggagacgggtcccatcattcattatttaccaagtgccaataactgtgctacaactttacacattagcccacttaaaccttcccaaggactctaagagacaggaactgttactgtctccactttagagaagaggaatctgatgtttgggaaagttaaagctagacagctaggaaatagtggggtcaagataagaatacagagcaatccaactccattgcctacctgtgttggaatagacactggaaggaatgtagctgccccttcctgtgccccacagctcaggctatctgcagaggcagaactaagaaatgctaatgtggtcttgagtaaacacaactcagagattccagttccagtggcagctagagacagccaccagatgggtcatcagtggccggttactaatacatcagatatccctagtagagccaagctccactcctgggaaaacctgaggttgagagtgggtgtaattatggtgggggaatgggaaaacagaagaaagttggtatggaaaacactgatgagcatgaaggtgagaataagctttaaggttactggcttgaagcaaagttgctaacagtagcagactaagaatttgctggaatgaatgaatgacaaaggacagctagagttgctggctgaagcctaaggactatatcaaattcatcataaggcaacaatgcaacacaagattgtaggtcatgttttagtttgctgtagtagacagtaatgccaccaccaatgctttgcagtgccaacgccatgttctacagtcattgtgcggcaacaggctgatgtgcactgaacatcagctagcctatttaaagttcaggttagaaattagcccactgtggaatattttgtgagatacttagaaacagagtaagagtagacagacaagagagacgggggacatggagagaccaaataaaaaagtctacctgttaactcacatgcattacgactgaaagatctattgagggtcttttagcaatgatgacaaaatacaaacaaaactgtgtgtgtgtgtgtgtgtgtgtgtgtgtgtgcgcgcgcgcgcgcgcacgctcaggcacgcatgcatattgagcagttccagaaaaagttgttaataccaagaataaaaagaaaaatattttaaatgaaagacaatttctttttctctttttagaaaataatgtgaacatttaaatagagtatgttcccgttgcgatgaaaggccaacctaaacccagcatgaggaggtccattttaaaatccattttaaacatttcaaacttttaatgtacaagggaagcttgctatgatgacatgctgtttaaaaatattcccttattggctgggcaaggtggcttacgtgtataatccccatgctttgtgaggccaaggcaggtggatcacttgaggccaggagttcaagactagcctggacaaaaaagtgaggtcctgtctctacaacatagtaataataatacaaacccctttcttatttattttgaaaattctagttttgctgcttgggatctacatgttcaagactgcatagcctgataatgtgctgaaaaacaagggacatggttggcagacagaattgcagaaccagcagccctaatttctatatagtcacgaagtacaggagtccttccctcaggcttggaaaatagccaagagagaagagatgtatgtcctcagaaattctagtcatttgtccagttgagaaaacatgagaacacataatattaagtccacaatcatcttcaaaaggagctgatgaggtacactacggttctgggatgatcaaactaccatggcaatttaactttcgtctcttttagggcatttgaataaggggaacattatagctataatctactttggtttctggaagctttttgtagtattccacatgacaagtctcatgcatactcattagagaagccaacacctggcttgaaagagtcgcagtttcaacaacagcactgatggtgcggagtcctaaaggaaataatcctgggtactatctaaaatccgtactgataataatgatgacagtgatggtcgtaacaatgattacacaatgcatttaataatattttcattttattatcttatttgtgcctcacaaccacaaccctgccctcgaggagctcacagccaaaatgctattgttgtcctgattctataaacaaggaaacagaagctcaaaactgttaagtggccaggtgcggtggctcacgcctgtaatctcagcactctgggaggctgaggtgggccgataacctgaggtcgggagttcgagaccagcctggccaacatagtgaaaccccatgtctactaaaatacaaaaaattagctgggcatagtggcgcatacctgtagtcccagctactcaggaggctgaggcgggggaaccattgaacccgagaggcagaagttgcagtgagccaagattgtgccactgcactccagcctggcaactgagcaagactctgtctcaaaaaacaaaaacaaaaacaaaaacaaaaacgttaagtcacttgtagtcaaatcacatcctgcttgtaagtgacagtgctgggacttttaactcagatggtcagtctctaaatctactgtcttttcttttttttgagacggagtcttgctctgtcacccaggctggagtgcagtgggaccatctcggctcactgcaagctccgcctcccgggttcacgccattctcctgcctcagcctcctgagtagctgggactacaggcgcctaccaccatgcccggctaattttttgtatttttagtagagacggggtttcaccgtgttagccagcatggtcttgacctcctgaccttgtgatccgcctgcctcagcctcccaaagtgctgggattgcaggcgtgagccaccgcgcccggccccaatctactgtcttttctaagcgatcacacctttctgcttctgatgagtcatatgagaaatggaagaatcacacaagcacaaagctaaaattgctcatttctgcactttggaaagcaagagtaaaatagactctttttaaatttagaaaaactgtccttaaaaagaagatgagattcgacaaggtcaaatgcacagtattatgtctatatcaaaataaaaaaataacaggatgaagcaagggtctgaccaagtagatgtaatagcatcccagagcaaatctttctcatgaacagataaatcagaaatatgaaaaggtaattattattatctatattaaaggaaaagccatatgcaaaggtcaaaaagttttctcccctcatttattttaatagtcaaaagtctttgtcttaccaaccgtacttaagaatgaacatggagaaaccagagaggtttcaagaaagaatgtcagatatatatggttacaatgggttggcactggtcacaggccagggcgttcaagattctatggccaagagaaacacccagaggctattccatggattggtcaggttgcctccatcatctgcctcaatgggtcagtagatcttagaagtactgtgacactgaggtttctctctctgcatttcttccttatgttcaggacctactctttcccatttccacgagttggcaggctgttgatcctagaatgctgtcctctcatcacagagatgggcacatagctgaagcttagctaatctgactcttgcttctgagagtacaaacaaccaaatataaaaggaagctacagttggatcacccttggcagggcacagtggctcatgcctgtaatcctagcactttggaaggccatggcaggagaactgcttgaggccaagaattaaagaccaacctggccaacacagcaagacctcatttctaaaaaataaataaataaaatagtaaagttgggtcaccccaaagagactatacataagttcctattgctaagatcccttagctgccctgtatctttccttcctgagctctgttgttaaactctccattccatgagccttagttaccttccaataaatcctttgtttgcttaaattagctaaagtcagcctcccaagtagctgggattacaggcacgcaccaccacacccagctaatttttttttctttttctttttgagacgcagtcttgcactcttgcccaggctggagtgccgtggcgccatctctgctcactgcaagctctgcctcccaggttcacgccattctcctgcctcagcctccagagtagctgggactacaggtgcccaccaccacgcccagctaatttgttgtatttttagtagagacggggtttcaccgtgttagccaggatggtctcgatctcctgaccttgtgatctgcccgccttggcctcccaaagtgctgggattacaggcgtgagccaccgcacctggccgagcaagataattccatttacacccactaggatggctataatttaaaaagaaaagaaaaataagtattggcaaggatgtagaaaaactgaaaccctcatgcattgttgaagaaaatgtaaaatggtacagccactgtggaaaacagtttggcggtttctcaaaaggctgaacatagaactaccatatagcccagcaatcccattcctaactatatgtccaaaagaattgaaagcgggaattggaactgatatatttgtacaccaattttcatagtagtatcatttatgatagccaaaaggtggaaacaacccaagtgtccaatgacagggataaacaaaatgtggtacacacataccaagggatattattcagccataaaaaggcataaaattttgatatatgctataacatggatggaccttaaaaatgcactcataaatgcattatgcttaatgaaataagtcagacatggaaggacaaatattgtataatttgatttatatgaggtacttaggtaccttcagagacagaaagaagaatagtctacctggggctgatgggaggaagaaagggaaaattattatttaatgggcacagagtttttgttggggataatgaaaatgttttgggtatagataatgaaaattgttacacaacactgtgaatgtacttaatgccactgaattgagcatttatgaatggttaaaatgataaatattatgtatgtatattttaccacaataaaggaaatcccagttacaaacagttcttctcagacaggcatttcaatctgtgacttaaccatgtgtgtattaaagcctctcttaggacacttatccatttggcacagtggtatcatgagctaactgatgttcctcaccagactataaacggtcttggtacagaattctacgttgcattgtacatgtttgataagcacgtattgagtaactgctgtattctactgtggtatatgctggaggtaaaaaaatcaataaaacacagtacttgtcctcaagaagtttacaatctcacgtgggagacacacctagcacgttgtatgtacaaaacggtaatggtatagggactgaaaggcttgagagaagaggcaacatttattacagtgggtattaaagggtcaacaggtatgttcagacagaaagaatggtatgtgtaaaggcacagggaggtgaacaagtacagcattttcaaagggaagtttgtaaaaaaaaaaacaaaaaaacacacacaaaaaaaacaaaaaaacacagaagctgctcatggtggcaagaatcagaaggtggagctggaagggcagtttgtgtgagattgtaaatggccctgaacgccagccacatgaaagaaagaacaaggaaggggtttaagcacagggaaattgcatggacagatttattttcaaaaagtaaccctagaagtacagatcacaaagttgggggaaggtccagaggcaggaaaaccagaggaggctgctacaatggtgtagatgagagtctgtaaggaactgaaacaatgtgaagtgacaacacgaacaaagaggaaggcatgctttcaagagaaatgactacagccagagcaacgggatttgattatcgagtagatgaggaggaggaaaggggaggccatgacttgcatgtaatcagacctcactgaagaaagtggagagaacagaaagatgaaaacggaatgcaagttatatgcaatcatacactgatgactttctgaccctggcagtgccaagcgcagacaaccagtcttgtatgattttagcaatcaccatgcccttcatgtctcctatgttgtggtaatggaaaatcttacttggataagatgtaatatgagcaagatgtgtatttagtttgagcccggcaggcgtctccagtggagcacaggcataacacaccagggcctaggagcctgagccccttttccagtaatttgttcactacatgtaggtcggtatcattactccgggccctctgcattctgactgcagccatgaggtctgattaccgtcagcaagaagacgctgacacactcaggtttccagagacacttggaggctgctaattgcaccctgagcctcatgactgcatttatgagcgcagaaaagctgcaggcactacttggcttttttaattattttctattaaatttaggcagactgggtacagtggaaaactacaggatgcttgttccacatcactaccaaccatgtcaactgcacagacacaaaaggcaaacaggtgaatatagatcaacaagttggtcagttctttgctaatagagctgagccactgtcacttgtcatggatgctgaggccctgaacaacctagaggatctaaaggcaacactgagatcactgacccgagtcctttcccagcgatcctaaaatagatatcatattgcccagatggcaacattttctcagaggacccaaaatttagccccttactgatcttgaggttcctgacccttcatccaacagccctgccttcttcttctccacagcaatgaagagtgaaaggggcggggtcaccctaatgaactgaatcacaggagttaactgctaactccacctgggcacaatgggtcagaccaaagtctaaagctcaaaacagtaaagcagacatttacattgtttcacacaggtcacagaatgtttgtctttcactgctgtgtcctaactgctcactgttcagagctgtacaattgccaaaatactgacccaatggttatctgagaaagaggctgttccctgctgaagacatgaggaagcaaaggctcagaaaggtcaagtgactcacccaattatcacttggctaataaatggtcaagaggttcacagagacaaggtcttctggctcctagtccaagtttttttgtttgttttaaggctcaaacagaattgccactcagtggatagtttgtacattcctgtagaagcatcctgggaatggctgagcctggatcccaggtagaagccatatgatcattcttacttaagtagtgaggtggtcaaggttgaggccaagagtgaggttcagatatcccttaaaatggaattgacagagccgggtgcagtggctcatgcctctgtaatcccaccactttgggaggttaaggcaggcagatcacctgaggtcaggagtttgagaccagcctggccaacatggtgaaaccccttctttactaaaaatacaaaaattagctgggcatggtggtgggtgcctgtagtcccagctactagggaggctgaggcaggagaattgcttgaaccaggaggcaaagattgcagtgaggtgagattacgccactgcaatccagccggggcaacagaacaagactttgtctcacaaaaaaaggaaaaaaaaaaaaaaaagcatggaactgacacagcctgtgagttctgagagtgactccatctttatagggtaattctcttttgtcctcttttctcagtaaaatgttcttagaaaggtattttatccaaaggaaagagacaaactcagttagaatgctgtatgttaaagagatgatctctttggtgttctgtatttaagtcccaactcagacctaggaaacgcactgaaatctaagtaaattttgggccccaacagccctgtttccccacctggtgagtctgaaagattaatcactctgagcctcagtttttccatcacaactatgcaaaaccacctttcctttttccttttcatattaacagatgaaaatgcctaacagtaagtaaattagtagtggcaaacatctatttcactctcaggcattgtttaaagaacctcacatgtgataactcatttatccctcacaatgctacaagcgatgtaaggtgggtattacagttatgtctattttacggagagaaaactgaggcatagaaaggaaacaggcatagagaccttgcccaaggtcacatggctagggcaggatttgagtccaaactggcttcagtatgtgagcactctcaactactctgtgatactgcattggaaaggaggttataaactcaacccaatcccccacttggagatgagagcctggaagtctctgaagcttctctcaggaccttggggctcacctactctcctgcctcatcctcccattacactcagccctgccctgggataactcctggaagaagcctgcagtgaacacaaaacaaaaaagcaagtgaactcatatctttctcgttcgtctgtttcgtgtggaagtgaatccaggaaagattcaacttcctttctcagcataaactagattgtaagccctgtaagatcacttatctctggtatattatctaccaaccacattcagggattagcatgtggcgagagacaaaaatgttccttgaataaatgaatgaaacaattcttaataaaaccatacaaattaataatgctactggatctagaggaaatacattcaatattgccttcatcaaatgtattcagcactacccaggcatcaagcactgttttaggagctgaggctacagcagtaaacaagagacaattcccgaactccgggagtttaggatgattagtcaggctgctgaatgatttgcagaatgaatctgagatgaagagagtcaagaggcaggaggaccagtgaagaagcagccgacagtgagtttaggtgagaggtcaggactggatctgagcatcagtaggacagttgaggccctgatagtggttgttttaaagaagggctccttatagttcctcctgctcctttgagaaccaggcacgtcacattgatggcaaggatcactgacattcagaaagaccagctaaagagaggacaatgaacatggaaaaacaagtccctccactctagctgggccccttcagctccaaccaaccccacagggccattcactcagcattttgggggaaacaaagtgagaaaagagtgttacagctgcctcatcaatggatccagaaatactcatggcacacccagggcagctgaaagaaacatctgtctctactgtatcctaggtctgacctcagagcctccagaacttttttacatagccccacccagatcctggcggagctactgccctctggtggtacccaatgcaggggttaagcccacaggagaaaagagtcttgtggtaggacatggagtgagaggcatagtcaaccccaagagctcgtcacagtgcctgtatgtcttactactgcaaccactgctttttccaaagacgctatttacagaaaactctggttaaaatgcaagagttatctgggaccattaaaacagatcctgttggcaacccttaacgatttggcatgaatttaatcaggtaaactgcagtgtaagtatagaattgattctaagaagatagggttaggaatagactctgtgagttcactcactcattcaccattcaaccaatattggatggaggcttaccatgtgctaagcactgtgctagacactggaatgctgaccttaagagaaaaggatcaggaggtctttgattggaggcttttcccagcaacacaaaatgcagggtgtgtgtagtggctctagagaacagcaaagatgatagtatcaagtaacgaaaagagcaacagaatcaatcaagagaagtgagttttagtctctgctactaccgctactatatgacactgaccaagcctttttcctgaccaggactgagtgtcctcacttggaaagggttgaattaggatcatctttgtggctgtcaagcttctaggagcttggcggccactgaaatgattaggagatggcataaaataaaaacactgactgcttggcaattctgaccagctagggctagccctgggtggggcttcctgccatcagccagggcaatctaaaattcctttacatagttcctgaggatcatcaccaagtgagattcttctgacatccatacccaaccacttcatcagacgagatacccctagtacgttatgaaccccacatttgtccccaactaccctagtctcttctggtccctttgaactgaggctattagggacggagccagttcttccagtgctacagggcaagagaggcttggagaaaagtagaaagttttgcaaactgtgttcactcttggaaattctaccctgggctggaaaatttttatctcatggattttttttcaagcaggaaaggcccttagaaataacctggtccaggctctgcattggagcctgctggttaattgtggaactaagtctaactccactcttgtagctccaagattggtgagtgtttttcagttctcccactgtccttctagagggaggctcttctctggcagccaactcaccttgggacctaaagcacaggagacgataaacaccttctgtctttgaaggagaaggagtatagccacaaacacctatcgaaaatgccaaagacaacaaggttcatttgaaatctgaagaatcttagcaaaacggtatgggacagggatgaaaagaagagcaggagacagaagcctgctcagcgcttaacaggaatcatctcctacttgccccataaccatacacataccacaagccagctgattcctaaccccagcagctaaactgcccaaggcctaggaaagggggcaacacacacagtttacaccttttattattctgatcaaaatttctctcctgggagcagaaaggggtcaaaagtccaacaccaaaaatatatatctttataagtcatgggcaaagaagtattacagcagacagttatttaaaaaaaaaaaaaaaagctacggtgaacagagcagagtaggaggtgtgagaaaactcactccaagtaatttattcactgggaaccacaaagggctttcccaagaacagcaaaaacaccattaatttctccagtaccctcctttcaaagggctccaaacacttcacacatatcgttttaaattgtcctcaaaggctccaaaataaggggttactatttccccaggcacagatggagaaactaaagcatttatgcccaccctgctctgcccaagtcatcctaaaagattcagccaacatcaactgagtgcctgctatgtgccttactcatgccaggcagaacaggagacggatgaaagataggatctttgtcctccagaaagccagaatccagtgtggtgtcacagatgcacctataaatcccttcaagatatgacagcttatgctaggtgctattgaaaatgtccaaatacagcatcctgatagctcccatttatcaagtacttaatatgtgccaaacactgtgctaagccatattgtttaagtcacataactgtgcgtgacttaccttatagaggatggaatggagacaatgagaggtaaagagacttgcctaggatctcaaagcaacattgtggcagagcagagattagaacctatgtctgtctggctccaaagaccacatgacaggaaaagaactgtttggaaaactgggcaccggcctctcaactttctagcactgaatgccacactttagaggcgaacagcagaacacacaggggccctcactagattttgggggaatggcctgtttcctgggcccagaattgtatgtgcatgtactaactgggattctccatcatggggacatctgaagccaaaggtaggtgtgtcttccaaaagggaacagagctctctctgggtaaaggagagctgaaaggtcctgagctcttcttgctcctttggtaagtactgaaaatggaacaggactagaaggtatgggattcccatgctggctttaacagaaggttcacagcctgcaggaaggcatggtggctgcagtgcacatgcagtacggtatccttttctcagagccagagtagaactcttgctggggaaggagtcctctgctggagaagggcctggcttagtgacagctctgcagagctcacctggtggcagcaagtgctgcctcttttgccaaagccccattttggaggccaaggaagaaaatgccagacttggagaaagaagagctccccacaccagacaggttacaaagaaaatggtcagtcctggggaatgcctaggtcttagcaagggctgggctaataaatcgctctattttaagcccacaggacataagacagatgcgagaaagagaatgtcctccaaactctgagagcaaagttgagcctggaaataggaaacctaatccccagcctagcattcttcccacttacctcaaggcatccttctgtaatcgtttcatatcttaatttcaacctaataaaacaacaacaagaacaaaaaccctttgatggagccaggtacttctgtgtattattatctcatttaacataagtgacttgtgcttctatcaatggatcagttagtccattagttcactcataattacttatattctacctatttccaaaaaaaaaaggttcaaattggattacaacaaaaggcacatgttatggccaaaagagccaatttttttttttgagcaaagattttgaaatccgtcagctctgggcttgtgacttactatggcggccacagccaagtcctttaagttttctgctccttggttctcctcagttgtaatatggggacactcccaactctatcacaaggtaatttgtaaggattaaatgagatgatgtctgtaaaattcctggcacagagtttggcccatagtatgcaccgcaaccaaaataaaagtaaaagaaaagacttaagtaataaagtctgtggggggcgggagaagaaaggggataatgaatacttacatcaaaatatctaaataagggaagcgctgtactttttggcagttgtggcaaaaggaaagcgggactgctataccattctcattgtttaataaagagaagcatggaaattcatcaggacaaagaaagttcttaattctcaatgcagaagggcacataaatacacgagtgactgtgtatgttacacacatacacatgcttataccatctctctctccaacaggaacagggcaaacggctctccagagtcctgctgccccctgacaccaaactactgcggtgtacagagaagtacttcaagagttaaaacatttttgtgccaatattttaagagtgcagaaggttccaaattacatgtaaaataaacaatgccagactgtgaaaactcttggctgcaacgttctctgatgttaacaagagtttctttattactgtaacctttcagaagtgaataaaaattatttctctgccctagttttgccctccagtaaaagtgaagagagcagtgaccatggaaagagctgtacaatgacctctcctgaaggccgggggctgggaagggggcagtttagaacacaaagccttccatatatgcttctaggttaaaggctagaaatttagtttgtgctgtgctgatcatattgtaaaattttacattcctaatacttttatgtaaccaaaacccttagagcgacaagaaggcattttcaagagcccaacctgagctggtgctatggagaaaacccaaatctggaccatgacccctcaactactcagtgaacccccttactcagaaaccgagtctgaagtgtccttaacaaagaaggaagaagtactgtgtgtgaccagtacttaagacaaaacatgttactactcagatccttaagtgtggatgagtctgtaaatatcagacacacacaaggatctcaaaatggagctagtctggataaagagaatctgcatttaccattgcaggagaagtaagaatgtcaccaaacaaagccaaacattgtttgtcttctcataccaactcggtgcctttatccacactgttcctctgcctggcattctcttcttgtctagcaaacacctacttatctgaaaagatttaactcaaatgtcatctattcccagcctgtctcgagactctgggcattctcagcaatttaaaaacattataatttcttaatattgtaattatctgtttatgtttatcttctcctactagactagggagtcatggaaaatgtcttaatcatccttgtatctccagtgcttttagcacagtacctggaagctaacaggccacaataaaatggatggatagatgggtaaaactttgtttgtgtctgggaacagaaatcagacagagagtgatgaactgctaaaaaaacagaacacaagctctgggacttaacacaaggctagcttttcagacttccacagagttgcagaatgttaagtctggaagagaatgtagaaatcatctaactctcctccccagagaggtgatgtgatttgacttactcaggcttacccgaagagtggccaggccaggcagaactcgttccattatgccacactgtcccttcttactactgtctaaaattgtcggtaaaataagtaatgattaaggtcacatatctaatttcattataaacatatctaatttcattataactaatttcattataactaacacatatctaatttcattataaacaaatgaacaatggaaatcatctaggaattcaaacaacttgataaaagacacaatatctgaattcttcaaaaagtttacatagtgtcaccatatgacccagcagttccactcctaggtatacccctcaagaaagctgaaaacttatgttcagacataaacttatatatgaatgttcacagaagcattattcacaaaagctaaaaagtggaaagtggaaagactaaatgtctattaactgattaatagatttttaaaacatggtatatctacacaacagactatcccaaaaaggaatgatgtcggtcgggggagttgagcaaaaaataaataaataaaaagaagaaaaaagacaaaagaaggaatgaagtactgaaaatatgccacaacatgactgaactttgaaaacattctgctaagtgaaagaagccaaacataaaatactgcatattatatgatcctatttatatgaaatgtcccaaataggtcaatccatagaaacagaatgtagaatagtggtttccaggggctaggggtaaggggaacgggtgtgactgctaatgggcacaggatttctatctgaggtaattaaaatattctggaatagtggtgatgggtacataatgctgcaaatttactaaaaagcaaatttacatgttatgggatataaattatatctctatttttaaaaacagaaaaatggaatatctgccctctagaagctaactaactggagaagctaggaccaacatataagatgcctggctaggcgtggtggcttatgcccagcactttgggatgccaaggtgggaggatcacttgagcacagaagtccaagatcagtgtgggcagcacggagagaacccatctctacaaaaaaacccacaaaaacaaaaacctaagatgcttatggactgaaaggttcaatgctacaatacaagtggatactgtggaagttagaggaagaaagaaacaacacttgggttaaaaatcttaatgccaatgctagagccatagtttttagtttcgtacagagtagtaattaaaagcacaggctctagagtccagaaggtttgggttccaatccaggctcccatatttactgtgtaagtctaattaaattgcctaacagtggtaggtaggctgaatttggtctcctaaaagatatccatgtcccagttcctggaacctgtgcgtgttaccttatatggcaaaaaaggattttgcagctgtgatcaaattaagacacttgagatggggagggaatcctggattacccagttgagccctaaatgccatcacacatatccttccttttaagagagaggcggaaggaacttaggctcagatagaagaaaaggcaacatgactacagaggcagaaattgcagtgatgcagccacaagtcaaggaacatcagcagccaccaagagctggaaggggcaagagtctcccctagaacctccagaagaagcacagccctgccgacaccttaatttcagccccatgaaactgatttctggcctccggtactgtaagagaataaatttttgttgttttaaaccaccaagtttgtggtaatctgctgtaactgctatgggaaactatctctgagccttagtttcctcatctgtaaaatgaggctagaaatgttactaatctcacaggtaagactgttgcaaaatgttataaaattcaaatggtgcttgtaaagtgcatgaaaaaaagaaagtgctcaataaatgttagctattactattggggaactctgcttctgaattatgctgaaatcctcaagtttcacatgtcgttagcccatgcctagaccctgctcctcttagcgaggagaacagtaacagtggcaacaaagacacccgagttctactcttcagtgtttctaatttgtacgcagctcttccagagccaatttcccaatcatctaaatgatataattagtttaggagcagtggttctcaaactagagagctggtgaaaagacagactgttgggtcccaccccagttttcagaagatcaagggtatgccctagagctagcattctttttttttttttttgagacagagtcttgctctgtcgcccaggctagagtgcaaatgcacagtctaggctcactgcaacctccacctcccaggttcaagtgattctcctgcctcagcctcccaagtagctgggactacaggtgcatgccatcacaccaggctaatttttgtatttttagtagagatggggtttcaccatgttggccaggctggtctcaaacccctgacctcatgatccactcgcctcggcctcccaaagtgctaggattacaggcttaagccaccacatctggcctgagctagcatccctaacgagttcccaagcgatgctgaggctgctggtctggggaccacacttttagatctctggatcagattatttcagggttcctttccagtttaaacagtctaagattccccagtaacatccaacagatgcagcactcaagtaataaacactgctgtaccatgctgaaatagccttaaaactaagttctttcctaagtaagagtgggaggccttggaggctgagtatgaagtacatggtaaagactagttttaacttctgaactcagcagattgagaaatctaaagcaatggtggaaacaggaagagactgtccccttatctaacatgttggccccattttaatttatcttaatcccacctttctgccttttcaccagacccctccccgtcacggtctcctctagaaacacatctaggtgtctcctgaattcatttattggctttgccgcacacagtataataccgcctttgttagtctcctggcccggccccttcaagcacggtgttcagtctcggtgttcctctacccttaaaaaaaacacacaaccaaggagtctctgaaaaataattgtaaaatcaactaaggcaaattcagatgatgtagagacactcagactctaaacgatggaaaaagaaacaaattcagaacattgtcagcattctcatgtcttttttttcccccttaatctctattagtcctgttgagtaggaagtctctgccgtattggattagaaattgagtaaaagaggcctcaggcttgggagtgcactgaagaaataaatggaatgcctttagattcaagaaaagctgtcctcttggtctttggcagtccttggtaataagacaggagaaaaggtttctttctttcaattggaaggtaccatggtatagtaaagaggacactggactggaaattggtgtaatctggccttggtcctcattctgctattctctagctgtatgaccttggccaaatcaatgaacttttctgggcatccatttcctcaccacagaaatgagagggtagaaccttaaccagaaatatgtattagaaatcttttggggccgggcacgggggctcatgcctgtaatcccagcactttgggaggccgagcgggtggatcacttaaggtcaggagtttgagacccacctggccaacatgctgaaaccccgtctctactaaatgtaaaaaatcagcctggcatggtggcatgagcctgtagtcccagctacttgggaggctgaagcagaagaatcgcttgaacccgggaggtggaggttgcagtgagctgagaccacaccacacaacactgaactccagaccgggcgagaaagcaagactccgtctcaaaagaaaaaaaaaaaaaaaaaaaaaaaaaaaaaaaaaaaaatatatatatatatatggagagatttttcaaaatgcatatacctgagcctcttcacagactcagaaccgctgaatagagaacctctgaggtacccagtctgacattccaaggttcatccatcctataaagcagattaagtgtataaccaggcttaaatgagagccagggaacccatgaggcagggcagagaaaaaccggacctttttcaaagggggagggtagttagagaaattgaatccaagtgtaatcagagaagatcattcttcagtcagtatttggaatacagggctagccagatgctaacaaaagaagcaagtatttatgttcatccaacacatatttgagtagtgactacggtaggcatgtggtttaagacaccagaaatccaagaatccttatcccatctaacaggagtgacctacataaaccatgagcacaccatggtaagttcagagaagggagtggccagatatatgaacattattggtgaatactggaaaaagcttcttggaggaggtgttatccagcttgtgtcttatagtgccatgagcagacaggggagaagaccagatcagacggaatagcataaacaaaagcctagaggcataaaagaacacagcacacttacggcaccagtgaaagtctggcatgagaagaatatgtatttgtgtgcatgcacttgaacttttttggagggaaggggtatgatttgttgcagattaaactagaagaatgggctggagccagaacatgaatacttcttttctctccaattttttgctttgaagaatttcaaagaatttttaaaggatgtaagagtaatacaacaaaaactcatataagttgttttgagatctgcaacttcaaatggttcagcaaaagaaaagggtgtgtatatgtatgggtagagataaagcaaatgttgcaaaagattcagcattttgcacaatcttagatgcacaatttttttttgcaacatttgtttatctctatccatacatctacacatccttttcttttgctgaaccatttgaagttccagatatcaaaacattttacccctaaatacttcaatatgtatctgctaagaacaagcacgttctcctatgtaactacaagggttctatatgcatccttacccactctaataggagggatctatataaaccaataattacagcacatcatggtaagttctatctctgaagttggtgtagtgctgcagtaacgcagagtccgatgtgccactcaggacaggactggcaccctgactgtatgcacctatgcatctgaccagttgtaaaactgcctgaggcacctactcctcgaactcttgctacctcttaaggcctaggggtaggaaacatgtgtaaagaaaggcatgtatctaccagacgtacatgttcagtaggaccctgcttaaattcgtaagccaatcccaaaatggaattactctgacttcttagaatttagccttctctcccctaataactgactatccactccaacagctcaggccattttagaaactttcaaaagaacaactggtatctgagaacatgtattcttattttcatggcctcaagcccaagggactgtcctttagttacactcacacttttttccccccacccaagctggagtgtaacactgtgatcacagctcactgcaacatcaaactccctggcccaagtgatcctcccacctcagcctcccacagagctgagaccacaggcatgtgccaccataaccggctaattttatttttgtaaagatggggtctccctacattgtccaggctaactataccttttaatgtgctccttgtctttaaaaacaatacctttggcagtgagttttaattctgacctagagatgcaaaacagtaaaatttttatatcgtaaaatagaagaggtctgaaaatttttgtagggaaagagaggcgatttggtgacaggtggtgattacagaggcctgaaaggaaattttcagaaaaactaaagcctcctaaaatgtaatgcctttgttagtttagaaagataaaataccagccgggggtggtggtggctcatgcctgtaatcccagcactttggaaggccgagaagggcggatcacctgaggtcaggagttcgagaccagtcgggctaacatggtgaaaccctgtctaaaattacaaacattagccgggtatggtgcacgcctgtaatcccagctactcaggaggctgaggcagaagaatcgctggaacccaggaggcagaggttgcagtgagccaaggtcgcgccactgtactccagtctgggtgacagagagagactccgtcaaaaaaaaaaaaaaaaaaaagaaagaaagaaagaaagaaaataaacataatataccctatgtataacctggggtttttaaaaaatcaagtaattccattagaagatggaaaagtatgggaaaaaggaactgaacagttgatggtgggggaaacgatttatttccttttcttccaatatttaagactaacacagcaaacaaatatcctcagaataaaaaacggtatctccctgccccactttttccagtactcattctgggcctgcaggactggcttccttcattcttcagatagttactgggcacctattcaggaaaggggcaataacaggcactttggagacagatgtacgtgatcctgcaccacaggaattcacctggaagacagtcaacataagtgaataacagtgatacaaaatagaaagagtaagagctggaagaagggtagatataaatcattaaggtacttccttaggggaaactgggattggcttccagttagctgtggaaggatgtgaaggaattgaggctggggtgttagggcaatctaggtgtatgcatggagtgagcaaagacacaagacagaaatagcaaggaattcagcttggctggagtgaagggtatgtgaagcaaggatggaatgtgatgttcactgagtgcttactaagtgccaggcacatgtgctagtaggtttcacatatttaaggttcaagaagaactagaggaaatgagtttggagaggtggtctggagtgtgatcgtagaggaccttacaaagcaaaatggtggttctgagaagcaaggcagaattacacaagagtcaagttcagcccacagttcctccatttttcctaggccctctgcatcatcccatcaagcagctctgctagagagtgagcaggggaccatgaggtgacagaaggtgcattcttattccagaagtctcactgaggcaacaggcatgccagggaccgctgataagggtaaactgtaatttctcaactacagcccactcccatcccttcccatctctgtcttggaaagcttgagcctgctcattgtgagccacaaggtggagatgtctggcagggcagaactgagaggaagtcgtttagccagcctaaggttaccattaacactttgagccactgccgtgagctaatttttatgtttgttttttaagtttggttgaaatgtcacaaatggaaaaattaagtaaagcgccctggttagccacaagactggacacacctggctgcaaacccagcaaaagaaacttacttcattagtaggagaggcagagagtgaaatttacatctgaaatctgcctgcaccaggagaaagtgctgaggccaaaggcgctgtctgtttttacagctgtgtcaagacttagttctttactcttaccaacactcaggagtgcggcaagggcccaaggaaaaatggtctccaagctcttcagctgcaactcagctcacaaagatttttaagaagcagttaatgaaataaaactagaccagatgaggtgatataatgaactttatttccacagctaatttataagtttaaatcccaaataatgtttttttaagtcagaacactctaaattattgatgtgatttttgtaacctcaaatttaacacctgctttttgtaccagcttcacgatgatatatgagtctgctccatttttcacaatagttgggctccaaaaagttggtgaaaagcaaatttttgtaaaataaaaaatttcccaccaaatcagaatagaattctaatttcaaaggagtttttgatgcaaatttattattcatcactaactcgaaagtggctctcttatttcttgatcttccacacaccaatccactcaaagcaatcacctctaagtttttggcatgagaaaaatcactactacattgattggttttataaattctacattttatatgttttcttacagaggtacacctgggatgccaaataacacagagatagatttgcaaattaccaccttcaaaccatagattttcaagctgaaaaaaagctgaaaacttggggctcatgtagttaggcctcccctgtccccacctttcttttaatacagaaactgaagcacagaagaggaaagatttgccagtcagggtgagaaccaggccagactggctctacactgcctattacttctccctagccacgtgtcccatttataggttgtacacacacggaagactgagatcccctcaaacacacacatgcactcacactcatccatgcatgcactcacaacccagtgattaatatacaattgtcttgcctatataaggcatgtctatttatgccatgaggttagaaagaaggtatcaagtcaactatagcagaaagcagtaatagtaattccccaactcttccaaatctctattattttaaaaccatcatcctttagttatagtctttgtaactaaaccggaatttgggcacttctcttcatgaaggcaatttaagagcctgtattgggggaccacctaaaaccttgctattgtcccctaccccaccctgcgtcactagcaacatccgcatcacctggaagcttttcagaactgtagattttctcacccctgtcctgaaacttactgaatcagaatctgtattttaacaagatcctcaggtgaaccataggcacattaaagtatgagaaacgctgatctaaaacactcccttatggggcagcaccctatctacaacaatccaaatagaaaaaacggctggataaaatgcgataggggaaaaattccccaattcctgcaggactgcactgatatacacttggatcagagactaataaagcaggtatgatttatctaataaatgttagcttaaaaaagaattccaaaggctggtattcaatatattcatttatttgacaattatttattcatttgacaattattcaatgtttactgcataagcaaaaaactgaataagacggttttctgcttttataaaacttacagttaagtagaagggacactgcataagaagtaacatgggagaaggctcaagtgttgacaactgtgatgaagagagatggaggtccagaaggaaattcaactgtggcgagaggcaactaaaaggttcctgcagtccaggagtcagcaacctatggctcattaagctattcaggatagagacagctgtggctcatatggctagtgagacaacttccaacagagtttagtcaacaatgataagaagaacagtttcactacaggaagagctactgcgcaactgcctggcagtcagccagggctttggctgaccaggaggtatctctggccatcattaaataggactgagactgccaacaccaccttatgtccactgtgcactgctacagagttgggtggtaagtacttgagggcatgtgggaacattcagctggatgaataccttaaaggctgccgatctcactctgggcagctgtgatattgtgaaatatatagttggtcttcaactcccttcctggcatacaactcctaaaatctttggcctttccaaagtggtgtcattttgtatgctaatgattggtggctggcgcacttaggtagcttcagggtaggggctggtcactgaaaaaccaagggaggattagaaggttaggactttctgtcccatctcccaacctccaaggagggcagagaggctgactgatttccaatggccagtggtttaatcagttgtgcctacataatgcagcttccataaaacccttaaaaggactgggtttggggcacttccagatagctgaacaggtggaggtttctggacagctgcacaccaggaaaggtatggaatctcctcaccccttcccccatcttgtcctatgcatctcttcatctgtatcccttgcaatatcctttataataaaccggtaatgtaataagtgtttccctgagttctgtgagccgctccagcaaattaattgaaccaaagaaaggggtggggaaccccaatttataatcggttggccagaagcacaggtaaaacagcctggagcttgcaattggtgtggcaagttgggggcagtcttgtgggcagagccctcaacctgtgggatctgacactatctccgagtacacaatgttggaattgaattgggttagaggacacccacctggtgacctctctccagaattgactgcctgtttgctgtgtggggagaaactcccacaaatgtgtcacagaaaccttctgtgtaattgtaattgagtgagagagctgaaaaaatactttttttctctatattacacagcagctacgacagaaagaaagcaaaaaatgaaaaaggaaccaaaaaggatgattacaaagatagctctcaggcgaaggatacgcatcaactcaaaaatggttacttttctccttccttgaaggtaagaaaaaataacataaaaaataaaaaaggttacttctggggagttagactggggggaaaaaagacacttgttttttacactcaatactttttactctttgatttctattctatgagcatatgtaacttttataatatgtttatttctcagtccacagggagaactttgccctgtaatgaaagaaaccaaattaacccatttcatgacccagtcatggttctactttggatgctcccaagctgggaggcaatgaaatgcttcccagtaacagggaactacaagctactaaaacgtgatctagatacacaaaatacacaacataaacaaaagaagatactagtgggaggtgaagccagctgggcttctgggtcgggtggatacttgcaccaatcagtgctctgtgtctagctagaggattgtaaatgcaccaatcagcattctgtaaaaacgcaccaatcagcgctctgtgtctagctacaggattgtaaatgcaccaatcagcactctgtaaaaacgcaccaatcagcactctgtaaaatggaccaatcagcagacatgggcagggacaaataagggaataaaagctggccaccctagccagcagtggcaacccgctcaggtcccccttccacactgtggaagctttgttctttcggtcttcaccataaatcttgctgctgctcactctttgggtccgcaccacctttaagagctggtaacacttgctgtgaaggtctgcggcttcattcttgaagtcagcgagaccacgaacccactggaaggaagaaactccggacacaccatctttaagagctgtaacactcacagcgaaggtctgcggcttcattcttgaagtcgcgagaccaagaacccaccacaaggaaccaactccggacacactatgatctgtataaccagctatattctagtgttttggtttcatttttctattgtcattacatcccatgtgacatatatatatatataatatattcccctttctcaggttaattattaaatgtactaatgtacattttcaggaggtatcttaccagactcttctaggttgccagtgatcaaggagcttgagtttcagttcctgaagacagtgcaggccccataccagggcctcccatcagaactaatttatagaaggactggttcaaatattgaactggtgtcaaaggtatagtatccttaactggattatcatttgattccctccattcaccaaatccatccctcctatcaccacgatttgggctttacaatcccatctccatacaggatgacttcacactgacaaatcactataatgtgtacaaacacataaagtatctgtggagtattagtttccacagaggcagaaaaagtgactttagcggaactgccacttgatattaggcagcatttcacagaaatctaaaagcagggccattttacaacagataaaactccaaactcaaacccttctctggaattgtccaggacaagcatctgacagcactcacttacccccatgactctgccgcgctgctgaacatcctcccacataaaatgaactatgatacgacacatgtacttcccactccggccttcctgcttcattcggactagacacatcctgggtgggaagaagacaaaaaaagtcttggctgtttgcatttttcacatcacacatttccactgaaggtctcctcatctaagagtgagtttagcaaagggcaccaaatcaaactggaagtgaactttttttttttaaacttttactgagatataacaaagatactattaagtgtataaatcttaagtgtactgcctgataaatttttatgtattatacatacacccacacaagcaccacccagatcgagatacagattatttagggcacctctgaaggctccctcatacctggagggaaccacatttttttgttagaagacaaacaagtctgaatccttcattttactgatgaaagcaggagtcctaaagacggaaagtaatttgcccaacaccagttttatatccgtaaaactgggtatagaactgtgctgtccaatacagtggctcccctgtggctattgagcattttaaatacagctagtcaaagctgagatgtggcacaagtttaagatttcaaagatttagttgaagaaaaagaatataaaatatctcaatttttaatactgctttcatgttgaaataatatttcagatatactgggttacatacaatctattaaaatttgtttctttttactttttcaaatgtagatactagaaaattttaaattacatacatggcttgcgttatatttctgttggacaacacctgtccagaacacagatcacagaaagtattatgattacatttgtgtaattatccaattgtttcccccactagaaggtaagctctactgaagataaagatcaaatctggtttttgtcaacattttatttccagggcttaagtacagtaggcactcaatatacacttgctgaataaataaatgaacaaacacctatggttagggccaagtttaggaccttttcccctataccacatttgcctctagtcagtccagagggctttctgaataatcaagacctcacataatctaaacatacaagaattatattttattatatataggaatataagcagggtccccaacttttcaaactagttcctcatttcatgcatgaccatagttcattcttttttgttttgttttgttttgttttgttttgttttttgagacggagtctcgctctgtcacccaggctggagtgcagtggcgccatctcggctcactacaagctctgcctcccgggttcttgccattctcctgcttcagcctcccaagcagctgggactacaggcgcctgccaccacacccagctaatgtttttgtatttttaatagatatggggtttcactgtgttagccaggatggtctcaatctcctgacctgtgatccacccgcctcagcctcccaaagtgcttgttttctcctttttgagacagggtctcattctgtcacccaggccggaatgcagtggcacaaacacagctcactgtagcctcaacctcccgggcttaagggagcctcctgcctcagcctcctgtgtagctgagattacaggtgtgcaccaccacgcccagctaattttttatttttttgtagagacgggggtctcaatttgctgtgcaagcagatctcaaactcctgggctcaagacttcctcccactttagcctcccgaagtgtggggattacaggtgtgaggcaccatgcctggcagactataatttttattgtttctcattaaatagcttattaagcagctacaataggattactcacctaaaagacaattcctgttataattatggaatagttaatccaacctgacaattctatatccatacacaattgatcttgccaattaaaatctaccagcaatagtaatggtacaatgaaatgattacagcttggcctgtctcaacatctttgttaataactaagatggagaaaagaaaacatatttaccaaatttgcaggtgacaagaagctgggcaggagaacaaatgtgccagatgatccaaccatgaaccaaaaatacttcaacaggttgaatctaacaagatcaacctaatggggataaattcaggatcctgcatttgagtctaaaagaacaactgtaaaagtacagcacagataagtcatgcctacctatgtgtgaaaagacttataggcttaagttgatattatgtgctcagtaggaatcaagaggataacaatgctgccctccaaattaatgtgattttagatacagtaatgcaaatataataccatcaatgtgtaaagtgagacttttgttatactcaacacaaaccagaacgtatttggaatactatccacagttttgaacattacattttaagaaataggaggactagaagtatcttaagaagaccagaagatatttaacctggagaaaaacaggaaagttgacttaaacattgtagaaaagcaattaaactgtttaccaaagagaatcaggtcaggcctggtggttcacacctataatcccagcatttgggaggccaaggcaggaaaatcacttgagcccagatgtttgagaccaacctgggcaacacagttggaccccgattctacaaaaaatatgaaaattagtcaggtgccgtggtgcatgcctgtagtcccagctactcaggaggctgaggcaggaggatccctcccaaaaggtcaaggctgcagtgagccacgatggtgccactgaactccagtctgggtaatggagtgagaccctgtctcaacaaacaaacaaacaaacaaacaaacaaaaccaaagagttagaatcagaaccaatgggcaggccatagagggagaaagatataatcaacattgaacagcaaaattaaaagcttactaacaggaatgtctaaagttttgtttttttaattttagagacagggtcttgctctgtcacccaggctggagtgcagtgacacaatcatagcccactgtaacttcaaattcttggactcaagccatccttccacctcggcctcccaaagccctgggattataggcatgagccactgtgcctggcctgagtgtctgaagatttgaataatcaaactgacaacctcaaaaagtagagaatttgtctgtcacggagaagtgaatcaacgcttggtgggaactcgggtatctgacagaaggttgacaacatgaccaggtgcagtggctcacacctgtaatcctagcactttgggaggccaaggccagtggatcacctgaggtcaggagttcgagaccaacctgtccaacatggtgaaaccccatctctaccaaaaacacaaaaattagccaggtgtggtggtgtgcgcttgtaatccagctactccagaggctgaggcaggagaaatgcttgaacccaggaggcagaggttgcagtgccaagatcgcaccactgcactccagcctgggcgacagagtgagattccatctgaaaataaaaagaaggctgactacatgatcccaaatgagatttactgatgtgattcgaaacttgtaggccaggcgcagtggctcacacctgtaattccaacactttgggaggccgaggtgggtggatcacctgaggtcaggagttcaagaccagcctgaccaacatggtgaaaccccgtctctcccaaaaatacaaaaaattaaccgggcgtggtggtacaaacctgtagtcccagctacttgggaagctgagacaggacaattgcttgaacccgaggggtggaggttgcagtgggccaagatcgcgccactgcactccagcctggtcaaaagagcaagactcttgtctcaaaacaaaaaaacaaaaaacctgtaacctctgaccccaggtagtgcttaagaaatagcactttgtaggctgggtgtggtggcttacacctgtaatcccagcactttgggaggctgaggtgagcggattacttgaggtcaagagttcaagaccagcctggccaatgtggtgaaaccctgtttctactaaaaatacaaaaattagccaggtatggtggcgcgtgcctgtaatcccagctactcgagacactgcggcaggagaatctcttgaacccgggaggcagagattgcagtaagtcaaagatcacgccactgcactccagcctgggcaacagggcaagactccatctcaaaaaaaaaaaaaaaaagcactttgtgacaataatgaaacaggtcacagaaaaaagatttggctactttataggacacagagcctattccacagcagaaacaaactggggaaaagttcaacagtcctttttcataagacttttctaaagttaatcaaatccctcatgtcagcctctcacctgaaaagacgctgtgtgttttgatgcttaagtgttgtcagaggccaattcatcaacagcaatagtgaggtaatggaattcttcatttatttgaaaattctgtagtttgttaatacacctgccctctgaggtttaaaaggcacagattttctcagaccataaactttctaactgtatcaacatgggatgaagtgttttttgtttcacaacacagtttgttctatagcccttacagataacagtgggctcaaatggttatccagttgaaaagataaggcaaaatgaagacactttcaaaatggtgactgacaattcactcaatgaacacaggagttcctattgtgtgaaggtgtatggttggatgctgtggggattatagtgatggctaaaactagaacccagcttttatggagcagtttcctctaggggagataaggtacaccacacatcaacagccctaaaagggaatgccatagatctcccaagagaagagtgcaatgaagtttaaaaggatgacttttggctgagtagaatcagagaaagcttcatggaaaatgaaacactgtacctggatcttagaaggataagctgaagttgaagaggttgagacaaaagacaaagggaatgtccagctgatggaatgttctaagcaaaggcagggccatggaagagttcaggatgttaaggtaacaatgaatacctagattgtggggaggacagggtataggatgcagaaaactgaagccagaaaggtcatgaagagctttgaaatgacttgctaagaaaaagtatggactttgctcagcagagagtggccagctactggaagaagattcgctccttagcactgaccggagatgagtctctgagaagttaaccttttcttcccagcctcaatcctataattaaatatacaaatatcaccagggctggaaaaggacaaatttggtgaatatagtcatgtaccacataacaattttggtcagcaagagaccacacatatgagagtggtcccataagattataatggagcagaaaaattcctatcacctggtctagatgatcctgacctggtagaggcctaggctaatgtgagtgtttgagtcacagtttggtttttgtttttttcagagacaggttctcactttgtcacccagactgcagtgctgtgatacaatcacatctcactgtaacctcaaactcttggactcaagctatcctcctgcctcggcatcctaagtagctaggactacgggtgcacgccactgagcccggctaattttttaaatttttttgtagaggcagggtctcaccatcttgcccaggctggtctcgaattcctgggctcaagtgatctaccttggcctcccaaagtgctaagatacaggcacgagccactgcgcccagctctatgtcttaatttttaacaaaatttttaaaagtagaataaaatttaaaaaaacagaaaaaaggttacagaataacaatataaagaaagctatataatgtgtgctttaagcttaaaatgtcagagtcaaaaagtttttttaggttgggaacagtggctcacacctgtaattccagcactttgggaggccgaggcaggtggattacttgaggttaggagaccagcctggccaacatggtgaaaccctatctctactaaaaatacaaaaattaaccaggcatggtggcgcgtgcctgtagtcccagctactcaggaggctgaggcaggagaatcacttgaacccggaggtggaggtttcagtgagctgagatcatgccactgtactccagcctgggcaacagagcaagactctacctaaaaaaaaaaaaaaaaatttaaattaaaaagtttataaagtataaatgttacagtaagttaagtttaatttattattgaagaaaaaatttcaaaataaatttaatgtagcctatggccaggtgtggtggctcacacctgtaatcccagcactttgggaggccaaggtgggaggattgcttgaggccaagagttcaagaccaaccaaggtaacaaagtaagaccccacctctacaaaaaaacgtaaaaattagccaaatgtggtggtaagcgtctgtagtcccagctactaaggaggctgatatgggaggattgcttcagcctgggaggtcaaggctgcattgagttgtgattgtaccactaaattctggcctggatgacagagtgagaccctgtctaaaaaaaaaaaaattagcttagcttaagtgtacagtgtttataaagtctacagtagtatacagtaatatctgactcatccagagcaacttctagttctgcaagctgtatttatggtaaatatcttatacaagaataccattttttatttcttatattgcatttttactgtactttttgtatgtttagatacatttagatacacaaatacttaccattataactgcttacagtattcagaacagtaataagttgtataggtctatagcctaggagccataggtcataccatacatcctaggtatataacaggctataccaccgaggtttgtgtaagtatactctatgatgcccacacaataatgaaatacctaatgatgcatttctcaggacagatccccatcattaagcaacacatgactgaatttactttaatagaacatcattttcagaatattctgatccagaaatataaactaaagattatacctgccttttgagaaatatacaaccagcaaagattgttataacctgtacctaattttgctgatactaacagtttagaagacatggattgacacctgaaaataaaaggagggcaaattctctttttttttttttgttttgagacagagtcttgctctgtcgcccaggctggagtgcactgacgcaatcttggctcactgcaagctccgcctcctgggttcacgccattcttctgcctcagcctcccgagtagctgggactacaggtgcccgccaccacaccgggctaattttttgtatttttagtggagacggggtttcacagtgttagccaggatggtctcatctcctgacctcttgatccgcccaccttggcctcccaaagtgctgggattacaggcgtgagccaccatgcccagccaaaggagggcaaattctcattactcctaaaacattggacccaataagttcaacagaccttttattgatgcagaacactaaatattgtaactcttcatttaacatcacagatagattcttggaaactgtaactgtaagcttaacaacttacgaaacctattttaccataggctaagtgacataaacaagagttatattcctacagtatatttctggtcacaaaaacatcactaaacttctaaataaagacccaaaagacttccaatattaaacactgaaataatgtgagctatgcatacattatggcacggcacactcacacccacacccactccaataaggacaatttagacatgctaattcaccttctgtgcacatctttgggatgtggaaggaaacaggaggacccagagaaaacccacctagacagggacagaacatgcaaactccacacaggcagtggccccagatgggaattgttatttttctcctcatcactgttataacaaagtgacattgaacagaacaatgtaatttgaagaaatgctatataaaactctaccgcaaatctcattacacataaagttgtaagaccaaaggcaaagaatcagtcttcctatcaaccggaagttactgaagattcccatgagttctactgggaaaataaggttctgatccacagggctgtccaatcaccagtacaacattcagctaattaaatgctcacctaattctttccctgagtttgtgaatcgaatttactaggtagttaaggacagaaaagcagtcctgttgtgaaggacttttttgtttatcctcttcaagggaaaagcagagctgaaggctgggccaaaatcttaagaagtcagctgcctggaatgtccagacaagcagctgaataccaattcttaggccacctgaccttgaagcctatcacattcaatttacgcttgtttgataactgtttttaaaaggtaatacatgtacatagtaataaaaaccaagtctccttcctaccttcatcccctgccaacccgttcctctcccaaagacaacctcagctactagtttcttaggaatccttccacatataacctatacacacacaagtttatgtatgtgtgtattctttttacataaatggtaccttctttatcttcccttttgtgctagcattctacacatactatctttttttttttttttttgaaacaaggtctggctctatcacccaggctggaaagcagtggtataatctcagctcactgcaacctctgcctcctgggctcaagccatccttctacctcagcctcccaagtagctgggacttcaagcatgcaccaccatgcccagctaacttttgtattttctgtagagatgagatggggtttcgccacgttgccgaggctggtctcaaactcataagctcaagtgatcctcctgccttggcctcccaaagtgctgggattataggcgtgagccaccacaccaggccaacatactattattctcagacattaagaaaaaattacatctgatattggaatggaaggatggaagtgaagaaatctcaactccaactctgtgtttcatccacagacaccccagtgaaaacttttggacaccagagataatagattactactaacttatttgaccattattagggtgacatctgattgacgctgaattcaaccagttagtttatctggcaatttttcctattctaaaaatgactaacaggaagaaagaaagaaaaaaaaaacttaaatagcaaaaacggacaagtgctataattaacagttaacacaactacgtgccaggcactatgccaagtgatttggatgcattatttttcctaatttttacaacaactccatgaagctgatacttgtgtccttactgtcctcatttcacaggtgagaaaattgagtcctagagaagtaacttgcccaatgatacaaacctagtaagtgctaaaactgagatctgaacctagacaatctgatcccagagtcctacgaaggtttttgttgtttttgcctcctttaatgattagaacaaaccctccaggatctattgaccctatttttcattcagtcctcacaagtacagtaatttaagcttcaaaactagcatcatattagaaatagcacatcaggaaaaaaaaagactggctaactggaggcaagcatacctataacaagagtaactgctagcagcctagtaggaaaagaggaaatgaaaaatttatttaatagagacacgaaaaaaataacagagcaattgaggttcaacaggtacaactcagagacaatagtctggcaaaatacagttaagagttatcaggacatcctgaatcattcagaaaagactgaagtatgttgaatggtaaaagaaaactaaataggccaggtgcagtggctcatgcctgtaatcccagcactttgagaggtcgaggcaggcagatcacctgagctccggagttcgagaccagcctggacaacatgacgaaacctcatctctataaaaaatacaaaaattaggccgggcgcagtggctcacgcctgtaatcccagcactttgggaggctgaggcaggcagatcacctgaggtcaggagttcaagaccagcttgaccaacatggtgaaaccacatctctactaaaaatgcaaaattagctgggcgtggtggcacatgcctgtaatcccagctgcttgggaggccgaggcaggagaatggcttgaaccagggaggcggaggttgcagtgagccgagttcacaccattgcactccagcctggcaacagagcaagactccgtctcaaaaaaaaattagtggggcacggtggtgcatgactgtagtctcagctacagtctgaggcaggagaatcgcttgagccccagaggtggaggttgcagtgagctatggtagtgccattgtactccagcctgggagacacagtgagaccttgtctcaaaaaaaaaaaaaaaaagaaagaaaaagaaacaaagaaaaataaataaaacaaagtcaaaatggttaataaaaataaaagacttgaagatcctgctacccactgcaaaacaaagccaacacctgtcacagactctgaccatataacaataacgttgagtcattaagtaagctatttcacaatacagctcactttaactcacatcatgggtgtataccctcataataaatgcctaaatttaacattgagaggtcaaattacattttgccactgatttaaagtcataatgtcagacctctgttggaaacgagggggaattgagaagggcagggggcattatggaggggataacacacttccatgctaaaacataataaataaaaactgcccttaagaatgcaggctgggcgcgctggctcatgcctgtaatcccagcactttgggaggccgaggagggtggatcacctgaggtcaggagtttgagaccagcctggccaacctggtgaaacctcatctctactaaaaatacaaaaattagctgggcatggtggcaggtgcctgtggtcccagctactccggaggctgaggcaggagaatcgcttgaacttgggaggcagaggtagcagtgagccgagactgtgccattgcactccagccttggcatcaacagtgagagactctgtctcaaaaaaaaaaaaaaaaaaaaaaaagcaaagtatcagtgtgccaatctgtatccaggaaacaaaaaaaatgcaaaataaacttaaaaaaatcttgtaatgaaaaagattcctatattaattaactaatcatttattgaacaagtattactaagcacctactctgaatatagactgaatctgtgcagaagctactactctgtttaggatcaaactcaagttgctcctcccaagtttgatgtgtcacccaggctggagtgcagtggcatgatattggctcactgcaatctctgcctcccgggttcaagagattctcctgcctcagcttcctgagtagctgggattacaggcacccaccaccacacccagccaatttttgtatttttagtacagacacggtttcaccatgttggtcaggctggtctcaaactcccgacctcaagtgatccacctgcctcagcctcccaaagtgctgggattacaggcgtgagccaccgcgcctggcctgatgatgttcttaaacccacaatttattatttaggttttaagcttcacagtactatccttgtctctcagtgattccagtggctcatacataatactgatctcttttacatataagaaaggcaaataacgcagctagcaaagtaaagaaaaaaaggagtgttcaaacctggcgtgcaaatatctctaaaaggcaagcatggagacgggacaaaggaagaaaatgtcactcactaggaatatcaaataataaagggctgaagctatcaatcctgccttatagaaaataataataatgattactaccatttactatgttctgtaatgtgagacttgtcactgtaagatgcatttacattcattctgtctctcaggacattataactgtccccgtttcacagaaaagaaaacacactctgaagaggttaagtaacttaaggttgcacggtagagaagaaagaagctggaatgaagcctgagctcccccctttttctcccattctgtgatagcaccaagaacctcttcctgctaaataagacaaatcggaaggcaacaacactgtctgtagagttcaaaggaataggagagtttcctagctatgatttcctcctgtcagcctaaatctgggagggaagattcttgttattcctgatgctgacctcctgccaggtactggcagctctgagcatcctgtctcgctcactctgcttgggccctctgacaatgccagttgtgttttggccttgtttctcccacatgatagtttataagctgcttagagtagatctgattttgaattaataaagactagcaggcacttgggcaggttcgtcactctggctgctatgaaggaatcccaaaggggactttcacacagcatgtttcccttactctgtcaccagctgaggccaagaaagcagagcctagatggctacactcaagccccagcagtgtgctaatgaatgagtttattgatctgtaagctggcacactgacccttttccagggctgtgtacatggctatctccacctggtttcccaaactccctcactatgaagcctaacccttctggggggagcatgagggccacaggacagcctgtgggcaaacagacaagttgggtgaggcacttcctgaagccatctcacctgacaacgagcctcctccaagagctacacctggcctgcagcttgcctgtcagatccactataaagaataagcccctgggtaccaggtatcagcgcacttagggtatgcaatgctggtaaaatgctgctgcataggcctttggtttgggcaagaaagctacaagcgtgggtgtttgaacactgcaactctggctgggggagggcaaaagaggatgtgcacatggccagggctcaccatgtatagcaggcctggggttgctggaatccagcagaagcctgaatgccctacagctacatcaaaagtgctgtggtggttttaaagagcctctgcagaggctgccagtgtctgccggtgcagttctctggctgcgctgagactggcaccagtctgctttctaaccctttcccatccccacactttaattccttcttttctttcccaaaggcttcttcccttcagcttatgaaatcattccagtgtttccccattttaaaataaaaaacaattaatgcttcccttctgaactgtttttccctcaagcgatcatcccctcatttgaaacttcttgaaaagtagtttacaataacttctttgcctcttaattactcctcaatcccatatagtctgttctggcccccagaaggccaaggcaactgctttccttgaccatccccaggcaaccccccttcccccgtgatcccatataatctgtacatcaccctgtgctagtttcaggtttacctgtggcctctcccaggacacagatagtgagcgccaagaaacacggggcccatcatacagctggtgatccgtaaatgtttgctgtgctcatatgacatgttcatactcaggggaagagacccctatcccctgaccaccaaataggacaatcagaaaggaagcaaagtgtttagaaggggcaggtaaccatagttaacttcagagttgtctcgggtcagccactactgagtaagtggcctgagacaattccttaaaattgccaaaactgtctccccatttgcaaaatgagagaattggactagatctgtagtttttaaactacattctgagtttccatggaactacttaacagtcttttttcagtggacatgttgtgaagatgtgaagcaagcaggtcattcccacctcctttcatcatatttatcatatatggtggctgagcataagatttcatttttaaaaaggactctgctgataaaaagtttgaaaaccactagatccctctacctggaaggctttttcatccactctttcacttgctaacttctactcaccctttaggtgtcaatgtaaatgtcctcttcagtgaagccttccctgactgacccacccctaaactaaatgaggttcccagcttctcccacatagccttgtcacatcctctcattgcacctatcacagttgtattttattagtgatttgtttaatgtctctcttctcacctaagccttaagagggcacgaaataaatttgtctgctgtacacagtaccttcaatcaagagaataaatgccataattttatgaatctatgtttaagtaggtactttagtattaattaacattaatttaagtatttaattagttactttagtagttataattactaaagaggaaagcaacttaatgctttcagttagccagaccagcacctgaatttcctctccaccacattctaactacttctttgggaaagttctctgacttctctaagcccctgatccctcatatgtaaaatgagaataaagtagttgtgagcatgtgtgaaataatgtatgtaaataaataaatgataatatacataaaacacctagtagtaattgtatttatgaaatacctgactttaaaataatctttaaaaacagactacattttactccctctccatcgtacctccatcataggtatgttccaattttatttgttccattccattttgtaaaattaatttctgcactgagaaggtactagtgctccatgacaatttgaaaaggggagtctctacaaatctgttaacacttacaatgccaacacaaattccaactacataaatctccctgcccagaagggaaggtttcaaagcagagataatacctgaattggatactgaaggaaaaacaggaatttgtcaagtggagaggcgggggaagggccttctaggcagaagaaactttgtgcagaagacttgatatttctactacatagttttgctttttcttgcagagaagggagtagtgatggtaatagtgcctaaaatagcaacaaatgagactagtaaaggcaccataggtcacatttgatcagatgtgaatgccatgatatgaaacttttattttattttattttccgagatgaagtctcgctctgtcgtctaggccggagtgcgtggcgccatctcggctcacagcaacctcagcttcccaggttcaagcgattctcatgctttagcctcctgagtagctgggactacaggtgcccgccaccatgcctggataatttttttgtatttttattagagacagggtttcaccatgttggccaagctggtcttgaactcctaacctcaggtgatctgcccacctcagcctcccaaagtgctgggattacaaccgtgagccactgggcccggccaaaacttgtattttattctgagaacaatggagaacattaaggagtgagtgcatgtgtgtgcgtgtgtgtgtgtctgtttgtgtactgaccccatttgtactgagaaggccaatggaatggggatagggaagctagaggccaaagaccacttttcaagtactgttggttgcaactcagtgaaatcaatttagtgggtgacattatcaatgtctgtttaaaatgaattcaaatggaatagaaaatatcaggggttccctctctcagccttggagcctcctccctctgtctctgtacaggggagctgcttctttcttccttcccccttctttcttttctttcttgcctattaaactccttgctccttaaaactaaaaaaaaaaaaaaaaaaaagaaagaaagaaacaaaagaaaatatcagagattacctgacattataaggataaattttacagaacttctgtatcagattcatgtgtccattctggtcacaaagtaacatgcatttgttacgatgggtcagagtcaaaaaaattttgagttaggtgactgagcaggtgaaggggtgagagaagagacaaatgagggctcccaggtttctggtgtgggcatgatgccagtggccaagacaggatataggggaggaggcctgcttttatcaagtccacgtggggatgctagacagcgcagacagtggcctctctcagcattttttcagcagccacagtcaatactaatcttgttcagcaaagacaatgaacacatagtcattgcagctgcaagctcaagtgagtatacaactgataagggtcctctaggagctggagggtgtcccagtcctaaatcctaaaccacagaaaaactgtgaaactaaaaaaatcagacaggataagtgaaacaccatttcctccagggaactaacagggtgtgagaaatcttgtccttattctaagagtcaacagggaacccttacccttgggaacctaagcaaaccttctgaaatgtcagcgaccagggtatttttgtttattagtagtttgtttggttttggttttgtttggcggaggaggcattatttctacttttctgttttctaagcctcctcccccaccccacactaccacctccaagaggtacttcaacccctatgcctccagcaagtccactgagtcctgtaatcttgatgtggctatccttcggttaccctcctggagcttcaggctaagagagcagggccaatagaacatggcttctccacagacttggggtggatccatcattcctcctaacagcctgcccaccccgcccctgcacgattccattagaagaaagacttctccgattcttggaggatcacagcacaactgagccccaaactaactactttcctggtgacccttccactacattcctcaataaacctgccccagacacatcaggcaactggctgccctcaaatactccatgttcttgtacacattctatcttttgctcctattattccctcaatctaaaatgcccaccctttctctgacagaaattctagtcactcttcgtggtgcatctcaaatgtcacctctaccacaaagccactctttatccaacactccaccccatcaccaaatctggatttagttacaccactttgtgcttccactgcatctgcctgtgtcttgggcacagcatttctttcactggcatgcattataggcaatcgtgctttatgtctgttttccattagacttacatttcttgaagatacagacacagagtctgtatctgatttgcccaaaagaaattaccagaaaagaatgcatgtcatacccttctctccaacatcccatggtcctgcacacataggaggtcctcaagaagagtgctgattcaaactgaaaagctacagattctttccaccaaaacctgcatatcatcagaactaggcgagagaaagagtggaaggggaatcaagtatagatttgaagcagacagcttccctctctcaattgaactgggggtggtacaccctactcctcagaaattaaaccaacctcagcaaggaagattaagcaggcacagtttggaaactttaaagaactataagtagtttcaaggttctcccatctgctgttagtcaggtattgaccttgggatgtggtcacagggattatatattttattttattttgccatccactccctctaacactgatacctctagctatatgggcaataaagagtctttcatacaggttctgaatattatctttgagttcccctagccttcttgcaaccctcccacctttccagtgagtaattttacagtgccacctctacagtcctcctctcctaaaaaagcactttttcccttcaatatatgcagcttccttccctgaacgctatgccttacccttcaccattcagacaacaagatggcaggcagtgtgccttttaagctacctgatgcgtggcacatttcaaagaactaacaggtagaagtataagggttttgatagttgcagcttcctttgtgatcctataagtacttcttactcatatttattatataacttaggcattctgatttataattgaccattttacacatcttatctccctcactagactgtgagcttcttgagaactattccctagttcccacaaagtgcccaggatatggtgtgcacttactaaactactgcttagaaaaagatagcataggctgggcacggtggctcacgcctgtaatctcagcactttgggaagccgaggtaggtggatcacttgaggtcaggagattgagaccagcctggccaagatggtgaaaccctgtctctactaaaaatacaaaaaaatcatatgggcgtggtggtgggctcctgtaatcccagctactcggagggctgaggcacaagaatcacttgaacctgggagacggaggttgtagtgagccacaactgcaccactgcacttcagcctaggcagcacagtgagactatgtctaaaaaaaaaaaaaaaaaagcataaaataaactgccaccttaggcccctaagccaaactcagtgtaactgtgtgagtacagaggaagaaacatttcagaggtgatcaaaaccaaaaagtatatagtagtcagttgtatgatgcaaaggttcagctgaaggcagtctcaaacaagggtccttttgacagggcagccattcccatgttcctcagatactcactatggtcaaagtagtaaacttagttctccagaatttactttcccaagatctggcagttcaataaatacattccccagcccctgacttcaacgactctcctatatccttctgacctttaatactgtgtaacattagatgaaaaattgattttttttggctacttatttcacagctgaagaaaaaatatactgtttaaggtgttaaatatttttacatgcaacaaacctggcatgaagctaacttgtatgcacattttagaggtacaggcgtaaatgtcagtgctataatttgttataggtttctgatgaccagcaatgaaaatgaccacggattctcacaattcaaaccacttttacgtaaatgtgaactttcctaaaacagccaagggagagaaaactttccatccaagctcatagagtgtgttaagagatactgatagcattgttcactgggttaggtgttctctgaaaaaatcctacaaatattagtttccttctgggcttatgctttgacctttaataaaaatgtgcttcaagacaccagttattaaaatgaaaggaacagtttttaacacctgaacaactgccatttcatataatcagccctcctgaaggctataccttacaagtcagcagtgtttaaaaaaatacatttggtgacttcatttaaattgctcacttaccagacgtggagtagggttataagaaaccatgaattgaatgtatcaggcatctgacaccctagaaaataacaataaggtataagtatgtgagggtttaaaggaagcatattgaccatatattaaatattggcaggcacggcacttatggtgctctctgattatgctattgcagaaaagtccagtagaacaatagggcgagaccacaggataaaagaactttgaatcatagcacgccaggagtaaaagaaaaaaaaaggatggatgcggtggctcatgcctgtaattccagcactttgggaggccgaggtgggcagatcacctcaggtcaggagatcaagaccagcctggccaacatggcgaaaccccatctctactaaaaatacaaaaattaaccaggcgtggtggtgggcgcctgtaatcccagctactgaagaggctgtggcaggagaattacttgaacctgggaggcggaggttgcagtgagccaagatcacgtcactgcactccagcctgggcaatagagtgagactctgtctaaaaaaaaaaaaaaaaacaaacaaaaaaacaacccattgaatttagtcagaccaccagccttctagttccagccctgttaccagcttgttatgtggccttggacaaatcacttctcccctttgagtcttggttttctcactttgcagaatgtggcctagatgatttctatggttccttccagcttccgtgtgcttctacagtattttccctccatgggcttgaattctgaaaagctaggcaaacactcccttacttttttcagttgggctccactgagaagcttaagtctttctagtatccttttcctgtcttctttctctaaggtacccaatgtgctatggatatgggtgtgctaaatgatttgcccaaaagaaatgaccaggagctgggtgcagtggctcacacttgtaatcccagcacttagggaggctgaggtgggtggattgcttgagcccaggagtttgagaccagcctgggaaacatagtgagaccccatctctacaaaaaactacaaacattagctaggcatggtggcatgcacctatagtcccagttacttgggaggctgaggtggaatgatcacttgagccagggaggtagaggttacagtgagccaagatcatttaactgtactcacgcctgagtgacacagcaagaccctgtctcaaaaataagaaaaaagaaaaagaaaagatcaggcgaaaaaaatcagggctctagggagctgcagctgaataagaaagcatattgtacttactgaaaggctgttcatcacccccccagaaatgacaaaactgggaagggcttctccttggtttcagatcccacaaattagttctgtgctcagacatcaaagcctctcaattctcactcagctaagaaaagcctcctgctggatgaggggtctcccactgaatgtgcccgccttattacataacagggagaaaagccagagcaagaggaagatgcaaaaagagaataagtggggaatttgggcccttatggtagaatctgtcctttggggcaatgactcaagaaagaagcgctatcctctgcttttcagcaaccatcaaggtacatgatgtactaaatgataacaaagaggggacactaggagataacacataggcccggacccccatgaggtacattaacagcaccaataataaagagctgtaattcactgcgggcttactatgtgccagatgttctactgggttctttacatccatgagctcaatgaatcctcccaataaccctgaggtaggcattgatattatcccaaattgacaggtaagaaaactgactcagagagaccaagacaattgctgttcaaggtcatacagctatgaaaagagacacctgagatcaaattcagatctacttgattccaaacactgtgttcttaatcctgctctaacagcctctctaataccactatcagaaactaactcactaagggcccatctgcataccagatctactgcaagccatgtcaatacattatctcactcaatcctcactttaaccctggagggaagcattataatcctcattttagagatgaggaaacagactcaaactaagtaacgtgtgggcagccacaatattaacaagctagtggcagggctgcagtttgaatccaagtctgtcacaaagtgacaccaaaatactttggtgagcttactgggaggtgcctagcagctgtcaagtcgacttcctctcagagcccagcaggagggagctgaaggctggcctggccagccatacagctattaagacacatgccatctgagaatgggccaaccaccctccacctagacaagaatagccctgagaaactctgaagcccggatctgaagttgggtcttttttggatgctagaacaaaacattaaaaagaaaaattttcttggaagtctgtctttcaatctggaaaatgaaatttggctgcttctaaaggacaatctgttcaattgctacctctacatcaaagcttctcagcagcctccaggagcctttccaattttctcagagagggaatcagttcttgggctggaaagcacagacagacaggccagcagctggacttgggtcaccatttccccttctggggtcacctcagggctgagggtgggaaaagtgctggcatatgattgagtccctatacacactggtgtcagaacagaaacccacagggtaaagccctaaaaagtaacaccattgactgttgactgtgaactatgcaaaaatacagcagattctttagttcaatgaaatgcatttaaacacttcaaagttaaaacctgctgtagtattttgccatgatcacactcttgctccaatgcacattcagtgctttagtttctgaagctaggcactttctttcttgacatcaagttggatacaattaaatagttcattactgttatggggtggcagcataacacagttgtacatttaatgtggggtcagactgcctgattcaattctttgactctacctctcactcactatgtgacactgggtaaaattactcaattttcttctctgtaaaaatgagaaaaacaagataactgaccttgtaagatttttgtgagaatgagataaggcctataaaatgtttagcaaaatggttagtattaagttagtaggtactcaataaatattcactattgttggttttcagcaaattatttaaatagtagaattgaaattatctttgaaaaaccccactaattatttcagattgtatcagtgataaacctcaaccacagactcagaatgtattcattaaggagcctcctctccaaggcctccagtctcttaagggttaaagacaaagcagtctgcagacaacactgtggaattcaacaggagctctactgattgaccacctctgctccaaagtgctcttcacagcaaacatctctaaaagaccagtcagcaaaccgcagtgtactcatcagtgcaacatgctcagacaaaagacatcctcaaaatatctaagaaacagcgggctgctgaattctcaggactccaaaagttaagccctaaaataccacaagtccaagtgagcaatgaccactttaaaaagtacaatcttgggaagcaatatatatatactgctttctcttgtttctttttttttttttttctgcccaggctggtcttgaactcctcagctcaagggatcctcctgccttggcttcccaaactgctgggattacacgtgtgagccactgcacccagcccctttctcttatttcaaacctgtctggcctactctttagaatccaagccacaggaaagtcagtgtaattatttgaaagatatttgtcatcttctgcatccagaaggtatattccagatttgttccctttttattcactagccacagtttggaagcactttggtttgatatgaaaacttaatctacccacaaatgacaaagatgggccacaacagaatgtaataaaaatgaacatgctataggtctcaaaaggaaattctcaaattgagtctcagaaaacctgaagagtagcgttactaaaaaatttactttctccctaggtaactacttcaaagactaagctaagacaaagctcaccaatagattcacactataattagtataaacatcagtttccaatactaatagaaaatctcacagaggtagtttgcatttaaatataacaaaatacaaaaaatattaaaatgaattacattttctaatttgcaattacactcattcacagacaatatgttatagtggagaaatccctggattttaaaccagacaacacaggttcaaggcttggctaggcaaccctgggtgagtcacttagcccctttgagcctcaactgtttctgaaaacaaaataaaacaaaatgaaaacagtaatacaagcccttcctagcccacaatattttgtaactcctaaatgagacaaatataaaaccatactatatgagctaatagtataaaacagttatttataaacttttcttaagttttataagtagtttacaccaggctatgaattgaaacatgatatgttaaatacgtaaaaagtcttattattcaatactacaatattaactgaagaaccttcaataatgaacagctggccaagacaaagttatctagtaaacatcctttcaaaataattctaagaaatttctgagttatttattgaatcaaatataaaatagacattaaatagacatctgaggatgagggttttttttgtttttttttttgagatggagtcttgctctgtcgcccaggctggagtgcagtggtgtgatctcgactcactgcaacctctgcctcccgggttcaagtgattctcctgccttggcctcccgagtagctgggattagaggcacccaccaccatgcccagctaatttttagtagagggtgggggtttcaccatgttggcctggctggtctcaaactcctgacctcaagtgattcacccacttcagactcccaaagtgctgggattacaggcgtgagccaccgcgcccagcctgaggatgaggttttaaaaagacctgatgaaaaatacttcacacatggattcaagaaggcacttaaagaaaaaaaaaaaaaaaaaaaaaacaggctgggcatggtggcttatgcctgtaatccctgcacttcaggaagctgaggcaggatcacttaaggcctaagaccaggagttcaagaccagcctgggcaacatagtgagaccctgtctctacaaaaaataaaaataaaaaaatgacccaggcataatggcatgtctttgtagtcccagcgactcaggaggctgaggtgggagggttgcttgagcccaggagtaaaaggatgcagtaaaagggctagagccactgattccagcctaggtgacagagcaagatcatctcttaaaaaaaagaaaaagaggccgggtgtggtggctcacgcctgtaatcccagcactttgggaggtcgaggtgggtggatcacaaggtcaggagttcgagaccagcctggccaatatggtgaaacctcgtctctactaaaagtacaaaaaaattagccgggcatggtagcacatgcctgtaatcccagctacttgggaggctgaggcagaattgcttgaatccgggaggcagaggttgcagtgagccgagatcacaccactgcagtccagcctgggtgacagattgagattctgtctcaaaaaaaaaaaaagaaaaagaaaaaaagcagtttctaatattaatagcttcatcagatagagaaaaaatattttttccttttggactaacttatcctagactaacaaagaagcaggaaaatattctttccaggttatgaataaagaagaaaggaaaggtgaacactaaattggaattataattcagtatggtatttcagtttttggtgtcaatctgctgagacagtaaaataaaatgatttgtatttatttgatttttaaaaaccaaaataggccaggtcccatggctcacgcctgtaatccggaactttgggttgggagactaaggcaggtggatcatgtgaggccaagagtttgagaccagcctggccaacatagccaaaccctgtctctactaaaaaaaatacaaaacttagctgggcatggtggcgtgcacctgtagtcccagctactcaggaggctgaggaacaagaatcacttgaaactgggaggtggaggtagcagtgagccaagatggcaccactccactccaatctgggcaatagagcaagactcaaagcaagtctcaaaaaacacgatgcaacaaaaaaatagttattaaataaccaaaactgcacccagctttcttcattgttgtgaacacaattatatacaaatatttgctgctagagaaaaatctcaaatgtatacagttaggtgtatgctgctttgaggatgtgactattaccacagaagtacacagcatacatttccttccaaaacctgtggaactggaaatgatttaatctctcccaattacaagtacctgctttaattaactttgttaataatataactgtttacagcatcaaaattaatactgtgataacaatcaactgcttctgacagtctaaaccagcaaaacccttttggaaagcaatttatcaatgagatatacataataaaattatatatgccttttgacccaatagtcttttaacatgagaaaaatcataattaatccaggattaattaaaacaattaaaaattaaaaacaggaatagctggccaaacgtccatgtcaaaatgctaagtaaaacatccagaatgggccaggcacagtggctcacgcctgtaatcccagcattttgggaggccaaggagggcggatcacgtgaggtcaggagtttgagaccagcctagccaacatggtgaaaccccatgtcaactaaaaatacaaaaattagctgggtatggtggcacatgcctgtaatcccagctattcgggaggccgaggcaggaaaattgcttgaacctgggaggtggagaggtggaggttacactgagccaagatcgtaccactgcactccggcctgggctaatagagcaagactccatctcaaaaaaaaaaaaaaaaaaaaccatccagactgtaaaacagaatatgtttactatgatatgaatactcttatgtaaaaagatgcatgtgtggacaagggagataatgtcaaagtacagtttgtttgttttttcaaaataagcaaaatgttttatttataggatccttttgctctctgtttactctattaaaaaagaaaagcagctgggtacagtgccatgtgcttttagtcccagctactattcaggaggctgaggtggtaggactgcttgagcccaggagttttaggccagcccgggcaacacagcaagacccttgtctctaaagaaatatatacaagaagttttttaaagagacaaatagacagtttggattatatgctttgtgcaggaaaaactgtttcactagggactaaaaaaacctatcctattaaaacacaaccataaaaatgaaatgtagatttgttctccttttcagtactatcaaacaataacttacttagaaagaattcctcgaagtcagttttctccacacagctagtatacatgcgcagggccgcaatcttaatcttctagacaaagagaataaaaccaaactcaagacatgaccaagtggatgttctacttccattagacatgggtcacaaaatcttatatttcttcaactagaaggaagggtccaaaccactctctaggtaatttaaaccaatataaattttttttgttttcttagagcttagccattcatacagacttcacacaattttcatattttaggactttagcatgaaaacctcagaaaggcttttccaatatttaaatgaaatctctcatttaattccaacctacttcaccacatttgtgcctctaaatcactgttcagcattatccacattaactctttagaatctgaaatcctttatagtaaaaaagtacacattcttctggccaaaatcaaagaaatatacaaaaaccctcaagcctttaatctttcctcagaggcactactatctattctataaatctcgggggatggagtaagcggtatcttttttccagatctttaattttatagtttgctgattaacactgtgtctgtaaataagggtttctaatgactgtaaaatacaatataagaatcaaacttttactattcccaaagcactaggaattctcttaggcttttgatatgagtggtggttttaattttttcactgagctgtatacttaagatttttatattacactgtatataaattatgccttaataaaaataaatctaaaaataaattatttaagagttgacttatgggtctgaagaccaactcagcactctaggaacaggtattttaaggactttcaaaacatttcattaaggatataactaaataaatgagcacttcaacaaggcttctagaagcttattttttcttataacaacagggaaagttataaactcaaatatgcatagaccaaaaacaaatgtgtacaggctgagaatgacatagcaactgaagaaaaaccaatctagaatttagtggagctatgatactaaggtttaaagtcaccaagaacatactatacccaaaactatataatgttcatgtttttctaaattctctagagttaaagcaagtgtctctgatgggtagaaatacccatagcaaattaaagaatgattacgtctctgattgtaattaagatattttatttgctaacttgagatctgtcatgtttttaagagcttccagtctaaagttaatacaggggaaaataggacatatagaaatagacaaataaaaatcagatatccctatctggggagtaaatcagcattagaagcccacgtttaaacaaaacccatggtgaaatgctagaaaagcaaagcaaattaaacctaaaagcaagcagaaagaatgatatagtaaagatcagaaatcaacaaaactgaaacaggaagataaaatacagaaaattcaagccaggccaggcatggtggctcacgcctgtaatcccagcactttaggaggctgagacaggcagatcggctgagcccaggagttggagaccaacctgggaaacatggcaaaacgtttccatctctaccaaaaatacaaaaattagctggccatggtggtgtgtgcctatagtaccagctactcaggaggctgaggtaggaggctgagcctggaaggcggaggttgcagcaagctgagatcacgccactgcactccagcctgggtgacagagctggaccttgcctaaaaaaaaaaaaaaaaaaaaaaggaaaattgaagccaaagccgtttctttaaaaatatcaataaaattaggttgggttgtggtggctcacccacccggctcactaatcccagcactttgagaggccaaggcaggaagatcaactgaggtcaggatttcgagaccagcctggccaacatggtgaaaccccgactctactaaaaatacaaaaattagccaggcatggtggcaggcgcctgtaatcccagttacttgggaggctgagacaggagaatcacttgaacctgggagggagaggatgcagtgagccgagattgtgccactgcactccagcctgggcgacagagccagactccgcctcaaaaaaaaaatcaataaaattgataacctataaaactgatcaaggaaaaagaaaagcccaaaacacataagatacaaattttcagtatcaggaatcagagagcagacatcactgcatatcctaaagacattaaaaggataataagggaatcctatgaacaactttactccaatgaatgtgattacttagatgaaatggacaaattccttgaaagatacaaactattaaagctcactaaaataaataacatgaacagtcttgtatctattaaagaaattggatttgtctttaaaaacctccccacaatgcaaactgcagacccagatagcatcactagagaactgtactgaacatctaaagaaatgttatgaaatcagccaggcgcggtggctcacacctgtaatcccagcactttgagagactgaggtgggcggatcacgaggtcaagagattgagaccatcctggccaacatggtgaaactccatctctactaaatatacaaaaattagctgggtgtggtggtacgcgcctgtagtcccaggctgaggcagaagaatcgcttgaacccaggaggcagaggttgcagtgagctgagtgcgccactgcactccagcctggcgacagagtgagactccatctcaaaacaaaacaaaacaaaacaaaaaaaaaaagaaaaagaaaaggaaaaaaggaaatgttacgaaatctacacaaactctgccagaaaacaagaagaaaggatatttcccagctcattcaataaggccaaccttatcctgatatcaaaatcaaagtcattaggagaaaacaaaactacagaacaatagccttcatgaacatagatcattgatgcaaaattccttaagaaaatattttaaaattaaatccatcaatatttttaaaaggatagtatatcataatcaagtgaaatttatcccaggaatgcaaagataattcaacactgacaaatcaatcagtttcaccatatcaacagaccaaaaaaagcctgtttaattttgttaacacttgcagttctaggaagtatctgaccacagaacacatcttgggaagcactggtctgtgccattaccaaactaatgataatctaataatatcatgatcctaataatttggccttgacaggcctactcctatccttaagacagggagttcaggacatctgccctagctcctcacttcatccaataattcactgagtacataactcagtgcctggcactgatctggatgatgagaatagagcagtgggcaaaacagacaaaaatctctactctcatggagcttacggcccagttcagctacagacaagtatgtaactttaactaaaatttctaatcatctatttcttgatttttttaaatcttgtaatctccttcagattcctatatataaagtcctgggttcataattaatcaccttgcctggagacttgccttcaaggcccaaggcccaagtctttccttgagaaggaagcttccccaacaacacgtttgtgaaaaagcattcatcacaaacaatgaagacttcaccagattggccagagtatgttttcagtgctcatgctatggcaatcaggagcattttatagttcttcacttttcctgctgcaaggccaagcctttatacttgggtgagccattttcctggacaaatctctaaaacaagtctctaaagactatcacacagagactggaaataataacttgaggaaagaacctcatcaagaatcatgcactgatctgagttaaggacgtagggggactgaattttcaaccagtcaatacaagttgttctggtccttggatgacttcatatttatttcattttaattttagaagacttcatcagtcatcttttacttgagtaaaagagaggcaccttgaacagctttaggaaatgaaaatctgctctcccacgaactaatgcattttttaacatcctacaggatgaaaaacaaatctagtaaaatgcttgcattaacagctatgtaagagtttgaaagggcctggcaaggtggctcatgcctgtaatcccagcactttgagaggccgaggtgggcggatcatgaggtcaggagttctgagaccagcctggccaagagaccagggtggccagtatgatgaaacctcatctctactaaaaatacaaaaattagctgggcgtggtggcaggcacctgtaatcccagctactcgggaggctgaggcaggagaattgcttgaacttgggaggcagaggttgcagtgagccgagatcgcgccactgcactccagcctgggcgacagagcgagactccaactcaaaaaaagataaaaaagagttagaagggtgttttaagtaatttgaaccttctattgtctactggaaatccttctacagcattcttgattcacagtcaaccatctgggcctctgttcaaacaagaccaatgaccttgtaaggctacctgtcccacctgaggacaattcttgttagattcttattttgctaaacttaaaatctgcttcatataacattcattgaacattattctgcccactggaataccttctttttttcacatttgcccctcaaatacctgagaagaatcatcctgtcttctcttttccaggctaagcatccctatttccttcaaccgttcttaacagtttctgaaatgttcataaggctcactgcctacctctgaatacattccagtttgtcagtgtccttcagaataggaataactttttggcttaatgctaatatggaaacctattctatggcatgtggctgagttgggtaaatattgtgcttatctcacctgatactgcatataaaggtaattttttaaaatgatgattccaagatactcaaataggtaagggaaagctacatttaagatcctaaacatgattatcaaacatgggaataacacatgaaacctaaagaaaaagatagagaaaagatagctgatactgctgatgtggacagacatgcaggtattttactccctaatcaaatacatgtgaaaacacaaaacaaataattttgccagtgcaatccaatacaagtgcattgatttgagtcaacattgctgaaaacggttctgtttttcaaaatgaaaagttacacatacattttcacatctcaattacactagaatgtcatacgttgatattgtgatgtaacaaattttaaaatgaaggttataggctgggcgcagtggctcaatcctataatcccagcactttgggaggccaaggcaggcggaatcacttgaggtcaggagttggagaccaggctggcccaacatggtgaaaccccatctctactaaaaatacaaaagtcagccaggtgtggtggcatgcgcctgtagtcccagctacttaggaggctgaggcaggaaaattgcttgaacctgggaggcggaggttacagtaggctgagatcacgctactgtactccagcctgggtgacagagtgagactctgtctcaaaaaaataaaattaaaattaaataaaataaaatgaaggttatagaaagtacacaccatcacatcacaagagttttaaaatgcaaacattagggatttagttgatgtcacaagggaaccaagaaaaatcagaggctaacttaggctaaaagagcaaaggaattttcctgatgatttagtaatcctccaaatgatagccaattttctctctagaatcattaaaaaacagcctagacaaaacatatggtagcaaccaagtggaacccaatcaccaagaaatgaataaaactgtaaatgtttcttttcttttttttgttttgacttccctcttaatttctaattttcaaacaaaacatatactttaagtttgtaaatccaaatgccataagcataacatttttttaataggggaaaagattctggttaaaaacattaccaagtatatcaacaattatcaagtgtcaaaaattaagatattaaaaaatacaactttaaagaacataactaatatttcattggcaattaagaagatacttcataaccttagggactcaagaacatcattgtcagtatttgtgttctttctatattttttcaaagctccttaaaaacaaaatgcttgtggaattactgttcacttttcagaattcaggtaaaagagtaattatagagagaagctcatatttgctgtagtgagaattgttagaaagagaaccagacaccataagaagaaaccacaagtagaagtctataataaaattgaaattctaatttgaatccaacttgttaaaatggtgtaagtggcattacttggttgttctcagtaaagcttatatattttctagaaaaatcttccctactgctttgagtgggcttgctttgacttatgactgattaggcttacccaatattccagcaaccctgaaaggcattaaaaggcacttctgccatagtgaaagagagaaatggtattacaggttgagtattccttatctgaaacgtgtggaaacagcagtgttttgaattttggatttggggggattttggatgctttgcattatacttaccagctgagcatcccaaatccaaaaatccaaaatgctccagtgagcatttccctggggcatcatgtctaaaaactccaaacgttttagattttgaatttccaattttccaatttgggatgctcaacctgttctaggagataagtgggctgagaagaactgaatcgctgatgttttatttctataattggttagaggtattattataaaagcccaggggcagtatgcatctgaggcagagaggacattcattcatttatagccactactattataacagataatgtgctaggccaagagttgactgggagtgacatggttaacaaatatccctccataataagaattacaatagatcgtgggcttaattagttaataaaaagatgattagtaaaattttaaagaaaatcccttataaaatatgggtccatcagaaagtaatgcttccttaagaatgttgccaatcagaacatttggcccatctgacccctcagaagtcatctatatggcataccatgcagcaagggcctggaaagcccagtcttgttgccatgcctgctactatgagatgcttctaaggaatcaggtggagggactagttcagccccacatgttgtatagatctgactggaagcagcaagaggttgtggcacgtgggcaaagatattttgaagaagttatcagaataatgtatggaccttgagagcttacttgggaggttctggcaggggagtgcagctactcatatacccttgatcaaagaatggtcctcctctattggagaaggtcatcctcttcaaccaagaacacagcttcaaaaaggtcgcacatagagtggtcaaggaggaaggggacacccgcctacccagccagatcagccgaatcaaccctggtgatcaatggggtgacagatgtcgcagctagatcgtcctcacatccaaaataatgtatgaattccatgaaagcaaagcagaagctttaaaaaatctattaggagcagaaagcacaatgcccaaaaggaaaaatgagaagaacttaaaggactttacccatttactgtatttcaaaggtcccgtgaatcccatggcttctattatctttgtgaaagcaccaaccttctcctcaacaggctgtggggaatctttggtagtagaaagctgattaaccaaaaagaaaaaaactaaaattagttgcaaaaaatttttaatagaatgctttgttcctcatcaggtctgagagcattttttttttaaatacagtcagggtctcctcccctcacccaggctaaagtgaagtggcacaatcatagctcactgcagcctcaaacttctgggctcaagtgatcctcctgcctcagcctcccaagtagctgggattacaggtgcacgccatcacgccaagtcaattttttaaattttctgtggaggtggggtccacagcctgttgttctctggagagggggggtccatagcctattgcctaggctggtctcaaactcttggcctcaagcaatcttcctgcttcagcctccccaaatgctgggattacaggtgtgagccaccatgcttgggctgagggcatttttattgcttagatttttgttttcacctacaatttttaattttcttttttttttcttttttcttttttttttttttttttgagacagagtcttgctctgtcgcccaggctggagtgcagtggcgagatctcggctcactgcaagctccgcctcccgggttcccgccattctcctgcctcagcctcccgagtagctgggacaggcacccaccaccacgcccggctaatttttttgtatttttaatagagatggagtttcaccgtgttagccaggatggtctagatctcctgaccgcatgatctgcccgcctcggcctcccaaagtgctgggattacaggcgtgagccaccgcgcccggcctaattttcatttttttaagcatcttatcattcagtgaaaacacatttggaactgtacctaatagatgccctccaaatttcagagcaagacatgcctacctcattgactgtatgtctattaacccatatctagcagatgacagatgtggggtattagaataaaagttctatcaaaaagaagacttttaaaaggaaatcttgacccccatctcccaagaacaattctgagaagtaaaacattctatgcttattgatgtaataggaaaaggaaaaaaaaatactgcctgaaagcagtcaaaagtcattcaaaactgcaatcaagcactgaatgtttttaaactcttgcattttttagtaaaggtatcacaaattttattaatgactacagagtcttgtagtttgcaaataacctccaaggaaagtctgttctaatgttaaccctctccaagcaaaggcaagctatctaaccaataaaaaattatccaaaagttaaatatcactttatttttaacatgtaaaaaattcatatgttttcctcttaagtgttttccagacacaacaatggaagaaacataggacatagcctcagaaggcttaggtccaaatattcaggctggcatggtggctcacacctataatctcagtaatcccagtactttgggaggccgaggtgggaggatcacctaagcccaggagttcaaggcagtagtgagccatgatcatgccactgcactccaccagggtaacagagcaagacctcatctgttaaaaaaaattttaaaaacaatcccagcacttagggaggctgaggcaggaggatcgcttgaagccaggagtttgagaccaacctaggtaacaaaacgagaccctggtctctacaaaaatttaaaaattggcagtacacagtggtgcatgactgtaagtctcagctattcagaaggctgaggcaggaggatagctcgagcttgggagttcgagactacagtcagctatgaaggcaccactctactctagcctgggtgacagagcaagaccttgtccctgaaaaaaaaaaattcattttgtctgccacttacttaccatccttgtgaccttgggcaagtcactttaccccctgagcctcaccttctgcattcgctaaaactcacctagctaacaattttgttgagatccaaagaacacctgtgtgaaagcactctataaacacagaatgcactgataattctcaccttacgtgtggtgtgatacttcctattcagctgtatgtctattccaggaatctgttctgatccaccacatgctcgggactggctcatctggggccactgaagaataaaaacacagatctatgcaacactgagcacttacagggttaatctgaacagagctgtttcaaagtaaagactataggatctttccaaccttacttagcccacttccccgtgatcagctcaccaggaagacccaagatcagcacctagaagggtgtctagtacatggtagatgcccaagaaatatctgttgaatacctgaagaaataaaagaatttgggccaggcacaatagctcacacctgtaattccaacactttgggaggtcaaggtgagaggattgcttgaggccagagtttaagactcagcctggggaacatagcaagactctatttctacaaatttttttttaattggctgggtgtggtggtgcatgcctatagtcttaagctgcttgggaggctgaggtgggaggatcacttgagcccagaagatcgaggctgcagggagctatcatcacaccactgcacttcaacctgggcgactcagcaagagcaagaccctgtctgtaaaaaaaaaaaaaaagagagagagagagtgaattcaaaggccaggtggcgtggctcacacctgtaatcccagcactttgggaggccgaggtggatggatcacttgaggtcaggagtttgagagcctggccaatatggtgaaaccccatctctactaaaaatacaaaaaattagccaggtgtggtggcacatgcctgtaatcccagttactcaggaggctgaggcaggagaatagcttgaactgaggaggcaaaggttgcagtgaaccaatatcatgccactgcactccagcctgggcaacacagcaagaatcggtctcaaaaaaaaaaaaaaaaaaaaaaaaaaagaattcagccctggaaacctggaactacatctaagtcaattctaggaaacagaactgtagtatctatctatttaaatatgggcagcagtgccgtatatggggaaaaaaataaagacaccagccacttttaggtttaaaacctgcttctgtcgcctacgacaagctcagtggccatggaaaacttactgaacctcagttgcagtaaggatgaaagaaggtaagatatataaagtgcctttcacaaaataggcactcaataaatagcagaagtttccatcatcactatcatcaccagcattattgtttggatcacaatcgccacctttttcatgttcacattgcatttaaaaacaatttggcaataaaatagccgttattatgtgccagatactatacagaatgaaaactgggaggaaagtccattaaggagatggttaatgaaagttcagtcactcagtggaaaatcaggtatccattgagggttttttgttttgtttttgttgttgttgttttgtttttgttttttgagacaaggtctggctctatggcccaggctggagtgcagtggtgcaatctcagctgactgcaacctccacctccccggctcaagcaattctcctgcctcagcctcctgagttgctgggactacaggcatctgtcatcacaccctgctgatttttgtatttttgtagagacagtgtctccatatgttgcccaggctggcctcaaactcctgggctcaagtgagtgatcttcctgccttgaactcccaaaatgccttgaactcccaaaatgggactacaggcatgagcctgggtgcctggctgggatttttttttttttaaatagacttttttttttttttttaacagcagttttaggctcatagcaaaacttcctggaaagggcagagttcccacataccccttcccccacatgcacagcctcccccgccatcaacatcccataccagagtggtgcatttgatacaaagaacaaacctacactgacacatcatcatcactcagactgcacggtttactcagagattattattattgttaacaacatgaaaaatgttaaatgcttataatatgtataaaattataggtaaaacatgactgcgtagactgcatatgggcaagtttagaaagaacacacaagaaaccaaagagttattttgttaagttagaattatggataaatttaagaatctatagccaaaataattctggcaaaaaaaaaaaaatctagtttccaaactctcactaatgctatattacctttacaataaaaaagggtgagagggagcaggaagagggctgactcttcaattctggtttattccaagaagaaatggaacacatggaatgaaaatgattttttttctttaaccctaacgaagaaaaaatagaatttctaattgtggaatgttactatttacttttctttccaaacgaggatattaaaaaattagtcaggattcttctggtcagtcccaaggacacttaggctttaattcataagtatcaagcaggctttgtaaaacacagactaaacacagaacacctccccattacatcacatacatcaatgcaatggtccacctaaaacacaaagcacttaaactggttcaaagaacacagccaacagcagtttccacaagctgtgctttgggctgggtcctcttctattaggttctattagatccttctttttcctcacagctctaggagtaaccagtagattccttctgtggctgtcctaccatctactgtatttctatcctaccattagctaacatttcacactatattgaactactaaagtacctatgtatctagtatcaaggacatctagtttctccacacctacacacttataaacacacacatttacttttttgtactacccactcttgtccttgcacttcccgcaaaaaattcactcgacccttaaagacctcaatttttcctttgcttagattagaaaatatcaataggctgggcgtggtggctgacgcctgtaatcccaacactttgggaggccgaggcgggagggttgcctgagtccaggagttagagaccagcctgggcaacatggcaaaccaccatctctacccccctccaaaaaaaaacaaaaattagccaggcatggtggtgtgtgcctgtaatcccagctactcaggaggctgaggcaggagaatcgtttgaacccagaaggcggaggttacagtgagccaagatcatgccactgcactccagcctgggtgacagagcaaggctctgtctcaaaaaataaaaataaaaaataaaaaaacaagaatgacagaggcagagaagtagaaagggggtgctgggacaaactcaagcgattcttgaataccatgggcgtgtgtgtctgctccttttagcaactataagctccagggcacagcccatcttatatgtctgtcattttctgtcccaatactcaacaccattctgggcatgaagtcattactcaataaaaactaggtggattttttttttttttcaaagaggacaactttggagaacgtccaaaaaaagaaccacaggaatgatcaaagggatgaataaaaggtcctagtggaaaggtcaaaaggaatttaggctgtttagcttggagaaaaggcaactgaagaactaaagagtaactcagaataacaacacttgagctggaagaaatctcagagatattctggtccaaccttttcacttcacagatgaggaaactaagacaaagggagaggttgcaatttggtaaaggtaattttaggacaacttttttttttttttttaagtttcatttcatacagtgaggagaaaactttcccaagcaacaggaacataaatagcaacaaaaatagcaattgcaacttactgaagatctcctgtatgtctagtacctacctacatgcttggtgttttacttatgttatctcacaacaatcttataaagtatattttcctattttttttttttttgagacggagtctcgctgtgcccaggctggaatgcggtggcatgatctcggctcactacaacctccacctcctgggttcaagcaactctcctgcctcagcctcccaaatagctgggattacagacgtgtgccaccacgccagctaatttttttatttttttagtagagacagggtttgaccacattggccaccctggtctcaaactcctgacctcaagtgatcagcccaccttagcctcccaaagtgctggtattacaggcatgagccaccacacctgccccttctatttctttttttctttttttttgagacagggtcttgctctgtcacccaggctggagtacagtggtgtggtcatgggtcactgcaactttgacccccccagactcaagggatcctcctgcctcagcctcctgagtacctgggaacacagagatccagctattccggattttttgtagagatagggtcttgctatgttactcaggctggtctcaaattcctggcctcaaacaatcctcccaccttggcctccagaagtgctgagattacaggcatgagccactgtgcccggactattttttcctgttttagaaattagaacacaaaggctcaaagaagtaaagttcattaaagactaggatatatactcaaagctatgttctgtccgctatatcaagctgccttcaaaagtctgagtagagttcaacaacacaggctcatgcacacttaatacccagatcttgatttctaaatactgctctccaatagaaggaatcggggctgggtgcggtggctcatgcctgtaatcccaatactttgggaggctgaggcgggaggatcacctgaggtcaggagttcaaggctaacctggccaacatggtgaaaccccttctctactaaaaaatataaaaattagctgggcgtggtgtgtgcgcctgtagtccccagctactcgggaggctgaggcaggacagtcacttgaacctgggaggtggaggttgcagtgagccaagatcgcaccactgcactcccacctgggcaacagagtgagactccatctaaaaataaaaaataaaaaaaataaaaaaataaaatcaggactccttggagtaatgtttgaatctagggccagggcaaagaaaatacagcatgaacctgaaacatcttgtggtgccagcaattaagagagtattcaaaaaatgatggggggcatgtagaaaggcgttcccaatagcccaagctgggacaatctaatcaacaaaataactaattggaaaatgaattataagccgggtgcttataatttgcacctctctttgggagaccgaggcgcatagatcacaaggtcaggagatgaaggccatcctggccaacacggtgaaaccccatctctactaaaaatacaaaaattagctgggcgtggtgagctcgcacctgtaatcaagctattcaggaggctgaggcaggagaatcacttgaacccgggaggcggaggttgcagtgagccaagatctcgccactgcactccagcctgagtgagagagtgagactccgtctcaaaaaaaaaagaaaagaaaagaaaagaaaatgaattataactcagaagaaaataaatatccatgagctcatactggtataaataaataattgaataaataaataaatggggaagaagtgacagctctttcttacaacagagttccagttaataaatgtaggaatgatggaaataaaaaatcattagacaaacaccacaataatgatcactgcagtgaagaaccatcaatgcaattatcatataatccatcaatcctaattctgggtatatatccaaaagaattcaaagcaggatctctaagatatttgtacactgacattcactgcagcattattcacaataatgtgtgcaagagacagaaggaacccaaatgtccattgatccaaatggataaagaaaatatacaatagaagagtacgcagccttaaaaaaagaaggaaatcctgtcatgtgctacaacatagatgaaccttgaggacattatgctaagtgaaataagcatgtgccagttataaaagaacaaaaactgtatgagtccactcacatgaagtatcctaaagtagtcaaaatcacagaaacaaggccagggtgatggctcatgcctgtaatcccagtgctttgggaggctgaggcgggcagatcactcgaggtcaggagtttgagaccagcctggccaacacagtgaaaccccgtctctactaaaaatacaaaaattagccaggcgtggtggtgagcacctgtaatcccagctactcaggaggctgaggcagaaatgcttgaacctgggaggcggaggttgcagtgagctgagattgcaccactgcattccagcctgggcgacagagtgaaactccgtctcaaaaaaaaaaaaaaaaatcatagaaacagaaagtagaaaagcagggtggggagagaattagtgtttagcatagagttttgcaagatgaaaaagtttatagagatctgttgcaaaacaatgtgaatatgcttaaattaacattactgaactgtacacttataatggttatgacaataaatttaatgttaacatatcattaaaaaaaaccaccaatgactgctaaaattagtaagcaaaagtataatgtgaaatgggtatctgcacagtctccaagtatctcctgacaagatactaattacaaagggaaaatactaactttagagttcaggaacctgacaaacaccaatttaaccaagtggccaaagttataagacctactagcattatgtatcccctgatatgatgcactgagaagggaataacatcatttttgccaaaaatgcataacctcaatctcattataagaaaatattagaaaggccgggctttctatattataggtggtagctcacacctataatcccagcactttgagaggtcgaggtgggcggatcacctcggatcaggagttcaagaccagcctggccaacgtggcaaaaccccttctctactaaaaatacaaaaagtagctgggtgtggtggcgggcacctgcaatcccagttactggggaggctgaggcaagacaatcacttgaacaggaggcagaggttgcagtgagccaagatcgcaccactgcactctagcatgggtgacagagcaagactctgtctcaaaaaaatgaataaaaaataaaagaaaataaagaaaaaagaaaagaaaatattacacaaactcaaattgagaaacattctacaaataactgactagtactcttcaaaagtgtctaaatcttgagaagaaaaagaataagaaaatgtgaccagacacagtggctcatacctatattcccagcacttggggaggcccacaggggtggatcacttgaggtcaggagtttgagaccagcctgttcaccaaatggtgaaaccccgtctctactaaaaatacaaaaatcagccaggtgtcatggcacatacttgtaatcccagctacttgggaggctgaggtgggaggatcgcttgaacccaggaggtggaggttgcagtgagcaagatagtgccactgccaagatagtgtcatccaccctggacgacagagtgggactctgtcttaaaaaaaaaaaaatgaaaatttaacagattggagacgactaagaatatatgacaactggatttgttatcgcagatcaaaaaaggacattcataaaaaaaaaaattgacaaaattggaacaaatagactaattaatagtattatttcaatgttaatttcctggtttcagtaattgcaccatggttatgtaagaggttaacattaggggaagccagatgaaggctatttgggaatgctactacttttacaactcttacataagtctaaaattatttcaaaatttaaaaaatatttttaagtagacagaacttcaagaggctaattaagacaaagctgaaagtatgtctctagctctttgaaaacaataataggattacagcactggacattaccttacagatacctgatactaccactcatcgaaggaaggattcctttatgtcaggcccttgacatacattcatcctaccactgcctgaatatttccagtaagagtaaatttactatgtgaaaacgcagctcacacatcccattatgcacaattctaattaacaaaactctttctcattctgagccaaatcttcctccctgtgagacatgtacctgaggatgccattctgaagcagaagtttccaaccaggggacctcaaagataggaagatactccagtaagttacagtcgatacgacaaaaggtccagttgatttacaatgactaaaattacatctggtcagcatgagataaaccaccctcagttatttacataaatgctttgctataatgttgtcccagagcctaatacagtacccggtacttattaggtgctcaagaaacgtttactgacccaaagagtagggcacaagtcagagattcatataatgagttattttcccctaccatctacacacatacaaataacaaatactattaaaaatttgtacaaaaagtaacagaacacagcccaagctctgaaaagaaatacctgcataactacccaaagtagacgcctcttctgcacaggcatattctccattcattcaacatatacttagtgactactctgtgccaggcatagtgaaaagaccaggaaatacaagaaaaaagcaagatgtcctcagaagggcagggcttacacattaattggagggaatttttaagtagattatatatgttacataaattatataatatatataattacatatagcaaacatatttttaattgcatcgaatacgaaaaagaaagttaatgactacagataaaaatcataaattggtaagaaaaatgagttcccaatagatgaatggagaaatgccataagcatacaattttcacaaactgaaaaacaactgatcaatacagaaaaaatacataaccctgagagctaaacaaagaaatacaaggtaaaacaaggtaacatttcttacccaatttatttaagttaaaaaaaactcaacttgagagaggtaataatgaaaaactacttatacatacattgctggtggcagcataaattaaaacaaccttttgaagaggcaaactgttcatactctgacccaaggtatgccttcctaggaattattaataagtaattaaaagtaagaaaaaatatgtgctaagacaatggtaagaaaattaaagcttataatggcaaaaaaaaggaaatgattttcatatcaaaggctaagtaaataaaatattatatggtcattaaatttttaattacaaagtctatcaaaacaatatgaataatgtccactctaataagtgaaaaggtaccagaatataaacttctgtggacatttgttagggtacttcaggaataacattacatatacatacacacacacacacacacaaacacacacaaacacacacacacacacacacacacacacacaggctgaaaaagaaccagcagagataaaatactgacgttttcagatttgaagtcatagatgatttatttcccttattactaaattatttgtattattaacaaaaatcaggagggacacaaggtccaaggtaaactacattataatgattaggtggtcaatggtaaatgaatacctcaaataattgtttcttggattttatattcatataaaggaaaaagaaataattatcacgcccaaataaaagtagcacaagatggccacaaaaagaaaattgaaaaaggttaactcggagatgaatatctggaaaaattccctaacagtaaaaatcatcagactgtagcatggtatcctaggctaagttccactgctagggtatttagaagcaacgccctagacaccatactttaggaatcagtcctaagttggcaccacagagacccagagtggtctcatgaggtttttccatcacacaatttggttggctaatctataaatacatgacatttgcacataaacactaaggttttcatactaagcaaaagaacaacaaatcttacctgggaagtgcgagacagagccctgtccccctgtccttgggtaggagacacaggtatcaatcggctgcatactggaacccactgagaaatgctagtctggttcctctaaagaaagaaaataataatctgtcaggaatctaaatcatactccctacatggaaggcaaagagtgtacctgtgatactgtaatataattagaaatatatatttggccttcatctctagttcctggcacagagctcctaaaacccttggaatttctgagtgaggggggtgtctgtaactcataataagcccctttcaaccatacctgagtttatgctaatgaggtgattcatgcaggatggaggctggttgccagagaaacctaccacaggagtagagggttggaactcagccccaactcctcaaggcatccccacctccaggagaggagagggattagagactgagccaatcactggtacccagtgatttaatcaatcatgccaacaataagcctccacaaaaattctaaatgacagagttcagagaacttccggtaaagatgaaaaactcttttttctatactcaacactccacttctgataccaaatgtgcaggggcaaggggtctccataccaagcaattctctagttctctgcagacaccaactgggtgtcctacaatttaacttaattcttaaactaactgcctggagttagcagagacctcacagcaccatccaacaggactgtcccccacttcagactcccatcacaagtagtgggtccccaggttactcacacttttgtccaacttgtccatacattgggggttcccacagctgcctcctcagattcaataatttgctagcatggctcaactcggggaggcacttcacttacttttatcagtttattataagggatacacctcaggaacagccaaatggaagcgatgcaaaagacagggtacggggtgggagcttgctctccgggtgtgccaccctccctacactttgatgtgtttactaacctagaagctctccaaacccagggatttctatggaggcttcattacgtagacatgattgattatcactgatcactggtgatcagctcaatctccagcccctctccccttccaaaagtcagggaggagtgggagaagctacaagttccaaccttctacacacatatttgttcctctagcaaccagcctctaccctccaagagtcaccttattaacataaactcactgccggtcatagcagctcatgccttcactcctattatctcagcacttttgagaggctgaagcaggattacttgaagccaggaggtcgaaaccagcctgggcaacaaagcgagacccccagctatacaaaaaaaaacccataaactcatgtatggttgaaaggggcttattataaataaataaaaaaaaaaccattcctctcaccccaatcactctgcaagggtttcaagagctctgtgccaggaaccagggataaagaccaaatatatatttcttctctcacaatatcatatctgggttgcagccacaggccaggagggtggcacactctaattccacagggacagaagcaactacactcaggaccattccagatctggcctttagtacctaagtttaaaaatcctgccagaatggggtatcacatgaatgaagaacttccaaaatgggaccaagaccaagcctccacatgctcatttctccaaggataagataaaccactgcctactactgattccacagactaaaataattctggtaataggtgactcaagcagtgggcacgggctccctctgggaagagaaacaaaataagcagacttctggcattttatgattagattataattcaaattacggtttgcaatgtcttttttttttttttttttttttgaggctgagtctcgctctgtcacccaggctggaatgcagggccatgatcccagctcattgcaatttccacctcctgggttcaagcgattcttacgcctcagactcccaagtggctgggactacaggcatgagccaccacatagggctaatttctgtatttttagtagagacagggtttcaccatgttgaccaggctggtcttaaactgctgaccttaagtgatctacctacctcggactcccaaaatgctgggattacagatgtgagccactgtgcctggcctttttttttttttttttttttttaagagacagggtctcactacattccccaggctggagtccagtgcctagtcatggtgctaacattgcacactacagcctcaaatgcctgatgcctgggctcaagtgatcctcccacctcagcctcccaagtagctgggactaaaggcttgcatagctgtgcctggcttacaatgtgttttcataaacactgacttacttacctgatcttcatagaatccctttatagtaagcaatgctgagatcatcatcatccccaaaaggaggaggaaactagggtagaagttttgcagtgggaaaacacacgtgggcaacttgatttccaagacaagagagattaaatggctgttcaagctaaaactgagattcacgttttccctctaacatgaagctcacttcagaaaggtctcttggccaaagtgagaggctaggctggagaaagggatagctctctcttgctaaataagaagtctgctttattttatgaacctgaaatacattccactgtataaatgatagccatgtacacagcactggaaatcttaattttaggaaccaactctagggatctgagggttttcttcacttgacctgtagaccttatagggccataatgaggaccagatacataaattgcttgaaaatcctttgccaagcataatgtataacacagtcagccctccacagccatgggttctgcatccatggattcagccacccacagattaaaatattcaggaaaaaaataccgggcatggtggcgtgtacctgtagtcccagctactctggaggctgaggcacgagaatcacttgaacccaggaggcaaaggttgcaagtgagcagagattgtgccactgcactccagcctgggcgatagagagggagactctgtctcaaaaaaaaaagaaaaaaaaaaaaagaaaaatcaggccgggcgcggtagctcacatctgtaatcccagcactttgggaggccgaggctggcggatcacgaggtcaggagatcgagaccatcgtggctaacacagtgaaaccccttctctactaaaaatacaaaaaaattagccaggcgtggtggtgggcgcctgtaatcccagctactcaggaggctgaggtaggagaatggcatgaacccgggaggcggagctggcagtgagccaagatcacgccactgcactccagcctgggtgacagagcgagactgtctcaaaaaaaaaaaaaaagaaaaaagaaaaaaaaatcaggaaaaaaacatgccatactaaacatgtagactttttttttctcgtcactactccctaaataatacagtataacaactatttacatagcacctatattgtattaaatgtaagtaatctagagattatttaaagtacatgggggaatatatataggttatatgcaaatactatgccactttgtatcaaggacttgagcatccacggattttgctatccgagggaggtcctggaaccaaaggaccagggatacttggggacaattgtactaggagtcaaagattctagtttaaattcagctactctaacattatctttacaagtaatttaacctctgtgacattcagtttcctgatagcaattatgaggaacacttaatgagcatttgatggcaggcacttttctggtactttacatatatgaactcatttaaacttcacaatcaccactcatgtaggtatatcattatcccatttacacaaaaaaggaaactgaggcatggagaggataagcaacctcccaatgtcacatagttctaacagcaggattaagatatgaacccagacaacccaactctagaatccttgctcatttatgggatgaaagggtagagtatctgcaaggtaccttctagctctaacactatatgacctggtctggaaccaattaaaacagcatattgtggaaagtgccacataactaaaggcaggaagtactgttcagaagctacatattagataatcacctctgtgagccttggttgtctctttttatcaaaaataaagacaaaatccccacttctcaggattttctttaaaattaacaaatgtaccttgcagtatgttcagcacaatattaagttgaatctgaatctccatttcctcgagtagaaacaggttgaggtggggtggagaaaggcattaaatttttaaacctacagatgctttctaaagtgtctcacagttctaaaattgtataattgccacttacagcaccttaaatttcaaatgaaaagtggagctaaaaatattttatttgagctgtggttggatcagttgaaatggttttccaagtgagagacagttactggtgttttgttttacaaacactgacagatttaccagaaacattcaatgtcagatgttcctgtactaaaaatgttaactatgggataagaggaaactgcttcagattcagggccaaaggtggggggggggggggggcggtgcagggggagcaagaggaaattacaagttgaaacaatgcaaacttttggaagattttctgaagaatttcatcatgtaatttccaatgtcaacaaaacttttctctgtaattttggctccggttggtcttaggccaatacttttaaatcagttcttattagaagaaaggaacaatcagctgttctttccttcgccaatcctacaacaattcttgtccaaatccttaattgaaaccactgaagtgtaacagaaagggtaatcccaagtctgccatcaaatagctgtgaactggttactcaacaatctgggcctccattttcccttatgaaaaatgggaataataaaagctatctcacaggagtgttcccaggaacattcctaaaagcactttgataacagaaaaacacaactaaaggcatcactgttatgaacaactgttaccgaattatacaagccctgctttccccagcaaactgccagagaagcaaaaactgttttcttaaaatattgtttggaatctggcatttattccctttctcaaaagcttgcagtggtttccaaggacctctttattgaaacttaaacacctggtccttactggtctttaccaactggacccctctaaactcataatacttactgtgttttccactcaacagtttcaacacctgactcagattctctggtttgggaatcactgcttcactccacacatgctaatttccttgtagtaattttttgggactctcctcttcactccaacccaaactataagctcaattgcttcaagaaatctctctaggccgggcgcagtggctcacatctgtaatcccagcactttgggagaccataggcgggcagatcacctgaggtcaggagttcgagaccagcctggccaacatggcaaaaccccatctctactaaaaatacaaaaattagccgggcgtggtggcaggtgcctgtaatcccagctactcgggaggctgaggcatggagaatcgcttgaactggggagacagagattacagtgagccaaaatcaggccactgcactccagcctgcgtgacagagcaagactccactcaaaaaaaaaaaaaaagaaaagaaatctgtctagatgtcagcttctggttctactggctctactcagtccttttttttttttttttttgagatggagtcttactctgtcacccaggctggagtgcagtggcgcaatctcggctcaccgcaaccttcacctcctggattcaagcaattctcctgcctcagcctgccgagtagctgggactagagcggcgcgctaccacgcccagctaatttttgtattttcggtagaggcggggtttcaccatgttggccaggctggtctcaaactcctgatctcaggtgatccaccggcctcggcttcccaaagtgctgggattacaggcatgagccaccgtgtcgacctctactcgtcctttttcctttccacctcttccaccacttcatctataaatataaatctgtggaagtacttatctctctcttaaggtactaatatattaggcctataacaattagcacatctcaacttctcccaagttcaaaagacattcatagccactcccaatggcaaaaattattcctttaacttaagataaatgcactgttactaagtgagaactagttttattgccattttgcctttccaacacttcaaaaccaaaaaaaaaatttttttcttttttttttttttgagacggagtctcgctccgttgcccaggctggagtgcagtggtgggatctcagctcactgcaagctccgcctcccaggttcacgccattctcctgcctcagcctcccaagtagctgggactacaggcgcccgccacctcgcctggctaattttttgtatttttagtagagatggggtttcaccatgttcgccaggatggtcttgatctcctgaccttgtgatccgcccgcctcggcctcccaaagtgctgggattacaggtgtgagccaccatgcctggccaaaaccaaaatttttaagataggcttcatgttttcgtttcccgtgcacattgttaattgcagtgatttttacatcagtatttcaaaacattctgacataccacctcttgtactgactaccctttaatcagtccactgacaggcctgtttctgcatgtggttttttaagatacatagtattttccttggctcattcatgagctagaaaacaatttacaggtgtagcggattctagttattcaccataaaatcaccacaaacactgagttagcaaatactgaaccattgcttctaaaggaaatgccagacttaggttcctggaagcctctggtcacaacattcatcaaccaatcaatatataaccttgttttattggtttctgttgaaagacaccctatttaatatacattgttgattcattaacacggaactcacagccaacagcactataactcacttagcaaaatttacctaacaaacatattttcccataaggcacattgtggccttctcgcactcagcaatgctagatagcgtttccatactacacttgggtgacattttaaagatgggattcaccaacaaaagcacaaaaatacgaaaaatatggcactaaacaggccatgaaaagaatacttgttacagtatgaaaactgaaacaagaaggcggaatgttgacccatctcagccaggaacacacacattggcagctcaaatttcttacccctctgcaaatgtccacaagtgactacaaaagtgctgcaagtattgattttggggtttcaaataaattttagcaactaggtgagttcacaaatatagaatctgtgaataacgaaaatcaattataaacatgaaatccaccttttttttttttttttttttgagacagagtttcactcttgttgcccagactggagtgcaatgacgcaatctcagctcaccgcaacctctgcctcctgggttcaagtgattctcctgcctcagcctcccgagcagctgggattacaggtatgcgccaccacgcccagctaattttgtatttttagtagagacggggtttctccatgttggtcaggctggtctcgaactcccaacctcaggtgatccctcagcctcagcctcccaaagtgctgggattacaggcatgagccaccatgcccagccgaaatccactttataagtcaccactggtgcctatattccaaatgccatggatactaactcaattccggagtccaaagaacagatactacggtaacaaactttccttccagttacaatgtggcatgctataatacaaaaggatatttccacagagggaagaagagaatgtttaaccattccttcaaaaattactgaatacaggccgggcatagtggctcacgcctgtaatcccaacactttgtgaggctgaggtgggtggatcacttgaggtcaggagttcgagaccagcctggccaacacagtgaaacccgtctgtactaaaaaatacataatataggccgggcgcggtggcttacgcctgtaatcccagcactctgggaggccgaggcaggcagatcacgaggtcaggagattgaaaccatcctggctaacatggtgaaaccccgtctctactaaaaatacaaaaaattagccgggtgtggtggtgggcgcctgtagtcccagctactcgggaggctgaggcaggagaatggcgtgaacctgggaggcggagcttgcagtgagctgagatcgcaccactgcactctagcctgggcgacagagcgagactccatctcaaaaaacaaacaaacaaacaaacaaacaaacaaacaaaatatatatatatatataatatatataaattagccgggcatggtggcgcatgctggtaatcccagctactcaggaggctgaggcacaaggatcgcttgaacccgggaggcggaggttgcagtaggcagagatcatgctgctgtactccagcctgggtgacagagtgagaccccatctcaaacaataacaaaaaattactccagtactttgggaggccgaggcaggcggactgcctgagctcaggagtttgcaaccagcctgggcaacacagtgaaaccccatctctactaaaatacaaaaaaattagctgggcatgagggcatgcacctgcagtcccagctacttgggaggctgaggcaggagaattgcttgaacccgggaggcggaggttgcagtgacctgagatcgcgccattgcactccagcctaggggacaagagcgagacttcgtctcaaaaaaaaaaaaaaaaattacctatacactgcctcctcccacttttttgggagttttcaatctgagctttcaaaagattgattacatacaggaaagatttgaataaatcaataaatacattaagggtgaggggtcaggtttctatcagagaaaggagttaacaaatatggcaaggcaaaagagtagaacaaaccctgtggtattagaatagattagaataactggtgtgggcttttaatatataaagaaaaagatatatgcatgtttatgtgtatatatagacatatatatatttcctacccacgtcctggtagggcctgcagatgacactccagtagcaataagcacatgtagcacccagatgtggtttctaaatagcaacaaccactaaaggaactagtctcctcaggagacaagttgactccagaatggggatgatgttcatcaaagccttacaaagaactggcattattcccagacatcccattactgggtatatgcccgaaggattataaatcatgctgctataaagacacacacacacgtatgtttactgaggcactattcacaatagcaaagacttggaaccaacccaaatgcccaacaatgatagactggattaagaaaatgtggcacatatacaccatggaatactatgcagccataaaaaaggatgagttcatatcctttgtagggacatggatgaagctggaaaccatcattctcagcaaactatcacaaggacagaaaaccaaacactgcatgttctcactcagaggtgggaattgaacaatgagaacacttggacacaggaaggggaacatcacacaccagggcctgtcgtggggtggggggagcggggagggatagcattaagagatatacctaggccgggcgtggtggctcatgcctgtaatccaagcactttgggaggccgaggagggcggatcacaaggtcaggagatcgagaccatcctggctaacatggtgaaaccccatctctactaaaaatacaaaaaattagccaggcgtggccgggcgcagtggctcacgcttgtaatcccagcactttgggaagccgaggcgggcggatcacgaggtcaggagatcgagaccacggtgaaatgccgtctctactaaaaatacaaaaaattagccaggcgtggtggcgggtgcctgtagtcccagctactcggagaggctgaggcaggagaatggcgtgaacccaggaggcggagtttgcagtgagccgagattgcaccactgcactccagcctgggtgacagagcgagactccgtctcaaaaaaaaaaaaaaaacaaaattagccgggcatggtggcaggcgcctgtagtcccagctactcgggaggctgaggcaggagaatggcgtgaacccgggaggtggagcttgcagtgagctgagattgcgccagtgcactccagcctgggtgacaaagcaagactccatctcaaaaaaaaaagagatatacctaatgtaaatgatgagttaatgggtgcagcacaccatcatggcacatgtatacatatgtaacaaacctgcacgttgtgcacatgtaccctagaacttaaagtataaaaaaaaaagaagcttgactctgaaaaaaaaaaaaaaaaagaactggcattattcaacctgtctgacagttccttagaaggccctatttcaaggctgtcttagaactcacccagtgtgaaaaaaccttttccccaggagcaccggttgaaaacaaatagaggtaactgtttgacttcatggcttcctgaggcagtgattaacaggtggagaaaacaacaggctaaccaaaaaggtttaaaggaaaagctggggaataagatgtccacagaggcttagaaaagccccaatatattcctgggcatctaggaagccatgaacatacccaggtctgtgcatatacccaaagctgtgcacatgctcaggaaagacctaagaatgtctcttacttgtggttgaccttgaggttctgcatagcaggaagtgaaagttaaggcagagttatcgaatgcctggcagagtgttataggtacatcccaacgtgcacacagagccccaaagcaaaaactgggatactcactgcttccaggcagtgagaacagaattttaagaaatttaacagaaatttaaagaaatttgtttaatcattacctgaccactaagctatctaagcagagacttcagtagccacaaacaacaaagaatacagactacagaatcaattcagaaaagtcactaaacaaaaatacaacagcaaaccctgggaagggaaacaatctgatttccggagtggccacattatttaaaatgtccagttttcaacaacaaaaagttataaaacatgcaaagaaacaataaagtatggcccatacacagggggaaaaaatgcaatcaatagaaactgtctctaagaaaacccaggcagcagacaaagagatttttaactatttcaaatatgttcaaagatctaaatgaaaatatgtctaaagaactataagaaagtggccgggtgcggtggcttacacctgtaatcccagcactttgggaggccaaggcagggggatcacctgaggtcaggagtttgagaccatcctggccaacatggtgaaaccccatctctactaaaaatacaaaaattagccgggcgtggtggcaggcacctgtaatcccagctactcagaaggctgaggcgggagaatcgcttgaacccgggaggtggaggttgcagtgagccaagatggcaccaaagagaatatcaacagaaagagaagttatttttttaaagacaaaataaattctagaattgaaaagtccaacaactaaaatgaaaaactcattagagggactgaacagcagatttgaacaggcagaagaaaataatcagtggtcttgaagataggtcaatttagatcatccagtccaaggaacagaaagaaaaagcaataaagacaaattagtagcctcaaaatgaaaagcaaaaacaaaaaaagaaaaaaaagaacaaatttaacagcctcagactgtgggacaccatcaaacacaccaatatatgtataattagagtctcagaaggaaagaaaaggaccgaaaaatatttgaagaaataatggcagaaaacatcccaaacataatggaaaatggtaatttaggaatccaagaagctctactaactccaaataggataaacacaaagagagccacagacacatcatatgcaagctgccaagagacaaagattctttaaatgagcaagagaagaaactcatcatatacaaagtatcctcaagaacattaacagtggatttcttctcagaaactgtagcagccagaaggcagtgggataaaatagtcaaaacaaggaaagacaaagattttcaaacaagaattctatatccagcaaaactattattcaaaagtgaaggaaaaaatgaagatttcccagataaacaaaatggaaagaatttgtcagtagtagacttgccctgcaagaataaggcagaccttcaggttgaaatgaaaggaaactacagaataactcaaatctacatgaagaaataaagtagactggtaaaggtaactgtttaggtaaataaaaaatacagtacaaatggattttttgtttgtaattctttttctttttaatttaaaagacaactacaagaagaaataattataaatctacattggtagacatataatgcataaagatgtaatttagatgacaataacacaatgttcgggaaggaacagagctatatagaaagaaagtctttacatattactgaaatgaagttcgtattaatccaaacaagactgttatgaattaagatgttcattgtaatcccagggcagccactaagaaaacagctcataaaatatagtaaaagcttgtaacatgtacacaaattagctcaaaatggataaaagaccaaaatgtaggacctaaaatgatacaactttcaaaagaaaacttacgggaatggcttcatgacattggattttgcaatgatttcttggacatgatatcaaaaaagtaggcaataggccaggcatggtggctcacacctgtaaccccagcactctgggaggctgaggtgggcggatcacttgaggccaggagtttgagaccagcctggccaacatgggaaaaccccctctctattaaaaacataaaaattagccaggtgtgctggtgcatgactgtaatcccagctacttgggagggtgaggcaggagaattgcttgaacctgggaggcaggggctgcagtgagtctagattgtgccactgcactctagcctgggtgacagtgcaagaccctgtcaaaaaaaaaagagtgggcaataaaagaaaaaaaaataagttggacttcatgaaaatttaaaacttttgtgtatcaaagaatagtatcaacagactgaaacagcaacccataggataggaaaaatacatgcaaatcatatatctgatgagggattgatattcaaaatatatgaaaaacttgccagatgcagtggctcatgcctgtaatccttgcacttcgggaggccaaggcgggtggatcacctgaggtcaggagttcaagacccgcctggccaacatagcaaaaccccatctctactaaaaatacaaaatttaaggctgggcgtggtggctcacgcctgtaatcccaggattttgggaggccgaggcaggcggatcacctgaggttgggagtttgagaccatcctgaccaacatggggaaaccccatctctactaaaaatacaaaattagccaggtgtggtggtgcaggtctctaatcccagctacttgggaggctgaggcgggagaatcacttgaactcaggaggcagaggttgcggtgagccgagatcatgccattgcactccagcctgggcaacacgcgtgaaactctgtctcaaaaagaaaaaagacatgaagaagtgcccaatatcactagtcactagagaaatgtaaatcaataatacaatgagacaccatttcatactcattagaatggcaattgtcaaaaaacagaatataaggccacgtgtggtggttcacacctgtaatcctaacacttcgagaggctgaggcaggagtatcacttaaactcaggaatttgagaccagcctgggcaacatagcaagaactcctctctactaaaaatttaaaaactagctgggtgtgttggcacacacctgtagtcccagctactcgggaggctaagatgagaggattacttgagcccagaagtggaggctgcagtaagctgtcattgggccactgcactccagcctgcatgacacagcaagaccttgtctcaaaaacaaacaaacaaaaaccagaaaataacaagtgttggcaaggatgtggtgaaactggaacccttgtgcactgctagtgagaatgtaaaacagtgtatctgctgtggaaaacagtaggacaattcctcaacaaattaaacaggctggacatagtggctcacgcctgtagtcccagcactttgggagaccgagacaatggattgcttgagcccaggagttcaaggccagcctgggcaacataaggagaccccatctctacaaaaaagaaaaaaaaaagtagccaggcgtggtggcacatgcctgtggtcccagctactcaggaggctgaagtgggaggatcacttgagcccaggaggtcaaggctgcagtgagctatgattgagccactacacttcagcacgcatgacagagcgagaccctatctccaaaaaaaaaaaaagagaaaattctgacacatgctacaacatggatgaatcttgaggacattacgctaaatgaaataagccagtcacaaaaggtcaaatactgtatgattccacttatatgaggtacacaaagtagttaaactcacggagacagaaagtagaatggtggctgccaggggctggggagaaaagactatagagagttattaataggttcagagtttcagttttataaaatgaaaataattctgtggataagggtggtaaagatggcacaacaatgtaaatgcactcaataccacagaactgtacacttaaaaagtttcaaaggtggccaagcacagtggctcatgcctgtaatcccagcactttgggaggccaaggcgggcagatcacctgaggtcaggaattcaagatcagcctggctaaaatggtgaaaccccatttctactaaaaatacaaaaaattagctgaacgtagtggcacgtgcctgtaatcccagctactcaggaggctgaggcaggagaatcgcttgaacccgggaggcagaggttgcagtgagccaagatcacgccattgcactccagcttgcgcaacaagagcaaaactccgtctcagaaaaaaaaaaaaaagtttaaaaggtaaattttgttacatgtattttaccacaacttttttttaattttctaaagtacagggtggctttctgcaatttttactatttccaaagaaaagcagaaatgatcagcaatgcccaggacaactcataaaaaccataagcatgtccagttccactgatcaaatgtccaggctctctgctgtagtcattcaacaatagcagtgttttagtttcctcctccttcccaaaaccatcactggagaagggaaaatattggctgacaagacaaaaagaggaaaaaataaagcaagactaacaagaatgtttcaggaatacttctttttttttttcagacagagtttcactctttcacccaggctggactgcagtggcacaatctcagctcactgcaacctccgcctcctgggttgaagcaattctcgtgtctcagcctcacgagtagctgggattacaggcgcccaccaccaggcctggctaatttttgtatttttagtagagacagggtttcaccacgttggccaggctggtcttgaactcctggcctcaagtgatccacctacctcagcctcccaatgtgctgggattacaggtgtgagccacggcacctggccaggaatacctctctgtggttcagttttcttatctgtaaaatagaggaaataacacgccctcctttccaaagggatgttataaggattaggtaagtattttaaagtgcttagcacgtagtaagtgccctataaaatgatagttgtcaggccaggctcggtggctcatgcctgttatcccagcactttgggaggccgcaggaggcggatcatgaggtcaggagttcgagaccagtctggccaacatggtgaaactccatctctactaaaaatacaaaagttagccaggtgtggtggcaggcgcctgtaatcccagctacttgggaggctgaagcaggagaactgcttgaacccaggaggcagaggttgcagtgagccgagatcacaccgctgaactccaccctgggtgacagagcgagactccatctcaaaaaaaaaaaaaatacaaaaattagtcaggtgtggtgtggtgcatgcctgtcatcccagctactcgggaggctggcacaggagaattgcttgaacccgggagcagaagttgcagtgagcccgagatggcaccactgcactccagcttcggcgacagagcaagactctgcctcaaaaaaaaaaaaaaaaaaaacaaaaccctaaagggtggcaggggaaggattaaaaaaaaaaaaaaaaaaaaaaccactaaattcagaacattctaattgccatttccccagcagtcctcatttctgaatcaatttctggcctgaaatcaaacaatcacttcaccaggtgaatctttctggcagttacaggggctactctacaaataaatatttactgaacagcagtcgagggtacctcactctgctaggctggcaaggaatacaagaagtaaaactgtcgtccttgtaagacatatataaaaagatcaaaaacacaaatgtaaaataacaattcagaagttacctagacacaggaatagaccatgtctactatgaaaaacagtgtctttgacccagtttttgaagactcgctaaaactatacactctcccatccctccatgattaaaaactaagctctgtatcctaacgttttttctgctgccactttcttttctcctttaattgctagagaaaagagtatgctagaagggtcaggactaaatctcaagaggtgcagtagtttcacacacgggtgctaaagagtctggtagtctttccttacttcattcatttattcaacaagtaatcatttaacacctatgatgtgccagacaccatgctaggcaaagtgaaaacgacggagacagacatgactccaattctcacgcagctttcaatctaataatctatattccacttaactgtacagttaagaactgacttattacctatgaaagaaaccctgagaatctcagaatctaaagggactgcaggagataaatgtcctcgtttttcacatagggtcaatgaggcccaaaagtgacttgcttaaagtcactatgcatcagtgacagtcagggactagaacccaggcctcctgaaactccaatcagtgtcctacatgctcctctccctgaggggaagcaggtacatgggggagggaaggaaaagtaaaccccatcaaataaaggccagatgtcagtcttccccttctcgaaagatgggggagctaaggtcaaaacggggtaggaagaggtcggaagctgcctcagtttccccacggaaaagcggccactcagcctagctataacacaggcttccctcctgcgattccttccaattcctcccgccctgccttgtcgaactccaacccgggacccagagagctaccgtagaaaattactccttcactcacaaggactcgcaccagcaacgccatgttcctcaataaccatttccgggtgaagagtgagtttccggtgtccccttttctacgtcctccttttgccggcgaaagactggcaaggggggcgcaggcgcaaagaggtcgctacgcgcacgcgctgttgttttctcggctgtgcaccaggctgtcgtgcccgggcacgctctccctgctgtctcccccactacacgtaacagtggttcaaatccttcccccacgcctgtctccttgaccccagacctcggggcttctcatatccctctctttattccccacctaacccagcctcactcctcagcccctccttcccaaactccaccccaacacttttcaatggaggttgaaaagaacaggactttaggaaatcccaatctttagaaagagccagaagaccgggcgcggtggctcacgcctgtaatcccagcactttgggaggccgaggcgggcggatcacctgagatcaggagttcgagactagcctggccaacatggcaaaaccccgtccctaactaaaaatacaaagaaagtagccgggcatgttggtgtgtgcctgtaatcccagctactctgaaggcagaggttgcagtgagccgagatcgcgccactgcactccagcctgggcgacagagcaggactggactctgtctcaaaaaaaaaaaaaaaaaaaaaaaaaaaaaagccagagaaggaggctaagataaaagaatacgggggataccagactcctgaaagtcaaggcaagaaggcggtcatgtgccgatctgaagcctggtagaggaagaaacttttgggatttgtggttggttggttgtttaagggaaacatctttgcatattgataggaaaagattagtgaagagtatacagggccgtgcccggtggctcatgcctgtaatcccaacactttgggaggccgaggcaggtggattgcctgaggtcaggagttcaagaccagcctgaccaatatggtgaaaccccgtctctactgaaaatacgaaaaaaattagccgggcatggtggcgtgtgcctgtaatcccagctacttgggaggctgaggcagggaatcgcttgaacccgggaggcagaggttgcagtgagctgagactggggcactgaactccagcctgggtgacaaagcgagactccgtctcaaaaaaaaaaaaaaaaaaagagtatacaggagaatcaatcaaagaggcaaggagcttcttgaggaaagtggcagagaacggccttggtagaagactcctcttccattacatcccaagagaagagaagacaaagtactggtgctttgggggttgagggagcagaggggcaggatgttgaaggacttctttcatttcattcagtcaacaaagacctattgagtcttccctatgtgctgaacacaagacatactggcttcatggagttcttagactggtgggggaggcataggaacccagtgaaaaaaattaaaactggggagctactttggttaggttggtaaggcctctccaagaaagtgacatgtaagatgaaatctaaaggaagaagaggagctagtcatgggaaataacttcactcgactatttttttaattaaatttattgatttttattaattgacaaaaaatatatattgtgtacaacaggatgttttcttttttctttttttttttttttttgagacagagtttcactcttgtcgcccaggctggagtgcagtggctcaatctcggctcactgcaacctccacctcccaagtcaagcgattctcctgcctcagactcccaagtagctgggattacagatgcgcaccaccacgcctggctaatttttgtgttttcagtagagacggggttttgccatttcggctaggacggtctcaaactcctaacctcaggtgatccacccacatcggcctccgaaagtgctgggattacaagagtgagccaccgtgcccccggccaggatgttttaaaatatgtatacattgtgaaatggctaagtcaagctaattaatatatgcattacctcatatttttgtgctggaaatgtttaaaatatgttctttaagcaattttcaagaatacaatacatattcatagtgggtatagtcaccatgttatacaatagatcttttctttttttttttgagacggagtttcactcttgttgcccaggctggagcgcaatggcgtgatcttggctcactgcaacctctgcctcccgggttcaagtgattctcctgcctcagcctcctgagtagctgggattacaggcatgcgccaccacgcccagctaatattatattttagtagagacggggtttctccatgttggtcaggctggtctcgaactcccgacctcaggtgatccgcctgccttggcctcccaaagtggcctcctgaacttatctctcttaactgaaattttgtatcctttgacaaacatctcctcagcctctagtaaccaccattctactctctacttctgtgtgttcaacttatattccacatatgagagaaatcaagcagtgtttgtctttctgtgcctcatttatttctcttaacataacatcctcccagttcatccatgttgtcatagatatgagcatttccttcttttttttttccttgagacagagtcttgctcttgttgcccaggctggagtgcagtggcacaatcttggctcactgcaacctctccctcccgggttcaagcaattctcctgcctcagcctcccaagtagcctggactacaggcatgtgccaccacacccagctaatttttatttttagtagagatggggtttctccatgttggtcaggctggtcttgagctcccgacctcaggtgatctgcccaccttggcttcccaaagtgttgggattacaggtgtgagccaccgcacctggccagcatttccttcttcttttaggctgaatagcattccattatatatataaatcacttttttttttttttgagacagagtcttgctctgccgcccagggtggagtgcagtgacacaatcccagctcactgcagcctgtacctcctgggttcaagcaattcttgtgcctcagtctcccaagtagctgggactacaggcacgtgccaccatgtccggctaatttttgtatttttagtagagacagggtttcaccatgctggccaggctggtctcgaactcctggcctcaagtcatctgcccacctctgcctcccaaagtactgggattacaggcatgagtcactgtacctggtcataaaccacattttctttctttctttctttcttttttctttttttttttttttttttttgagacggagtctcactctgccaccaggctagagtgcagtgatgcaatctcagctcactgcaacctccccctcccaggttcaagcgattctcctgcctcagcctcctgagtagcagggattacaggcgtgcaccactacacccagctaatttttgtatttttagtagagacgggtttcaccatgttggtcaggatggtctcggtctcctgacctcatgatctgcccacctcggcctcccaaagtgctggaattacaggcgtgaacaaccacgcccagccaccacattttctttatttgttcatcactaatggacacttaggttaattccatacttggctgttgtgaataccactgcaatgaacatgttagtatagatgcctcttcaacatactgatttcatctcctttgaatatatatccaatagtgagactgctgtatcctatggtggttctgtttttaattgtttgaggaacctccatactgttttctataatgggtgtactaatttacattccaccaacagtgtgcaagggttccctttctccacgtccttaggaacaatgttatagtagccattcgaacaggtgcaaggtaatatctcattgtggctttagattgcatttccctgatgattaatgatgctgagcattttttcatatacttgttggccatttgtatgtcttcttttgagaaatgtctattcagatcttttgcccattttaaaatttgggtattaacccctcatcagatatatggtttttaaatgttttctcccattccatacgttgtctcttcactccgttgattgtttcctttgctgtgcaaaagtttcttagtttcatataacactatttctctattttcactctttttgcctgtacttttggggtcatattaaaaaaattattgcccagacccaggtcatgcagcttttcctctatattttcttcttctagtaattttagtttgaggtcttgtgtttaaggcttaaatctatttggaattgatttttatttgagacagggtcttgctctgtcacccaggctggagtgcagtggtgcaatcaaggctcactgtagcctcaaagtcctgggcttaagtgatcctccctcctcagcctcttgaatagctgggtccgtaggcatgtgccaccatgcctagctaatttttttatttttagtagagatggggtacgggggtctctctatgtttcccaggctggtctcaatcttctgggcttgagcaatcctctcatctcagcctctcaaagtgctaggattaaaggtgtgagccataacacccgaccttcgatttttgtatatggtatgaggtgagagtctaatttcattctgcatgtggatatctagttgtccctacaccatttattaaaaagactgccctttacccattgtgtgttctttgcaccgttgttgaaaatcaattgactgtaaatgcataggtttattttgggtctctattctgttctattggtctatgtgtctgtacaaatgctattctatcagcaaatgttgggaagtgggagagggacagaagatttcagaacaagagtcttgaggtggggaaaaaaaacagtacattttaaggccgggtgcagtggttcatgcctgtaatcccaacacttttgggaggccgaggcaggtggatcacctgagaccaggagttcgagaccagcctaggcaacatggctaaactctgtctctacaaaaaaatacaaaaaattagccgggtatggtcgggggtcgctctgtcgcccaggctcgagtgcagtggcgcaatctcagctcactgcaacctctgcctcccggattcaagtgattcttctgcctcagcctcccgaatagctgggactacagctgtgcatcaccatgcccggctaatttttgcatttttagtagagacaggatttcaccatattggccaggctgttcttgaactcctgacctcgtgatccgcccgccttggcctcccaaagtgctgggattacaggcgtgagccaccgcatctggccagaggaattatattttaagagacaggatctctctatgttgcccaacctgatcatgaactcctgggctcaagggatcctcctgcctcagcctcctgagtaaccgggactacatgtgagagccaccgtatgcagccattggaggatattaagtagggagggctacctaattcatatttaagaagttgactttgggccatgtacggtggctcacacctgtaatcccaacattttgggaggccaggctgggcagatctcttgagcccaagagtttgagaccagcctgggtaacatggcaaaaccctgcctctactgaaaacacagaaaaattagctgggtgtggtggtgtatgcctgtggtcccagctacgcagaaggctgagatgggaggatcacctgagcctggggaggtcaaggctgcagtgagcactgatcgtgccactgtaccccagcctgggtgacaaagtgagaccctgtctcaaaaaatatatacattaattaattaaaataaaaaatcaagaaacagtttttgttgtggtttgtttgtttgttttttgagatggagtcttgctctgtcacccaggctggagtccaatggcgcaatctcggctcactgcaacctccgcctcctgggttcaagcgattctccagcctcggcctcctgagtagctgggattacaggcgcccgccaccaagcccacctaatttttgtatttttagcagaggcggggtttcaccatattggtcaggctggtctcgaactcctgacctcaggtgatctgcccgcctctgcctcccaaagtgctgggattacaggggtgatccaccgtacctggtcaactcccagtcttaacacaaacagagcatataatgatggcagacaacattccagagagggctacaagggaagtaatattcaaatgggaaggccaggtttcattcatgcagaaagtagaaggaactttctaggaatgggctggcagtatagacaactttatctcacatagattccatagtcctctcacagaggactccccattctccttaacctcagctccccagtgctgctcggcttccctccgctgccagagctcctcaacttcttgtaccccaaaccctcagcctgaagccccagcaatctccactgttctccccaagctccctctgcccatctttctcttcacaatgacttcacccctcagaattcccatacttctttataggccccacattgaaacccagccgtttatttaaaataaaacaattgggccaagcatggtggctcatgcccataatcccagcaactcaggcagcccaggcaagaggattccttgaggccaggagtttgagaccagtctgggcaacatagtgagaccccatctctatgaagaaaaaaaaaatttttttttttttgagagagactcttgctctgtcgcccaggctggagcaatctcagctcactgcaaactcttggaaaacagtctggctgttctatgaattttaaacatacagttactatatgattcagccattccattcctaggtatatatccaagagaaatgaaaatatatatccacacaaaaacttgtttgcaaatgttcatcacagcattattcataatagccgaaaagtagaagcaacccaaatatccatcaaccaaagaatagataaaaacaatatggtggccaggcacagtggctcacgcctgtaatcccagctctttgggaggccgaggtgggggggatcactcgaggtcaggagttcgagaccagcctggccaacatggcgaaaccctgtctctactaaaaataccaaaaaaattagccgggcatggtggcaggcgcctgtaatcccagctacttgggaggctgaggcaagaaaactgcttgaacccgggaggtggaggttgcaatgagccgagatcgtgccattgcactccaatccagcctgggcaacaagagcaaaactaaaaaaatgaaaaaaccacaatatgctatatccagacaatggattattacgcagcaataaaaagaaatgaaatactaatacatgctacaacatgaatgaccctcaaaaaacattaaatgaaagaaaccagtcacaagaggccacatattggattgttccatttctataaagtgtgctgccccacccactcccatggccaattttagacctcaacaccagaattgtttgaattctgaaatttttaatttatgccttctgtgttctcaccatcctattattctggttttcattcattacccctagtacgcctgttgttctaccccattgagacaccacactttttatctcttctctttatagtctattgaccctctcccctctttgcttctcccatctagttcccatctggtctattgttttaatttctctcttgccagtattaactcccttgctcaattgtcttcctatctcgtccacctagaaagacctcaaccctccaattgtctatttattccatgcctgcctccggattcttgagtactatcgaagaaaatcatgcaaatattatattggtaccactaaatatggttttcaacctttattaagttatactctgtccaccttcttcaaaaccaccatttataactacattagattgttagggctgccataaaaaagtgccactatgtgggtggcttaaagcaatggaaatgtattgtttggtagttatggaggctggaagtctgaaatcaaggtgttgacagggccacgctctatctgtaggttccaggagaggaagcttccttgccttttctagcttctggagattgccaacaatccctggcatttcttaccttgcacctgcataactccaatctctgccactgttatcacatgacattctccctgggtgtctgtctctgtgtctcttctcttcctcttcttttttttttttttttttttttgagatggagtctcattgtgacacccaggctggagtgcaatggcgcgtctccactcactgcaacctccacctcccaggttcaagtgattctcctgcctcagcctcctgagtagctgggattaaaggcacccaccaccacgcctggctaatttttatatttttagtagagacggggtttcaccatgttgataaggctggtcttgaactcctgacctcatgatccacctgccttagcctcccaaagtgctgggattacaggcatgagccaccatgcccggccaatacgtatgaattctatctgctcctcgccaatctccactgcctccttcctaggtaagactaacgtcttctctcacctggactactacaactgacttgatcagcaagttatgttgatagagcatttcaggcagaaagaatagcacaattcaagaattggcttgaagattttgaggacaaaaggaaagccaagatcagtgtgactggaagataatgagtgagggttgcagtataaaagatgaggtctgaggcagggcgaggtggctcacgcctgtaatcccagcactttgggaggccgaggcgggtggatcacgagttcaggagatcgagaccatcctggctaacacagtgaaatcccatctctactaaaaacagaaaaaattagccgggcgtggtggtgggcgcctgtattcccagctactcgggaggctgaggcgggagaatggtgtgaacccgggaggcagagcttgcagtaagcgaagatcgtgccactgcactccagcctgggcaacagagcgagactccgtctcaaaaaaaaaaaaaaaaaaaaaaaagatgaggtctgagaggcaggcagagtccagattttgggggccttgaaggtccatgataaggagtttgcattttattttattttattttaagcaaagcagtgacatgttttaaaagggctctcttagctggtttacagagaatagattgtagatcatagcatagtttacttccagcatgctctttaggcttggcaagttgagatgttaatgcgaccccaattttggggcttgctctagcttgctttcactgtatatgaaactggaaagctatccaagttgttttcattttagcttcaaataaggaaacctcttttattctctgttaactgccaaggatcaagagtccctccctggaagaggtaaggtgatacattctttccctggagaaaaaactgttagaggaagccagaaagaagaagggaaggggggcagtgtcccaatcccattagattatgcaatcaagccgaaggtacccacctccattcaaataaagtgattgtgctttcctaaaacgaaaagccattgtctatcaagaatttatgctgatttacaaatttatctatgtgaaaatctttaggaaagttaaatatttaataaatcaccttttttttttttttgagatggagtctcactctgttgcccaggctgcagtgcaatggcgcgatctcggctcaccgcaacctctgcctccggggttcaagcaactctcctgcctcagcctcctgagtagttgggattacaggtgcctgccaccacccccggctaatttttgtatttttagtagagacaaggtttcaccacgttggccagactggtcttgatcagcaagttatgttgatagtgcatcctgacctcaggtgatccacccacctcggcctcccaaagtgctgggattacaagtgtgagccaccacgcccagccaatcaccttttttttttagagataaggtctccctctgtcacccatgctgagcacagtggcatgatcacaactcattgcagcctcaaactcccggctcaagtgatcctcccgcctcagcctcccaagtagctgggaccacgggcacatacc

SEQ ID NO: 445 - DNA, 164089 bp, Homo sapiens
gtgacacccctggcatgtggccagaactgtggcacctgatacctcacaggtacttctgcttccaccatggcaaagcccaggataacgccagtgccatctaaacaacagaaactaatgtcggggatagtaggacctccaaagtacagtgagaaggcataatgggccaggcatggtggctcatatctgtaatcccagcactttgggaggcaagcagatcacttgatgtcaggagttcaaaaccagcctgaccaacatgatgaaaccccctctctactaaaaatacaaaactagctgggcgtggtagtaatcccagctacccggaaggctgaggcaggagaatcacttcaacctggcaggcaggggttgcagtgagccaaagttgcaccactgcactccagcctgggtgacagagcaagactctgtctcaaaaaaaaaaaaaaaaaaaaaaaaaggcataatggatgctgcacaggtgtccatcataggtgggtggttcccatggacagtaagtcaccctggatggaggttacatttcggtggtcagaaagactgttaatcaaatccaagaaccttctataaaagagagatgagtcaccaggaaatcactgggtgatttccatgagaaggagccatcagatatatccctggcacagagtaggtactcgataatttgctgaattaatgtagaaatgagtgtaaagtctgggcacagtgggtcacacctgaaatcccagcactttggaaggctgaggcaggaggatagcttgagcccaagagttcaagaccagcctgggcaacatagctccctaccccatctctacatttttttaaaaaaattagccaggtgtggtggtgcacgcccgtaatcacaactacttaggagactgaggcaggaggatggatcacttgagcccggaagtcaaggctgtggtgagctatgatcagagcacagcactccagcctgggccacagagcaagaccctgtctctaaaaagaaaaaaggaaatgagtgaaaggcagtggagggcacactggggaactggaagacccctagctggtttatgggcatcgtggaaagtggcacatggaggagggaacagcttctactcagagggagttgcagacaaagtaaaacgaggagtaagaggggctcaggactcagaggagaggctgagaatgcagggggatttgcttcacagaaacaagagctctgggggcttcagtggaaaattgagagaaggaggggcaggaagggggaaaggaagcgtgctgtgtgtgtgcacaagaacacaagtctgggcccagcgtggcagtgcacacctgtaatcccagcactctgggaggcagaggtgggtgaatcacttgaggccaggagttcgagaccagcctgaccaacacatgaaaccccatctctactgaaaatacaaaaaaaaaaaaaaagaaaaaagaaaaattagctgggtgtggtggcacacacctgtagttccagctactcgggaggctgaagcacgagaatcacttgagctgggaggcagaggttgcagtgagctgagacggcagcactgcactgcactccagcctgggcgacagagtgaggctctgccttaaaaaaaaaaaaagagagagagaaaaaaaacccaaaaaccagaagactggattgacagattgagctagagtctgcatggagaggaaggatgatatgggtgggggacatggtggaatgagctgtcctcagggtgccatataaagtcctggaagcaaactggagtctggcgattggtcctgtgtttggatggaaaagcagaggtcactggggttgagaagtgtctgtgtgagagagaaagagaacctggaggtcacctcctttctcccccagtggcgcatggcttttatcttactgattttctggaactgaatgatgtaaaccaagaagaaagtgttgttgtcaaattgacattctcagtctgtaattaactactcctttctgtttttaaacaaagcatactgtaaaatttattagtatcaatgaatatttgtatccacgctaaatcttttaggtattgaactgtttcctttatgttaggtctgatttcatcacaataaatggtacccaggggcatgatgattgcattggttgtttaatctgaattttggatgcctggcaaaatccatgccaatacaattagctttagagcacctgacggatccgactggagccaagatcagcaaggtgtccacgacaaagaggagcagacatgagttcccaatttctggttccccaggatctgatgtgatcacctgtggaaaaagcccatcatgtactgaaagggtgttaaaattatcagccctgctggggagatgttgctgaactgtctacacaacatcaaaacgcttgttttcttaaatgataattagagcagctccatgggagagctagttcataaagacgctccccgtgaaactgctccatccacacaaacaagccagacgcggtgctgtgaccagaagggcagaggccaccgctaattagacatgacatcagcatttatactctgctgaccaattacgtcggaagaagtaaataaagctaatgaaactttcctttcatccaagctaggagctgcagactctccgtaggtgagtaacgttggcccagaaacgcctctgctggagatctttcgggtaatgtgtgactttattcctagaattccttggagagaaaaaaaaatacttaactaaattgaataatgaaataaataaacttggttccatttgtcagtggagacataatttgaggatgaaaataatttacttacttttttttttttttgaggagacagagtctcactctgttgcctaggctggagtgcaacggcaattctcctgcttcagccccccgagtagctgggattataggcgcacaccaccatgcctggctgatttttgtatttttagtggcgatgaggtttcaccatgttggccaggctggtctcgaactccagacctcaagtgatctgcccaccttgacctcccaaagtgctgggattataggcgtgagccactgctcccggccaaaaataatttacattccagtgtctgattccaagaggagcagacctgcttcttcatctaaaagaagaaagcctggggtcctatttgtgaacatgctttatcctttttgggtaagggagtacatatgtcattccaactccccctgccacagaaggctagaggcttggtacagtggaggggtaattggtgctgggaccacaatgcttgggtttgaatcccaactctgacactcacaagctacgtgaccttgagcaagttcctcagtgtctgaggtctcagttttctcatctgaaaaatgggaataatcaaaatacttaccttggtggggttgtttttagcgctcagtgagttcatacatgggaagtaatcacaatagtctcaggccacgtagctgacgtctcagctgcctgctcctttatagacaagagggaaagtttgttttgttcctttgaagctgcattataaaaaaatttgactgctgctgtgctatcaaatgtagtttttttttgtttgtttgtttgtttttgagactaagcttcactcactctgttgcctgggctgaagtgcagtggtgcaatctcggctcactgcaacctccacctcctgggatcagtgattctcctgcctcagcctcccgagtttctgggactacaggcatgtgccaccacactcgactaatttttgtatttttagtagagatggggttcaccatgttggctagttggtctcgaactcctgacctcaggtgatatccccccacctctgcctcccaaagtgctgaaattacaggcataagtcactgcacccagcccaaatctagctttaagaacccagtctgggaggctaagcacattttaagggggaccatgggcccctcatggatgcacggctgggctctgtgctgggggatgagggtggaggaacaaacacgtgatgtttgaagatgatcaatgtcatgattatctattatgcaaatactctgcacagacacaatggacagtgcagaagcatttggttatattctgccaagatttgctcatgtatcagtgctaaggtgtcaagaaggctcatgttaaccttaagggaaaggtactatattgtccccattttatagataaagaaactgagtctcagaaacaggacatgacctacccaaggccgcagaatcattgagtggcagagctagcaatggaacccaggtggcccaactccatccctttaacacttctcccttccttttctttctttccttcctttttctttctttttcattctttctttctttttctttctttctttctttttctttctcttttttcttttttccttttctctttccttctttttcttctctttttctttttcctttccttccttcctttctttcttctttctttcctttctttctttttcttctctttccctccctccctcccttccttctctctctctctctctcctttctttttttttcccagaatctctctctgttgcccaggctggagtgcaatggcacgatctgggctcactacaacctctgcctcgtgggttcaagcgattctcctgcctcagcctcccgagaagctgggactacaggcgtgcgccaccacgcctggctaattttttaatttttagtagagatggggcttcacctcgttggccagtctggtctcgaactcctgacctcaagtgatccacctgccttggcctcccaaagtgctgggattacaggtgtgagccaccgtgcctggcccatttttaactgtatctgtctttctagcattttctgcacgttaaggaggccaccgatggcgaagctgggttttgatttcagaaacagtaaaatgtgaaaaaaatgcgcatcttagaattgaggagacgcaccctgccctggaggtgacgttctgtgtcttgtgtgctcactacaagaatggctcttggaggagtggactgaaaacttctgcactgtgctgcccacccggcggtgctgggggaggtgctcaggtatggctgggggagtcagggagcaggtgagatgggagctggtccctgaaagaagtttgggcggagcagtggtccaggagttgttctaactaaggaacatcaccaggaaaggcctaaggaaaagaggccctgggggaggcggttcctccaaggagagtcctgaggccttagcaactgtgagttgtgagacattggggcacaggacagaggcagaacctgagtttctggtttaaggcacgtgggtaggggctgttgctatttgtcgagacagagaaatacgagacaggcgtagtgtctcacacctgtaatcccagcactttgggaggctgaggtgggtggattgcttgagctcaggagttcaagaccagcctgggaaacagtgaaaccctgtctctactaaaaaatacaaaaattagccaggcatggtggctggtgcctgtggtccagcttcccacttggggaggctgaggcgggaggatcacttgagcctgggaggtagaggttgcaataagccgagatcgtgccgctgaactcccccctggggtacagagggaaaccctgtcttgaaagaaagaaaagaaaagaaaaaaaaacaagagaaagtgctttcggaacagagatgaattaaagtttggaaatggtgtgtgtgcgttgttttggggacactgtcatgctgtccagtcagcggaagttcatcttgtcttaaaatcattctatgtgggaactgtcatcacatacacagtaatgaatgtgattggtgtcggtcaggtttcctaggaacgtcagggagcagagaaggctgcccaggacacaggaaacatcagtgtttaagtcgtctcgcaagagacaaaggctgctctctgttcacccgcgccaggcacagggcgcggtacctcctcggcaagtctttggaatggatgaataatcggaaggttcatggtgttgggagggttgctgagcagggaagccttaaatccagaaagcctcatctgcttcacaatgaaacacagcacagaggaagcaacaaggaggcaacacacatttataagaagggtgaggccccaggccaggcaatgaggacacagtggctatgaagacactgctcctgctctcagggtatcatgttggatttcatcccacaacgacataacagaacaggaaaacccgaacctatagggtaaatacaataccatgtcactttaacagtttttcacaccaaaatatgtggtttaagggtgtgatattgcagtttggtagcctttttttttttcttcctttttttttcagagacagggtcttgctttgttacccaggctggagtgcagtggcatgatcacagctcactgtagtcttgacctcctgggctcaagcgatcctcccatctcagcctcccaagtagctaggactacagatgtgtgtcaccatgcctagctaactttttatatttgtagagatgggaggggtggtctcactatgttgcctaggcttgtcttgaactcaagcaatcctcccctctcagaatcccaaagtgctgggattataggtgtgagctactgcaccactgagccaaaaacctgccttggtagctttttattaattactcattattttattttattttttagatggagtctcactcacttttgtccaggctggagtgctgtggcatgatcttggctcactgcaacctctgcctcctgggttcaagtgattctcctgcctcagcctcccgagtagctgggactacaggcatgtgccaccacgcctggtcaatttttctatttttggtagagacggggtttcaccatgttggccaggctggtctcaaactcccgacctcaagtgatccacctgacttggcctcccaaagtgctgggattacaggtgtgagccactgcacccggcctccttggtagcttaagagagcaaatccagagtatttcaaaaatactatgagatgaaatcattagctctttttgtggaagcttgaaaggacagcttggaagaccaaggagagactttcaaacatcacagtaacaggctacatcctggatccgctctccttcagtgcctacaacacatccatatggtctgcccagaggcagggattccgtgaaaggcagatgtcacccgttctatacagatggtggctctttcctgacatgaccaaggcgaactgtgcataaatccagaaagcctcacctgcttcacaatgaaacacagcacagggtgcctctgagagaggaattagcaggaaatggacatgcgcctatcaaacaatggatcgattacattatcccacgtctccatccactgccctagcctcattggcctttccattccctccattctggtctctaaaaagaagggttcggctgggcatggaggctcacacctgtaatcccaacactttaggaagccaaggtgggtggatcacttgaggtcaggagttggagatatggctatgttgcccaggctgcagttctttatgtattttggatacaagccctttatctgataaatgtgctgcaatttatttttccagccttgcctcccattttctaatatcactgaagagcaaaatctttataataaagtccaatttagtaatattttgcttcgtgactcacgttttctgtttgttgagcatagagaatttaattttttaaaaaatttcacaaaatatgagaagttgttggctagcatttttccaaatttttgggggcccattctttctttcctttctggtactcatcacctgtactttagacttttgatatagggtcctgaagctttgcttaataaaatcctttttgtctttgtattttagaatgaatactttctactgatctgtcttcatgtttcctgactcttttctctcttctccattctgctattaagcccatccagtaagttttaaaatttcagatgttatatttttcagttctgaaattttcatttgattttttctatgttctaggagatatcatttcttttcattcatactaagtatattttcctttactttataaagctttgttataggagctgctctgttctcctgcagtgataattccaacatctggggcatcttaggactgttttatcctttgagagtgatgtattttcttttcttttttctgttgttgcttttgttgtatgtcaagcaattttgggttgtatgctggggattgtggatattacattgtggagaactaggattcagttatattcttctgaagaatgttgaggcttttgcaggcaattaacttgatcagactccagtggtaagctttctattgcttcctctgggcagtgattcaaatcttggttcaattctttaagcctctgttgccctgtctgtcctgctcatgcatgctttgggggtaagcaagagatctgtgtgacgctcatatacaaatcagaggcttcctatccctggcttgtctccctgctaggactcctcactccccagtgacccaggcttcttcctctggtatctctggtctaatacacagtgaatgttaggccaggcctggtggttcatgcctgttaacactagcactttgggaggccaaggcaggtgagtcacttgagcccagcagtttgaggccagcctgagcaacatggcgaaactccatctaccaaaaatacaaaaattagctgggtgtggtggtgcatgcctttggtcccagctacttgggaggccgaggcaggaggactgcttgaacctgggaggtggagattctcatgtgctgagattaagccactgcactccagcctggacaacagagcgggacctcgtgtcaaaaaaaaaaaaaaaaaagtgaattttgagaaaaactttattgacctctggtgtgctgctttgcaattgtggtttgccctcagaccagtgtggaggggaggagagactcaccaaggttttgagttccttgcatgtcttcactctgaatcgccaggtaggtcttttcgtctataaagttatctgtaggaagtttggactataggggcttaaaccactcaactccagctggagtcaattccttttttgttcagggtgcacaagcctggagttttcagattcccttttactccttctgtgacttccatctttcctgtctttctgtccttaggtatcttgcagtgctgctagattttcccaggaatcttattcattcccatgacgtccctgggctgcactcccatgatgcagttttcagtgtttcctgagtttcatgcctgtatttcaagccatctcttttacattcacatagaaccttcagtctagagtcactctcttgtctggctcacctgctttggttactgtacagtatttgttcagtgaactaggcttagaattactacaagtagaggatatttttgttatcacctccaatttcttcaccgagtgcactgaactaaagatgacaatgatgctgctagttattgatggaactactgagaatacttcactttgaggacaatcccacaaggactactaccaggcttaggaatatcacttccttccctttcttcctcccctatcgattgagtgttcatagtgataatcggtatagattactatgtgatcgccatagctatatagctttacccaccatccattgctgagtattctttgagcagcaactctatgcccttaggcacagttccagctgctggggatagagtggcaaatgggacagacatggtccctgctgtctggagcttgcattctggtgggtgggtgtggtgggttacacttcgagataattaagcaaggatatttctcagcgatgcgctatgaaaaaaacaagcaagggaacaagaatgcaatactgggacaaggagtgtaaccttagatagggtggagcagtgtattagtccactttcacactgctataaagaactgcctgagactgggtaatttacaaagaaaagagatttaatagactcacagttccgcatggctggggaggcctcaggaaacttacaatcctggtggaaggggaagcaggcatgtcttacatggcaacaggaaagaaagagtgtgaaggagctatcaaacacaaaaccatcagtgtcatgagaactcactatcacaagaatagcatgggagaaactgcctccatgatccaattacctcccaccaggtccgtcccttgacacatggggattatggggattacaattcgagatgagatttcagtggggacacagagccaaaccaatttgggtggagacacagagccaaaccatatcaagcaggaaggccactttcaggggtgagcgtttgagtggatgttgaaatgatgacaagaagccagtttctagagaggcacagtggctcactcattctaagtgtgctgcaaagcccctttagtgaagaaatctacttctcaaacataatggtcagaataatgaagggtaacatgattattcacatttaatcgacttcatttacatagataaagcctaaaggaaaaatccaatctgtatttatgtgcatgcactgatgtttaaaaatccactggaggaaaaggaaaatttagtcagcaaaatcttttctagataaatgctagaaatcattattccaagaaaagaatcctccacttttactatatgtgtgtgtgtgtgtgtgtgtgtgtgtgtgtgtgtgtactcattaaaaaatacataagagctcctccatggcttgagaatattttatgaagttataaaaatcagtattacctgtcaagtactatgttacatgtgcaatcaaaactgttgaggttacctgaataaaaaaaatccctgatgtctattacagaaagcttttaacagaacttgccttggcaatttactcctaaatcttctttttcctccagctcaatataatattgctacctaatattgtgactgcacaaaaccattttaggtaccacttgggaataagtattaagagttcaagtaaggctgggtacagtggccaacgcctgtaatcccaacactttgggaggccaaggtggaaggactgcttggggccaggagttcaagaccagcctgggtaacagagcaagaccttcaactccacaaatataaaaataaaaaattagatgtggtgacacgagcctatagtcccagctaatttgggaggctgaggtgggaaggttggttgagcccaagagttcaaggctgcagtgagctgtgatcacaccactgcactccagcctgggtgatagagcaagattctgtctaaaaaagggttcaagtaaatgcaaatgatgttttggcaaccttttctcaaaagattctgcattggaatacagactgtaatattaaactactatgtgtatattgtttctacagttgtatacaccgtagtgtcttttacaggtatataaggtcaatggccctagtctaattcagatttaaactagtgcttgccttgtaactctgcaagtgatcaataatctcttaatactgaaaatcacaaaataggataaaacgttctgttgctagtcccataaagcttactacattttttccccattctccccaaacttaggagaaacttgactaaagatgtgagataaaattatttattgtaaaaagtaaatgatcatctccccagccccattcccaaagtcacttgagcctttgcaatccaatttgagatcactttaaaaaaccttcccccgtaacatgtccttgtgtttttgttttttcctccaattaaagtgattaattggaaaggggagcattaggtgacattccttgccttgagacagctggtggtttcctacaccctgtggtggtaactccagacatggagcagctagagctgcggacagttactgctgcagacagggctgtgtcccgtgactcattatggttcagttcggtttctaaatctcccccagtaaaaatcctccccctggaaccatctgctctttggacaagcttctgccccctgaacctggtgcaatcagggtctggtctaggctttgcagagctgggaggaaatccctgggcctccagctaacgctgtccaaggtgctgaataccgtactcagtgtgttgccactggctgagctggtgcaacctttcacctctgagaaacgttttccaagacaggacagtgttatggagcatggactcaagccttgggccatctacatccgttctttctccaccaagatgagttaggcgaccttggccacgtgacccccacctttctgagccaaagcacttaaaacacataataaacattcaaaaccatagcacttagaatcaggaagtccttttatcgtttttcacagtataaggcacttattttttgatatcattctctttttttaaaggcaaaggaattacaagtgaacacactagtcatggcccatcagaatgatagatgcttatctacaaaaacatttcctgacttcttgctgaacctcttgcctctgggaaatactgctgtttgcttacttaaaaagtggtgagaaattaatatgattctctcttcccttttaaaaaattaaatttgtataaatataaggcgtacaagtgcagttttgttacacggatatattgcgaagtggtgaagtccaggcttttcctgcaaccaacaccagaaaagtgtacactgtacccatcaggtactttctcatcccttaccctcctcccacccttctgagtctccaatgtttgttccacactctatgttcatgggtacactttatgtagctcccatttatgagtgagaacatgaagtattcgactttctacttctaagttatttcacttaagataacagcctccagttccatccaggttgctgcaaaagacatggtttcattctttttagtggctgaatagtattccattatgtatacataccacatgttctttatccaatcatctgttgatgtgattcccttttctttgcatattcttggggtacttttgaatcagttcttttaagtttttggggaaggagatttggtttcattttcattactttcaattatctccattatccttctgcaaacccatgtgccacaattcagagcattgtgcatacgtaagaacagagtgagagctccttttcatttccccctggaggaacccccatcctggaatcgaagccctctgtttatgatccaagtgtcaccacatctcaagtctcaatgtgtgtgtgtgtggttttttttttttttttttgagacagagtcttgctctgttgcccaggctggagtgcagtggcatgatcttggctcactgcaacctctgcctcctgagttccagcgatctcctgcctcagcctcccgagtagctgggattacaggtgtgcaccagcatgcctggctaatttttgtatttttagtagagatggagtttcaccatgttggccaggctgttctcaaactcctgatctcaggtgatctgcccgtctcagcctcccaaagtgctgggattacaggcgtaagccactgtgcctggcccaatgtgtggttgttattagctatgccctttaccgaactccttttcttgacctcctatacctacacctgttgtaaagaaacaaatacaaaacaggatttcagcaaaacactaaaagaagagcgttctagttttttaaaaaatttaattttcttgtggcacataacaatgaactctggtgtcaccagcctattgtataattaacttctcgtcttttgttccttatgaatttacatatttaattatctttccatttaatttcccatggttttgctacgttgactaaactctgtaatgagaaagtcttttaatttaatagactttgcaggtcatgtgtaaccagctttggaaatcattttaggattactgagtgctgtttcataatgctgtatatttttcctgccaggatttggagtacctaggttatttgtccaccagaacaatggctgtaaaggagaaaattgagcagtggtcagaagctgctgagaagatgcggtaaaacaggttacataaaaaacaatgctggtttgaaataacctatgcgcttttgtcaagggattttgcattagtgcatttagtccaagtcagggccaattcagaggatgtggctgaaggcaccgttttggccttttttgtttcttttgagagctctgcatacattcccacttttcctgtcaaagtggacaaaatgaagagtctcatgagtggaggggcattctgatcccaagagaccacccatctgtggagtggctacacagccagaatgtggatgtgaaccaactcaacgtgctccccagagactgaagaagcggcgttttagagctttggtttcagtctcttggaggagattttcagaaatggccaatttatgtgcaaaggtgacttttctaggcacccaggaaggcaaatttaagctccgagctgtatcaactgcattctgttcctatcatcagaagtctcagaattgaacagtaaatggtgcctacttggctccttgtcaaaataagtctgcatggctctcacaacaagggagacagctgttcgttccgctggaaaggaaaggagatgaactttgttttgcctagcgttttgggaatcgtgaccacaatttaatacaatcaggtgtagtttgtttaaggaattatcaaagatcatacttggctgtcagattggaattgaggtcgataggcagactttgaccatatgctaaccagaatacaatccaattcaaaagtggagttgagaaacacagcattaggagaatttattcaaacatccatgcagagatagtctaatattttaaaaactgatttccaggatcattcgctccattttaaaggaaatgcagttctattttgaatataattcaggacagggccccagctctctgatttatgcaaaaggacataaattcacaaacctgcctgggctatttttatatttcagcaagaggttgtgtgcagctgctgtttctggcaaaataaaaaaatagtgcaagtgaaaagtgaacgggaacgggaaggagcgtcattttttcttgatcaaatccatgagatcgtcttctattcctttctcactcagctcatctagactgtagtatcggtgaacaattttctcggcggtgaccaccacgactcggagcccgtgggggtctctgcccagctggcatccaatggcagatgacaccaccatgtcgaggttctggtaggtacccccggcattcctgtggtagtggcctgagaacacgactttgacacctgcagagaagggaaaaagtcattagggggccgaggacttccattaggtaacctagggtctccagcattttattctgtgaacagtaatatattaaatatattattataccatcatgtagaattatcatattaaatgtataatattattctgtatataatcaacaaatagaaagcgtatgtgatgtccagaatctttgaaaggatacttcatatatataatatattattaacatgtttgtcataacttgtacaaagacgtactagggaagaaaatgagagaaggaagatgaagtgaatgactttgagaaaagacaaaggagactgaagaaaacagcctgagtcctatagaaatatccagatgacaaaagttatgtattttaaaaataacatttatggccagggatggtggctcatgcctgtaatcccagcactttgggaggccaagatgggtggatcacttgaggtcaggagttcgagaccagcctggccaacatgatgaaactctgtctctaccaaaaatataaaaaaaaatgaccaggtgtggtggctcacgcctgtaatcacagcactttgggaggccaaggtgggtggatcacaaggtcaggagtttgagaccagcgtggccaatatggtgaaatctcatactaaaaaatacaaaaattggctaggcgtggtggcaggtgcctgcagtcccagctacctgggaggctgagacaggagaatcacgtgaactcgggaggtggaggttgcagtgagccaagatcatgccactgcactctagcctaggcaacagagcgagactctgtctcaaaaataaacacataaaccaacaaataaataaatataaaaaaattaggagggcctggtggcgggcatctgtaatcccagctactcgggaggctgaggcaggttatcgcttgaacccaagaggcagaggttgcagtgagcctacatcgtgccaccgcactccagcctgggcgacaagagcaagactccatctcaaaataaataaataaaaataatgtttatggcattctaattaaggtagcagagcatgtctgacatatgatcaaccccctctgctccaaacagccgtagtggatgaaacgtaaaacagaaaacccaaggtcacaggtaggctcaaaaacaaaacaaatagctctacaggccagacacaaaacagagaggcaaagtcatgagtgggagtaaaatgtcaccgggagttcagctcttagaagatcatagagactgaaagcattttcaggggaaaatggggaaaataaagcctggctccctgctggaagaagggctgttgtgggtgcctccgtttacggaaggaggctgaagaacgctgctgctgcctggggctggggaagtggtaggctggtaaatgtttcacatgttattattttttttaaagacctgatttgtcacatttgtcaatttccatggtgtaaatacttccactgtggccgtggctgatttcaagttgccaaggtgatgtcactgaaccagatgtagaagagatgcccagtagtgcccattacatatacatcagatctgtttctaccatagagatacaagagctgccaacagcctcaagagcatggatgacagcaatatttagcaaaagaattacaaagtgatcagttttgagtatttattacctttgctttttaatataatctatttaatactgagtttatataattattaataatggccacttaacaaccagctcacaacattccttaaaatgtaatgattggtcctaatgagttagtaggagctgtcaccagtacaccactaggctaaggcttactgcaacctgagagtctaggaaggaaggagagacacaggttcaagtctaggaactgaaatgacttccccgatattaccatggggccctaaaccactattataaggcctggtcctgaacgggggtgggggtggaggtaatgaaaaccactagagagagagaagttagtcaagagagaaagaatgagggaaaaacaaaaaacaaaaaaaacaccccttactcacattgaccctgaaatgaaaaattctgctgcccatggagaaatcacgtggtaaaatagtctacaaacccttcaattgggaacacaaattcactccagatgaaattaattatttaagattgtctgacaaatatttcaaatcaatgtgtttaagatatcaaagggtccttaataaaggactaacacccataaaaagatgttatgaaacaacataggcataaattgaatgagaacaggaggtaatgaacatttagagatggtggacacaaaacatccattaaaatttaaaataaaaacaaccctcaataaatgagataggccaggcatggtggctcatgcctgtaatccctgtactttgagaggctgaggtgcaagaattgcttgatgccaggagtatgagatcagcctgggcaatgtagcaagaccccatctctataaaaaatagtaaaataaatgagatcaattctagacatcaatcaaagaggaaattagtgaactgagaggtaaaactgaggaaatgatccagaagacaatacagagacccagacacaagcaataggaacatgctcttgatttgagttctctgaattcaaaaattcaaaggatagattaagatcagcagaagtttagaggagctggtggaggagaaaggagaaaataatagtgagaagaatttgaagaaataacagaaattttccagaaagaaggaagacacaggtcctcagataaaaagtactacacaggaaacatgacagttaattcctactgacatatggtgcaataaaattgtggtacagcaaagacaaagagaaaaaccatagaaagaaccgcagtaaaaacattataaagaaatgataatcacacagatagcaggaatcttaacaataacagaatcaaagagtaatgccttctaaatgctgacagcaaataactatgaacctcaaattttattcctagctaaactatcatttaagtttgagggcaaaaaaaagacatgtttggaacataaaaactaaaagtttaccacgtctaaatcttcactgaatgaattgcttcagcaaaagaaaggatgaaatattaaaaaataatgatgaccaaacgccaatattttggtaaactgaattaactattgatttttttaaacctattttttaatgttaaaagtgaaactaaacatcaaaaatgtcaagataaggagtttggtggaaacttaaagcatatataagttattgccatgtttggaagggagataaaaatacggaataacctgatactttgcaagaaaaaaatgtatagttaccttatttctttaaaatgtttgggcatagcagtcaaactaaacttcatcaaaattaccaacttttgtgctcccaaaacattataaaaagtgaaaagacaacccatggaatgggcaaaaatatttgcaaatcatgtatctaataagggtctaatacccagaaaacataaagagcttttacaactcaaccaaaagacaacccaattaacaagcgggaaaggattttaacagacatttcttcaaaggagatacacaaatggccgataattacatgaaaagatgctcaacatcatttatctttagggaaatgcgattagcgacaatgagataaccacttcatagccactcggatggctgtgatgaaagagatggaaagcaacaagtgtttacagggatttggagaaattagaaccttcatacagtgctggtgggaaagtaaaatggtacagttcttttggaaaacattttggcaattcctcaaatgttaaacacgtatttaccataattgtgatatttcactcctaagtatgtatctaggagaaatgaaaacatttgcccatgcaaaaacttgtaggtgagtgttcctagcagcatttttcaaaagagcctaaaatacggaagcaacctaaatgtccatcagttgatgatggataaacaaaatgtggtctacccatacaatgggatgttattcaaccacgaaaaggaataaagtgttgatacaagctgcaatgtagatgcaccttaaaaatattaagctaagtgagataagccacttgcaaaaggccccatcttgtatgcttccatttatataaaatgtccagaatagctaaatccatagagaaagtagatcagtggttgctaggggctgagggaagggtggaacgggagagtgactgctgacaggtgcagggtttctttgtggaatggtaaaaatggtctgcaattagatcacggtgatacttgcacaaccttgtgaatatattaaaacgactaaatttgatacttcaaaagagtgcattttatggtatgtgaattatagctcaataaaaatgcaaaaaatttacaggaagaggaggaagctaaaatgatccatatcacaacaacggattagagttggagatatcagtggtaattcatgtttagcttaatattgctgtggtttcacatagaaatatttatagatgtgtatatacataggccagtacatagacattcgtttccttgctctgtcagctgagagcccctagaagtatgtactagcaatgagagcacctagcactcagatctggcttcctagtaaggattctctaataaaaggaactatggctccttggagaaatggctaccatagcattgagcaagaaatacagaagatgaacctggaacatcttgtgttgccagaaaggatagtggtgctcagaaacaaaaaccctgcaacgatggggtatggcaaatggactcaggaatcaagtgacaggattcccaatggccaaagcttaacaatctgagtagtgaaataaactagtgttgaattacaacccacagtataaaaaaatccacgaggcggccaggcacattgactcatgcctgcaatcccagcactttgggaggccaaggtgagaggatcgcttgaggccaggagttcgaccagcctgggcaacacagtgagatcccgtctctacaaaacattacaaaattagcaggtgtggtggctcatgcctgtggtcctagatctcaggaggctgaggtgggaggattgcttgagcctggaagtttgaagctacagtgagctatgaccgcaccattgcattccagtttgggtgacagagagaccttgtctctaaaaacaaacaaataaaaactttgcaagaccataataataaactactgaataaataaataaatggtagggggagaaacatctcctacacacagaagagtaacaaataaatgacacagacaccccaccctctaggaagtagtgcatctttcttcatcccttaggtgtgggctgtgcatcctgacttctgttcaaagagtatagtttaaagagaaggttaaaaaaaaaaagaatgtatttacagtgaagaaactggacaaacaccaaaagcgataagtcacatgattagtatgtgctcttgatatgaatgtgatagaaatggcacttcacctctgtggtcttcctctcccaaatccatcaccccagtctaatccagagaaaaacatcagacacattcccaagagagacacattgtatcaaatacctgaccagcactcctcaaaactgtcatcaaaaacaaggaatgagtgagaaactatcacagccaagaggaaccgaagcacatacgatgactaaatgtaaatgatccatgtgtttttatttttttaattatttatttatttttaatatattttttgaggtggagtctcactgtgacgcccatgctgaagtacagtggtgcgatctcggctcactgcaaactccgcctcccgggttcaagtgattctcctgcctcagcctcctgagtagctgggattacaggtgcctgccaccatgcccagctcacttttgtatttttagtagagattgggtttcaccatgttggccaggctggtctcaaactcttgacctcaagtgatccacctgccttggcctcccgaagtgctgggattacaggtgtgagccatcgcgtctggctgtatttttaaaagtatacttatcccctgtaccattttccccattcattaacatattatatcagaataatacatttgttacaattaatgaaccaatattgacatattaagattaattaaagcccatgattagattcccttagttttttcctaatgtcctttttctgttccaggatctgaatgatttttactagttccacactggggaacaggaaggaaacagagattgagaatggtggtaaagaggggtaagggaaagaaaatgaggagacaagagagcaaggggagagaaaaaaaaagggcatgaagggaatatgctgatagcctctgcttctggtgagtggggttctgggaggctgtaaagagagctcttgggactatagctacctgtgctggcaggaactggagattcacctgtgggcaggtgtggatcagctcaggtgcataaagtactcagccttccctacttaagacagccacaggtggagagaaacagctacagtcacgtgcagcacatggacattttggtcaatgatgaacgccatatatgaaggtggtcccataagattataatgctgtattttcactgtaccttctctatgtctagatacacaaatccctaccatggacgttttagtcaatgatggacgccatatatgaaggtggtcccataagattataatgctgtattttcactgtaccttctctatgtctagatacacaaatccctaccatggacgttttagtcagtgatggacgccatatatgaagggggtcccgtaagattataatgctgtattttcactgtaccttccctaggtctagatatacaaatccttaccattgtgttatggttgcctgcagtatccagtacagtaccatgctgcatggtttgcagtctaggagccatgggctatagcacacagcctaggtgtgcagtagactacaccatctaggtttgtgtaaggacactgtgatgtctgcaacactacaaaattgtgtaacaatgcatgactgcaattccattgacttcttattagaatttgaacagaaagaactcatgttaagggggcaatctagcaatactgtcgcacattttactgtacattcccttggcccaaaaaaaccattttggtagacagttatccttcagaaatccccagggaaaagcccaaagatgtatccgggctgtacctgtggacattaatatatggttcaatgtgcatcacagtaccgttagtaatgtttatttatggaagacctgttaaatgacattatgcgcattttttaaaaagaggtaatttacatgtactggcaccaaaaggtgccaaataccattaatatgtatagcacactgctgcaaaaacatcgtgtgatcctgtgtaaaataacgtatgccttagaaggtttgtgtgcatatacaggctcgtgtgcctatttgtgtatatgtatacctcagagggtatgtgtgcatagacattaaactgcttatagtggtggctccaggtgaggggtgtggggtgggattagtgagaggcacatcattctctcttattacagtagtgtaatgcttccaatgatcacgaattaatcgggtgattgggaatgaaatcccagcacttttggaggccgaggtgggcagatcagttgaggtcaggagttcgagaacagcctggccaagatggcaaaaccccatctctactaaaaatacaaaaactagccaggcgtggtggcaggcgcctgtaatcctagctacttgggaggctgaggcataagaatcgcttgaactcgggaggcggaggttgcagtgagctgagattgtgccactgcactccagcctgggtgagagcaagaccctgtctcaaaagaaaagaaaaaagaaaagagaaaaaaaaagaaaaagaaacattagggcaacatgaacagggcagggtggcgtgacagatgcagccactgccactccagggcacaaactgtgcagttctcaggttgcagctgggactgctgggttgggcgcctgatgggtccttgccataaatagacaactgaaaggctccaatcgtacagactgcaggggcggtggaaatgactgcctcctctgtggctctcctggggtttcacagccagtctgtagctcaaatgggaccgcgtaagatcagccctgcctgggggaacgctgaacggctggacagaaagcacttagcattattatttctttgcatgctaaattatgtttatgagatttggctcttcatgcctaactcatagttgcaaactgtactattctggaaagaatgtctggcaattttgaaagaagcttgcattagccataattagctgtaaaaactcatttatgtttaagtttcacaccatattgagtggcattaacagagaggggagcatttaatggtgattgttcaagtgcccagaggacctctcagagcgggtctccccagacccgtggacagctgttcctctctgtaatatgcatgtcctctccatctgcccctcagggctcaccaattattgttaacgtccgaagtcacagaaaatgtgaccaaacgaggattcttaagagtagcaaagatgctgcaagaggactagcaataaagatgaggccgggtgcggtggctcccacttgtaatcccagcattttgggaggccgaggttagaggatcgcttggggccaggagttggagaccagcctcggcaacatcataagaccctgtctctacaaaaaaatttatcaaatcagccaggcatggaggtgcatgcctgtagttccagctactcgggaggctgagaagggaggattgcttgagctcaggagttggaggttgcagtgggctatggttgcaccactgcactccagcttgggcaacagagcaagaccctgtctcaaaataataataataaaaaataacgatgagagaaactactagtgagcaaagcagttgtgttcaaaaccttctccttctggtaaaagagagtcctcccccaattccaatgaggaacttggccttctgaggtcctgcatgaaaaaaatgaagcaatgactatgtgatgagtttacaaagagacggtcaggcaggggacgaaagtctgtctcagaagcaggaagatgtgactaactccgtcctcctgggttctgatgctgagttcaaggctctggcatgttcctggctggctcaaggagtctgaaacgaggaatgagatgttgagctggaaaatgggggaaacacttcttgggttggagccaggtccagaagaagcctggtgagtttccagacgtgggggtttctgagtctatttctcagctccagggaggcccggaagttctgaacccgaaatatttctcctagttccacctccagtaagggcaaccgctccaggtggagtgaaaggaggcggggcctggaagggggtggcacagtggcggggcactctgtatccttcatcctgttttactgaatcctcccaatgcacctctgtcctagggactcacatcgtctccattttacagatgagaaaactgaggcccagagaagttaagaaacaaacacaaagccacacagctagacaacagggcatccaggatcagaactcagggtactcagacatcagagcccattctgctttgggaccttggacccattactgacctctgtgagttggcatttcctcttttgtaccatgaattaaaatgacagcccatatcatgggtggcagaggtctgggggggagcatgggtgtcagtaccaagctcctcatcgccccacccaggaggctttctccagggcagggccagcttctcactgctggaggggggcacacagcatggcagtccagctctgcaacacgcagcctctctccgagttataatcctgtccctttcatgccgacaggccacaaggacctataagaagttttacccatctcagctttctattagcttttgatagggaagcactgattcacaactcgatggaggtaaggaatgtattaataaatcttggtttccctgacggggtattgattttagtgatgttttcaagagctgggcagaatttccactcagcctgggcatcagtcatctgtggctgacatgcctctatggttccttaattgagtattatgtatagattgtttttgaattatgaactgctgtaaggagatgacaggcatctttttaaattactgccagaagaatttccagcaaaggcagccactgcatcaacagaggatgatttctgtggcattagcttcatatgttttttttctccacggtatcaagtcatgaagacgctataaaagctatttttaagctatcttgattcaagttcatttcaaatcaatcagaggattgggacacagtcactgtataatgtaatattctaacattggaaacctgcttcaaatcaatcaggaaattgagatgcaacccagtacaattctgatactaaacactggccttctttaatgccttggtgttggggcttagacctggaaagtgtaaacacattccaactggacagcctttacttttatcctgcatgagactatatttgtgaaaatgtgatccagctttacgttgccagctataacagtgaaaactgcattgcaaaccatcactcacactgaatttattctgcctcagtggtagggaaaaatgtgacacaaataaaaaagagggagagaaatggaaagttaaaaaaggttgggtgtgaatgtacagaaagtaggtataaataatccctcctgccggtaaagaatttccttagcaggctttgagataagagattctggccagggggcaaaggggaagcgacagatgtttcttaagtgggtttgggaggtgcagattgaatatgaagtcatggttaagccccacctgactcattcaggaagaggttcttcacttttcgtcgtcaattggggaattctagattccagcatatttgctcactctcatcagaatttccctggtatatatcttccccagtgacccaatgcctgtggcccaggactgccaggggacatggtggaagggatccgggtaaggtgggaggctgcttcttcagttagcttgagacaataaacatctgttgagctccctcttggtgccaggtattaaggagtgtggtgggatcaaccattcccagcaatcaacaactcaaggtctatagccaggcagtcagagaaagagctactcataacaaaatgcagaaatcgacatcactcagcagcgttttattcgctggacatctacgacctgcattttgcacctgcatcatctcactcaagcctaatgaggacgctgaccaggaagatatcatccccttttgcagatgagggaatgaggcgaggacaggttaagtgacttgcctggattcacatagctaagatgtatacttggataaggccaattcagaagcacaggctctgtccaccatctgagaggtgcaaagtgccaaagatcaccgtgccataggccctgtaagaaggcttcctggagggggtggctctgacctaaacacatccttaatttctcctagttctctgctcatgtctgacctgaggcctgagggggcatcatattatggtggtaataataataatgatgataataatatttatggagtgttcattatctgtctagacattgttctaggcacttcacttgtttttagctcatttaattcccacaattcctccatgaaggaggcatggttattacctgtgattttattatacgatttagagatgttcagtagtttgcctaactcagcctgtaagtgttgaagcaggatctgaacccaggagtctgtccccagagtcagcactaaaacacctgccaagtagaggtaaagacacatcaggtgaggggaatatcacgagcgagtgaagagagtcaagtgtgtctaggaagcagcaggcaccaaacgtaaaggctcctgcagactggcacctgctgggcatccgaatttcctcttcagcatttttaatccttctgacacccaacatcaagaaactcctgcacatttcccagaggacacgactgaaggtcagctggtgggtggtaccagaattccagttcagattctggcttggctagaggataggcgagggcggggaaaggcggggccagagggctgcatggggctatagactggctgaaatggaatgacttacaaaaaattccaaggttggctgggcgcggtggcttatgcctgtaatcccagcactttgggaggccgaggcgtgcagatcacttgaggctaggagtttgagaccagcctggccaacatggcaaaaccctgtctctactaaaaatacagaaatgtggatgtggatgtggtggtgggcgtcagtaatcccagctacttgggaggctgaggcacgagaatcacttgaacctgggaggcagaggctgcagtgagctgagctcgtgccactgcactccagtttggtggcagagcgagactctgtctcaaaaaaagaaaaaaggaagtgccacggtcgtgtatgtgtcttccttcttgtggtaagcatcaaagcatcccatcacttccggcttcagcctttcattgattcaaaccctctcatccccaaatcctgttaactagcatggcatcttaaagacattttcatggaacttcttttgaggatcacttggaacttaattgacctgggtcagcaaacattttccagaaaggtctggacagtaaatattttcgcctttgtgggccatgtggtctctgtcacgactactcaactccgccttcctttgtagcgtgaaaacagccatagaaagtatataagcttgtgggcatggctgtgatccaataaaactttatttacaaaaataggaggaaggccaccctcactaataaagcataccattaaaaagaatacacttgggtaaagttcagccaagagttcttgattcttcaaaagtctgaaagtttctgtgcttctcaaaaataaaaatcaaaaaacagtgacaacaaaggaaagagtaatttgtagtttcatttataaaaccatgaatgccatttcaaataagggaggcaagtgaattgtgttagtgaacacaaaaaaggtcaactattctataagtaagagcatctgtcctgacggtcagaaagagacttctatatctactttaaaagtgtccacatccttccatctaaaaaagtaactcagatctaattcaactgttttggccattataggtaccttgcatttccacggaaattttacaatcagtatgctgatttctacaaataataaaactgctataattttgattgggattttgttgaatctgtcgctcaatcgggggggaaatgccgtattaacattggccctgcaatccatgaacatggtctacttttccatttactcaggtcttttaaaattactttcagcaatgttttgtaaaggtagaggtcttggacatcctttgctattcctaggtatttcatgttttatggtgctattgtaaattgaattatttttgtaatttcacttaacaattgcttgctgatagtatataaaaatacaattatttttgtctattaaccttgtatcctgagaccttgctaaattcatttattcattctagtaattattttgtagattcctgggattttctaagttaaaaaaaatcgtatcatctgcaaataggccattttacttcctatctttatgtttcttatttctttctcttgctttttgcaatagttaggatctccaatacaatgttaaaaagtattggtgaaaatactctttttcttgttggttataaatttagttttcatattcctattttttagacttttgatatgactgctaaattattcttcagaaaaacataatcaatttaaatacccaacaaggatttgagagtttgatcagtgaaagctcattctttggtgatctcacaaaagccttgcaaagattaaaagggaaactcctcaggaggacctaaagtaaatatttgtttatccagaacttctgagtaactgctatcctccccattcgtttttcatgctggataatccctttcatcttcctctgaacaaagcaggttcacggacttactatggttggacgtgtgtgtaaagagtaggtggatattctttttactattccttttcttgcatcttttctgtaagcttgaaaatatttccaaataaaatgtaaaacaaaaacaaaaacaaaaacaatgcatacttgttaaattaaacccaaatgttgtaaaaatacagaatatcaaacaaaagaaagtgggaggagggaaatttcttgaaatccctattcctgttttaggagtttagtgtgtattttccagataatttaaatgtgtatactactatatatgttagatatagatctaaagaaacatatatacatacacaaaatttcacaaaaatggaataggctacatacagatttgcaacttgcttttatatattcgacaatgtatcttttacttattccattcaggatatgctgccctattttagagctactcactaacatcctgaaaactgtatttctgatgttggggctcagaaatggtaccccaaaacatggcactttgacacgctaaactaaagcagcagcctcaaggtctctctgaccttccctccccaagagcagtgacagactgtctctggaatttccttatctgactaaggagatgtctttctaaaagaaatgcaattatcttaagaatccctccctaggaatctcatcaaataaccgagaaagattagccaatggaaaagagaagagactaaaagtcatcaccatgcccagacagacttttcttccattcttctgagagtagctccaagagattacctgggagactttatctacataataagacaacctttgttcacaatgcagttctgcctcttaccttcccataacttactggtcccattcagtttcctaaaaaaatcatttagaaggtaatgtctgcttcctaggcccattcaattcccctaaaaatcatttatgactgctcaaaattgcctgcatttctcccatctccctctcccctatgaatagggtatataagcttcaaccatttgccccgagtcttatatattgtatggctctcaagttcagcacattaataaatctgtatgcattttttcctgttcacctgtttattgtcagttcatttcgacagtgaaccttcagaaggtggaacaaaagctttccctctgcccccacactgctatgtaaaatctaggttgccggatgatcaatctgtatcttaataataaaaatactgtaaactgggaggtcaggagagttcagagcctttcagccctctaaggactactcacatgcatggggacacacatagttactacagcttctcagagagcatccagattcagggggcagagacagcccccagggaagaaggagtcttgtctgcacagcccctctgatctgggtcttgggggagaagcccaactactcctgcttgctgtatcatcagcatgagaagagagacactctcaggttacggagtgcctaagccaagcagctctgcccctgtgagacctggggtgggctgtaggggcaatatctccttctggagctaagcctctcaaaggtttcactgtgatgggtccacgtgctcctgggctgaaccctgctggaaacctgggttcaagcctcatctcctctgatgcatgtgacattaacacctatacacttggtcatttcaggcatttgttcacatgtctggtccatgtgatataaagcatctggtttatcttaggattcatagcctcctcttgagattctcttcctctttctttctttttaatgttttgcttgggtaggaagcaatggcccagttgtcaaaatgacctttacctaaagccagctcatactctaaaacctgaagagatttctttgctttaaggattcctcccccgacccccgtttccccccgtaaagaatagccatgcgttattatttcaatgtgccccccaacgtttaagtgttataaacttaatccccagggtaacagcgttgggagatggacctttaagagatgattaggtcacgggggctctgccctcaagaatgcattaatgctgttatcagagaagtggcttcctgattttaaaacaaggatgaatttggccaggcccctttcctcctcactcttgccagggatgccccaacaagaaggccctcaccagatacagccccttgaccttggacttcccaacccccagaactgtaaaaaatcaatctctgttctttataaattacccaggctcaggtattctgttatagcagcacaaaacgaactaagacaccatgtaaattacacttttcatacctcacctgattaacgattcacaaaaattatattcttcccttttcaaagctcctcttaattaaaactaagaatgtgggagatggggatggcacagaagtggcctagaaaacacctagggctgtgcattctcggcttcattaggatgtaagtagttctgcagcaaaaggtttgagaaagagtggatggaagaggttcagtggtcacagttatcacaccaacacctggaggcagctgaggggggcccacattcccgttcataaaatgacgtttcccacttccacccaccgcatctgcatccgacttagaatcagaaaggacatggggatgtgctctcacactccagggcaaagagcagaattgggaaataattactctccaggggctagaggtggctggctgcccacttgagtccacagccttgagagtgtgattacagcatagcatcacttccctatcctggactcgaggattagttatgctcctccaacccccagactcactgccgtttattacttttttgagacagtgtctctctcggtcgcctatgttggagtgcagtggcgcgatcttggctcactgcaacttgcgtatcctgggttcaagcagttctccctgcctcagcctcccgagtagctgagattacaggttcccgctaccatgcccagctaatttttgtgtctttagtagagacaggattttacgatgttggccaggctgatctcaaactcctgaactcaggtgatcgacccactttggtctcccaaaagtgctgagattacagacacgagccaccgcgcccagcccctttattacttttctacatggggggctatgctcaactttttattttttccccttcctgatgacttacagattcaaaacctgtagaatatgcaagaggagggctgtatttttttaatactaatatttggttgtcagaaaagcagtggcagcctggggtgggagctaggggttgggagactcaggcgtgaacctcagttctgctgttgctgagctgtgtaggtgtggcatgggcagcaacatatctgaactcctcatttggaaggcaagactagtatcaaccatccccagggccactgggaagataagtgagaatcagggacacgccctgggtggcacagcaggaagctgcgtgtcttgtactcaggcagcactcaataattatactttcctctcatccttctctaagtatctgatcagaagatctttttcttttcatttgcacaaattacatctttctcactattcataatttcctctttatttttaaaagaagatggcagcttgcgtgtgaaatggagcgtggggcccacattaaggtttcaatccagaatggacaattttctagatttccatgctctatcttaaacacagctgtcaggacaagaggctcattaaaaagattgttttgactgacagaatgttcgtgtatcaaattggaaatccatccaaaaatactcgagggaggtagacagacgtggcggccagccacggaaggaaaatgttttgcagaatttgttcaagatgaaatttgctagggagaaagtgccctgcctctgacttgagccagggaaagccaagaagggggtactgcatccatcaaaacgtaaggaccttgggtaagtgagattccgtttgaataactgggccaagaaaaattctgatcaggcgatgatcccttaaagaacacacattaactaaatttgtgcacttttccttacccctgggcttcgaggcacttcctcctccagttaacagcttattcttcctgcatacatctccggcttccacaagccctttcaatggtggccttccccaggctctgtccattccccttctctcgtccctttccctctcactgatgaccaccggttctgttataacctgaaccaactccacctgccaaaaattcagaatcatttcccagccaacaatcggttcctaggcttcgtggacctctcttctggacatccttgcaagctctgcaaactcaacccgcttacttcttttgccccaatgcacacccctcctcgtgtgggtttaactggagcaccatgcagtcatccaacccaggcatgtgggagtcaccccgagactcccttcctccgcctggtccatgcgtcctgttgacctgtctgcctgaacacgcttacccccatctcctctccatcctcagtgtgatcttcctggttgcctgatctcctgtatgatattcagctgtcagtggctatggtggcttaaaaaagtaaaggctgtatttgtgcttaactatgatttatctaccccgtaaaaagaggaggtgagcagtccagggagggcgcagcctctccaggatttcaataaggatccagcctccttccatctttctgttttgccttcctcagtttgtagcttccatcctcaagatcgcaagatggctgcagggcttccgggcactgggtccaagttccaaggcggaagaagaggtaagggccaacgaaaagcctttctggaagccccacttgctaaacccctgaacctaggtcatgcagccacacacagctgcatgggggtctggagacggagtgtttcagcctgccatgctagtgccctgaacaaaacctgctctgttaggaaggaacgcagagaaaatgcatcccggtaaactgagcagagccatctttctcaaatgcaaaacctgggcacagtggctcatgcctgtaatcccagcactttgggaggctgaggttggaggatcacctaagcccaggagtttgggaccagcctgggcaacaaaatgagaccccatctctacaatttcttttttaaagcaaaaccacttgggccacttcgtcaagtaaaatttgagggttctccatcaccttaggatcctgatcaaacacaatgtctccatttgagcctactccactcactgagcaactccagtgccagtgccagtacaggacgagctattttgtggctccagcctctgcccatgttgtgccctctttctgcccaggtctgcctgatgtgcacttattcatccttcaagaccctgctcattcgtttcctccaatgggaaaacatccctggtgaaggtgcacagggctgcttcttcttcatcctctcccttgcaaattcttttacttttgccctgatttctggctcccaccttggtttcccctactggtctatgagctccttaagggcagaggccacgtgtgtttaactgaatactcatccccaggatgaatagcagagagcggccgctctgtgactgctggataaatgaatgaatggagagatggatggatggatgcacagtgaatgaataaatgaaacttgtggcaactcagaagctatactttagtaggtatcctggaggagaaacccaaatctccccttcgttgatattatcaaagggaagggagagttcccgtatttcctgattttacaaaagaactgccatgttccttacagaaggaggccttactcacgacagggtggaaactggagacagtggaacgagcaccgactctggatcctgtctgttacttaaatgtcaaatgacaagcgactgcacctcgctgtacattgtttcttcaattttaaaaaggggacaataatagatccctcagccaggtgcggcggctcacgcctgcaatcccagcactttgggaggctgagtggacagatcacctgaggtcaggagtttgagaccagcctggccaacatggtgaaaccccatctctaccaaaaatacaaaaattagccaggtgtggtggtggccacctgtaatcccagctactcaggaggctgaggcaagagaattgcttgaacccaggaggcggaggttgcagtgagccgagatcatgccactgcactccagcctgggtgacagagcgagatttcatctcaaaaaataaataaatgaataaaatgataataatagcaataataatagcctcacgaggctgttaggagtttcagacgtaatgcgtttaaacccctggcacactgtctactgcatgccggggacctgatgcttcttgggaccgtgtttgaaacatagtgtggacaaggacatttttcttccttgcctttggagacagtgctggttgcctctcactatccacaccctcccttttcctcctgattttgttctgggcaatgtcctcctcagggaggccaccagcttcattccccaaaccaggatggatgcagctgtgacaattctcctaccacggccacccagggtctgggcaggaacccaggtctggatatggagatttgggaggaaaccacgggggtgtctgagaaaggttatgtttcttttaaaaagtccccctttcttcctctggggttgtcaatgtgaatgaatgtgacgtgcagaattgcatcagccagctgagaagtccagcctaaggaatgggtcatgacagggagaagcacagcgggtgtgcagagagatcctgctcatgcattcagccaggccgagtgcctgagccacccgtggccctctgtccacacagagaacttccttattctctgagctggggtgatgggagtttcctgttctgtacagcccaaaggaacagatgctattgatactatcctatacttgttagaacagtcactctccttttggggtggccagtaatccatttgttttgaagattgcttgtttattaattgtatatatatatatatttttttttttgagatggggtcttgctatgttgcccaggctggtcatgaactcctgggctcaagtgatcttcctccctcagcttccccagtagctgggactacaggcatgagccaccatgtccacgaatccatttgtgaacaaatactatgtaagttggtctttggaaactcctacaaaataacagagttcccctgctgtccaagaggccgcagagggtttctttgtcagggtgggattcagtgagactccattagaatacagttttgtcaataaacttcttgtatcatttctattcctgtgaaattgctttcccaaccctcttgccttcagtaggaccaaagcatgcacaggtccaaaggcagtgagtgctgtggcacattcctcatcagagaggggaggatgctgggatgggaaaggtggcttagtaaccctggcccatgtctgtatgacaacttggaggcaatttggaaatgagaaccagacgacagacatgagaggcagagtgtcagttactaaaacacccaaaatgttggcaactgaaaacaaagacaatctcttcctccctttgatttagattgtgaccttttacttgtggctgaagagatttaagtgcagaaaatgtaaagtggcataattttttttttgaaaagaactgatggctctgtaactatgatccttaaatataagcatcagtggtgactgattcagtacgtacaccaggggttggaaactaaagcccattgcccgctttctgatggggcctgtgagctaagaatgcttcttacatttctatcataaatggctgcatttaggatgtaagcacttgtatcataatctcaattttgcctcttgtcccacaaaacctaaactatttaatcatgctctttacagaaaccgtttgccaactcttgacctatactcactccactacaggcatccttcttataatattattattttttcatgttttgagaaatttaaaagatacggtgactacaaaagaataatgtaacattcgtaatgccaccacccagagataataaatattaacatcttgtaagatctgtctttacattttttaaaaaaagaaatgaaatattacaatgatatcccaagtcccctttaactgctccccactgcaccagagggtcttagctttacttttaagcaatgtgcaccttcttgggatagggcttggccagggatttggccatagtgtcagtgacctcaacaagattaagaatggttattcctaggccaggcacacctgcaatcccagcactttgggaggctgaggtgggcagatcacttgacatcaggaatttgaggccagcctggccaacatggtgaaaccccatctctactaaaaatacaaaaactagctaggcgtggtggcgagcacctataatcccagctactcggaaggctgaggttgcagtaagcaagaaaatggttattccacaaccctgactggaatagaggaaagagaggcaccaggtcacaatactcctgtgtattgatggattaatcacataaaaaagctttctttgggcttggcatagagtagtcaatccccaaatttatactcaattaattgaacagatgccccaaaagcaggcacttaactgagtgattttatgaagacagtaataacgtaaacattttataaattaaaggaataacaacaacaaaagaatgaaggaagaaggagggaaggaagaagaaggaggaatggaatgtcactaacatgaaagtcacaaggccagcaggtgccacgcaactcacactatttttttttttttttgagacagggtcttactctgtctcccaggctacactgcagtggtgcgatcatggtttactgcagcctcgaccaccccaggctcaggtggttctcctgcctcagccttcggggtagctgggactacaggtgcacaccacaacactcacacaatcttaagaggaaccacacccctatccaataggtagaaagcaaagtacttgcacatcttcacatgtgacttatggggagagaaatttaagtaataagaaacaactctaaagtgtcctagaatcctactccaggattttttttttttttttttttgagatggagtttcgctctgtcacccaggctggagtgcagtggcaaaattttcgctcattgcaacctccacctcttcctgggttgaagtgattattctcctgcctcagcttcccgagtagctgagattacaggcagccgccaccacacctggctaacttttgtatttttagtagagatggagttttgccatgttggccaggctggtctcgaactccgacctcaggtgatctgctgcctcggcctcccaaagtactgggattacaggcctgattcatcgcgcccagcccctactccacgacttctgcattaagtgtaattctctggtttctttcctgacttttctccaagactctgagcttcttgagggcagggccgatgcttactccacctcatgtgtttcccttgtctccaaggaacacgtgggaacatgcagagaacatgtgctgtcaaagttaaaagatgtaaagacaaatataacactaagcaaaatacctgaccccaatgtcaagagctccagtcagaatgctacatgtcttcagcaaaacacgacacacagtcacatgtggccttacttaccaagactgattgcaggcatttgttctacaaatatgaaaatgcacaagcatttttatgttaagatttgggtctgtttatgcatgaagaagttcaagatgttattatgtatgacaaagaacaagtggaaacaacctcagtgtccaacaatgacaagagttaaatgaacgtggtatgtctacagagtacaatgagctgtggtctgggtttttaatgacatgagataatgctttgtatgacatcatcttatgcttcctaaatgcccatatatgatcagctatatgaaaagagggcttttttttttttttttttttttttaaagacacagggtctcactctgtcctccagactggagttcagtggtgcaatcttggctcattgcaacctcgaatttatgggctcaagagatcctcccacctcagcctcccaagtagctagaaccacaggtgcacaccaccatgcctggctaattaaaaaagtatattttgtagagatggggtcttgctatgttgcccaggctggtctcaaactcctggcctcaactgatcctcccaccttggcctcccaaatcactgggattacacgtgagagccaccacacccagccagtatttcttcttaacaagaaactgttcatgaatggactgcttataaaccaagcccacacccccaatcccccaagctgtgcaacaagagtgcacctgtatgtgagaccacaaaccacactaaagatgcaggatttcacaaagccgaaggaaacgacactggggaagtcatcggcaaataaggctctcacagagaaaacatacatgcccacattagctcctgagaagccaatcatcagattactgatggattcagaaacagactcttatgaagattgataaaatctgaaaagaacccacagtgatgctcctgccaatgtcaaatgtaaagtacaggatgctgtcaaaagaatttttttcagaccatttactccaaggaaaccaagtcgacacttgattacctctctgttcatcctgagttgctgcatactggcagtaacaaccattttatcaaacacaagttgaaattaactgattgccataatttgtctcttttctcaagacaatgtttcaaaccaacctttatttttattttattgccattttctgtagctacggtctgcattttaagtgagctttttttttggcagccataatctttagataatgagcccacctgggcttgaactggtgaggggctggccagagtctgcgggggtgggtacagatccctccctgtttcatgaaagacaccatcaagaaggccaagtgtggtggctcatgcgtataaccacagcactttgggaggccaaggcaggcagactgcttgagctcaggagttctccagaccaacttgggcaacacggtgaaacccagtctttattgaaaatacaaaaattagccaggcgtggtggggagcacccatagtcctggctatttgggaggctgaggcaggagaatcacttgaacccaggaggcagaggttgcagtgagctgaggtcatgccactgcactccagcctgggcaatagcgcaagactccttctcaagaaagaaagaaaaaaaaaaggccaggtgtggtggctcatgcctgtaatccaagcactttgggaggccgaggtaggtggattgcttgagctcaggagttcgagaccagcttgggcaaaatagtgaaacagtgagatctagtttctaccaaaaaaaaaaaaaaaaaaagacaccatcaagagcatctttgtctgcagaaggcacaattcacatactcaagatgaacggatgaacggagaggcttactatgaaagaaaaattcctgcttgttgaggccaaaggggaattccacacccctgtattccacaccaagtaggctccacggaccctcacttggcagatccctttggatatcccagtgctgagcctctgtggttgcagcaccagctcctttcctgaggcagcccctgtagaggagcaggtgaagaatgggcaggagggtgagcaggtgggaccctgccccacacgggtatcccggctcctctctacttgccatcagcacccgtgcccacggtgcattctgctcatcaacatgctctggggcacccaacagcaatgtcgttgagaacacaggacccagggccactgcccaggccccaagcaattagtgtcacccaccactttgcagctggttgatgctggggaagccgatttgtctccccacgctgcagtttccttgtctacaaaatcagagcaagagtccctgtggtgtactatttattaagcagtcattattactattttactagtatagtgtcctgtgtgtgttttctttctttctttttttgagacgtagtctcactctgtcacccaggctagtggcgtaatcttggctcactgcaacctctgcctcctgggttcaagtgattctcctgcctcagcctctcaagtagctaggattgaaggcatgaagtagaaacacaatttgacccagccgtcccattactgggtatatacccaaaggattataaaacatgctgctataaagacacatgcacacatatgtttattgcggcattattcacaatagcaaagacttggaaccaacccaaatgtccaacaatcatagactggattaagaaaatgtggcacatatacagcatggaatactatgcagccataaaaaatgatgagttcatgtcctttgtaggacacggatgaagctggaacccatcattctcagcaaactatcgcaaggacaaaagaccaaacaccgcatgttctcactcataggtgggaattgaacagtgagaacacatggacacaggaaggggaacatcacacgctggggactgttgtggggtggggggagggggggagggatagcattaggagacatgcctaatgttaaatgatgagttaatgggtgcagcacaccaacatggcacatgtatacgtatgtaacaaacctgcacattgttcacatgtaccctaaaacttaaagtgtaatacaaaataaaaaaaaaacaaaaacaacataaaggcatgcaccaccatgcctggataatttttgtatttttagtagctatggggttttgccatgtttgccaggctagtcttgaactcctgacctcaagtgatctgcctgcctcggcctcccaaagtgctaggattacaggcatgagccactgtgcccggccgtgtccattgcattttaaatgaccaatggagtcacactgaccctcgaggaaggtggtttttaatacccactggtggcacttcacagagccatctcagagacaggctaactttaatttgtccccggtgtggtgaacagaacaaacactgccaggaagactttggttcccactctggcaacactcggcagtgggtcaggggtaccaattcaagggatatcagaaactgtgtcccttacacatccttttcacgtccagtcatttaaaacatttttcaataaccatgatgataagaatagaggttcgctatcactgagcacctaccaggagccagacactgtctcaaggtactggattatttcatctgatccccacaaaacccaccgcacctgcttcatagctttgtgatctgaatggatgactctgcctctaggacctgaatatgtctgtcggcaaaacggaaaaaataccagtaccttgtggggttgcggtggaggtttgccacaccatgggagcagccgctgacaataatgtgaataaaaataaaagtgaacactgaccatgtctctcaagaagcctgttcatctcctgcacttttcgggagagaaattgctctattaggtgccttcagtggcaccatggaggagtgagatcagagaatactatagtccccagggagaaagagcacgcagcatagggccccacctggcagggcggccccagaggaggctcagtggctgaaagaacatcacaactgcctgacatggccccttctatctggacaatgttactgcagggaatagtaccctcacctggacttccaactgcacacagcacagtgcttacagaagggagacgtgtgaggaaaaaagatttcctttcctcttaccgtgcctatgaaatttaaaatagattcaagagttagagggcctctgctccttacaactgacgtgctcagtttccacacctgtgccgaagacctggagaaggcacctttaaggtcctgatagaggggctcccaggacaatgtctggcacccaggaggcttcacctaaatgagtggtatttgcttttgagagtctcactctgtcacccaggctggagtgcagtggtgcaatcatggatcactgcaacttcaacattcaggctcaggcgatcctcccacctcagcctcccatgtagctgggcgtgcaccacaatgcctggactcattttttgtgtttttttgtagagacaggtttcaccatgttgcctaggctggtctcgaagtcctgggctcaagcgacccgcccacctcggcttcctaaagtgctggaattacaggggtgagtctctgtgcctggccatgctattttttttttactttcaactcaatcaattcatatgcaaacatttttaagtaaaatttaaaaggcaatgaaatcaaagcatttttgaacttattttacaaagcaatgttgtagatttgtacttacactgtgggaaatagggaaaatgtcttttaagtgaaggcaagtgcagtaaataaaaaataacttgaactagtagacggaatgagcgtttcactaagctggagatactggaattttacaaaggaatctcactgctaatttcaaaatgacactaattgctatttttgaaacatgatctcaaaggagaagatataatattttgacttcataaacttcaacagacactgctgttccccatgttctgggggctcctttttgaaatgttgtgatgaaattaaaaaattaaatcatttttacttggccggctgtgttggctcatgcctgtaatcccagcactttaggaggggctgaggtgggcgggtcacctgaggtcaggagttagagaccagcctggccaacatggtgaaaccctatagcttctaaaaatacaaaaattagccaagtgtggtggcgggtacctgtagtcccagctacttgggaggctgaggcaggagaatcacttgaacctgggaggtggaggttgcaatgagccgagattgcgccactgcactccagcctcggtgacagagtgagaccctctcacaaaaaacaaaagaacagaaaaacccagacatttttagttgaagagcaatctacaacctcagagaagaaacttctctgttttgttcatccctccatcctcagtgcctagcgtgggatccatgctatttgctgaatggataaacgttgatttaactttaggaatcagcagcatacatttacacacgccagattctcaatttataaatatttaccatcaggacttgatttcaactttaattagcccaactgttaaggatacctccaaagtgagaaatctaatccatcactttacaccagatgtagctttggcagttagtcttttatctaggtttatagtgaatgagaatcagacattaaatgactagtgtgtgatgttttgcggtgaactgattggaacctaaaaaataggccaaacgtgggaaaatgaattcaagactaaatctgaggaaataaaacaaagagggtaaacttcctctagctgataaggtcccacaaactctggattctatggatgcttaaaaaaaggtgggggggggggcgggggcatgagtgtgagatagttttttaaaaacccccccctttttttttttgagatggagttttgctctcgttacccaggctagagtgcagtggcacgatccctgttcactgcaacctccgcctcccagcttcaagcgattctcctgcttcagcctctggagtagctgtgattacaggtgtgcgccaccacaccctgctaatttttatatttttagtagagacagggtttcaccatgttggccaggctggtcttgaactcctgacctcaggtgatccaccgacctcgccctcccaaaggactggtattacaggcatgagccaccacactcagcctaaaaatttcattttaaatgggagggcactgtaacatgattgtcactgccctgtggacaggtttgctgcatttgtaaaaaaatctgactatgaaattatacattcaaaggtgtgtttactaacacttaattggtgaggtatgttaaattaagttgaggctcaagctgcctccttacatattttatttttatttacttatttttttgagacaggatcttgctctgttgcccaggatagagtacagtggtgcaatcacagctcactgcagacttggcttccggggctcaagcgatcctcccacctcagccttctgagtagctgagaccacaggtgcatactattatgcctggttagttaaaaaaaaaatccttttcgcaaagacagagtctcactatgttgcctgggctagtctcgaactcttaggatcaagcgatcctcctacttcggcctcccatagtgctgggattacaggtgtgagccaccatgcccagccttctttatacattttaatttcagccaaaggtttctctgtatacacagtgaactggatgtgtaaacagaatagaacatactcttgccaatctccggttttggccaatcacaggcagtcaactgttcaaactgtgttcaaataaggcaaatgctgagttgtaacccatctggctgtttttgtacctcactttccactttcctttttctgcccacaaatctctcaccatttggctgtgctcgagtctttctgagcctctattctggttcagggtctgcctgatttacgaattattctttgctcaactaaactgtgaactttaatttgtctaaggttttttcttttgaaacaggtgtgtgctttaaaaaataaacaaaggatcaaattttatcactacattctgtaagaatttttcatctacttcagcgactaccatccttttaaaccagtacccccttttgttaaaattaaaagtagcatgccttcctcatctaccctgaaaactctcagactggctgtaatcgtctatcttcccgcatatcccaggagccaagagaattttgtctagctttacttcctatagtttgcattttgaacagagttgatcattattttccctttcaaatctacacagctatatcagcaggcagcaggcatgtccccaaaccaggtccgcctgtcctggagattctcaagaacgcccgcaagaaggacgccagcaccccaggggtgagaagcatgccggtctagctaatggataaagcacatttgcctgctgtggggtccccaaacggttcgggatcatacagaacaacaaacacgcccttagtgagtgctcactatgagccagacatggtgctaagtgactttcttttttttttttttttttttgagatggagtgtcactcagtcgcccagggtggaatgcagtggcgtgatctcggctcactgcaacctccgccttcccaggttcaagtgattctcgtgcctcagcctcctgagtagctgggattacaggcactcaccaccacgctccactaattttttgtatttttagtagagatggggtttcaccatgttggccaggctggtctcgaactcctgacctcaggtgatccacctgcctcagcctgccaaagtgctgggattacaggtgtgagccgctgcgcctggcctgacttgtctttttgattttatatatgactctccttaagggatacaccaacttgacaaggttggggtgagtaccctctttttacaagtgggaaaactaaggcagagaaatgtttagtggcttatcccaagcaacttaagaagccaaatcctgtctgttcacctgccatgttataggaccccctgcccaccggcccagacgctaattccccctgtacaaacctccaagttttgccttatctgcacagtactcatactactatttactgaatcattttctttatttttattttttattttttgagtcagaatcttgctctgttgcccagattggagtgcagtggcgcaatctcagctcactgtaacctctgcctcccaggttcaagccaatgtcctgccttagcctcccaagtagctaggactacaagtgtgtgccatcacgcttggctaatttttgtatttttagtagagatggggtttctccatgttggccaggctggtctcgaactcctgagctcaggtgataattaaatcattttctttaaattgataagctagttctatttttttctaatacatgtgaagctgatcacccaattattagacatcttacatgcaccatggaccctcttgtctgcaatccatcacatcctggtcttcaggggaacatgtgcctcacccaggcacgccctccactgaagaccttcaggaggcttgttctgggcagacctttctgtcagtcaggcagttgttacaatggggtcgtcagatgcatcctaaacttagacacatacagaatgtggacaaggttctggggagagcaagagcgtcaccctgtaatgggaacatttctctaagccaagagttggaaaattatcaccggcaggcctaccacctgtttctggaaataaagttttattggaacactgcactgtctgtggctgctctcttgttatgaaggcagagttgagtagttgctacagagaccatagagccacaaagcccaaaatatttactatctgaccctttaccgaaaagttctattgacccctctaggcgaagcatttcccatacaaaagtcagcttgtggcctgggtgcagtggctcatgcctgtaatcttagcactttgggaggccaaggtgagcggatcacttgaggtcaggagtttgcgaccagcctggccaatacagtgaaactatctcttctaaaaatacaaaaattagccagatgtggtggcgtgtgcctgtaatcccagctacttgggaggctgagtcaggagaattgcttgaacctgggaggcggaagttgcagtgagtcaagatggcaccactgcactccagcctgggtgacagagtgagactctgaccccaacccccaccaaaaaaaagtcagttcatgaaaaccaactcacaagtgatacggatattacctgctgataagtagacttgaatcacgcttaattcaattccattgaccactattcacctattggggggctactatatgacagtctcagctaggggctggccttacagaggtgaataaggctgggcttctgtttcctggaggaatcaggatctaaacagtgactgcaatacagcgcaaaggatgtcagagcaggatttgatgttttatcttcctataaagtaaatcctgggaacctgatctttttgttctttaaaactttgaattttttttatttatttttgagacacagtcttgctctgttgcccagattggcatgcagtggcgtaatcttggctcaccgcaacctccgcctccagggttcaagcgattcttctgcctcagcctcccaagtagctgggactacaggtgcctgccaccatgcccggctaatttctatattttagtagagatggagtttcaccatgttgcccaggctggtcttgaattcctgacttcaagtgatccacccacctcggcctcccaaagtgccgggattacaggtgtgagccactgcacctgccaaaactttgaaatcttaaaactataaccatggactaagatttatcttctctctctctcattttctaaaaaagcataaatactagaaatgaaactctaattctgtgaaatgactcattaacttttgcggggaagatcaacttattggaatttttcataattgccaaatttgctctgggctctctaacacacagttctaatctctcttcggagaatggaaaaaaagaaaaggtatcgagacatcaagggaaacatggtcagttaaagatctagcttttgttttttaagactgagcttctaaattggaatcaatattaaatgggtcatatattaaccctctgctgaaagaggcataaaggaccgagaaaatgtctaggttcaaccaaaatttcattatctactatctgtctttgctactccaactaggtatcaggtgaataaagcggaaaaccaatttctacatcccttggatgtgatgaaattgattatcctcacgcaggtgaaatgaagacagaaaataacaggtgctgcttcacactggtatatctgtcctgacctgataactgtttatttgtaccggctattgacaatgtttttgtatcatacaaagacggtttttcactgagcttcaaaagtagaaacaggatgcatctgtttctagggaaacctgcacttggaggctggcaggcttcgattcacacagcacacccctccactcccggtggtccactgcacagtgacaccctcctcctcgtttatctcatcccatttttaaaaattaatgcaacaatgagagatgattgttgatgctcattattaaatcatttattcatcccacacaatgattcagaattattcatcaagcttgctggaaggaagctgggttttacctccacggtggtttggggagagatgtgctctttaaaagggtattttataacaacacaattatcataattaaaagttaccctgatattctgatgagcttttgacatatttttgagtactggcatttcagcacaaggagataaatgagactgagacagtagtagggaataatattgccatggggggaagaaaacaaaggcaatattaaataccagctgccatcgtcacccccaattttatcccagcctttaagttaatgaattttacaaaatatcacttgaacttctggctctccaaaatgagttccaattatgttgttgtgacctgagccgctttctgcataactgagtcatggatgcgtacagccaagagcgcccacctacatgagcttccaagcccagcaagtctatctgcctgcagcggagagcctccacatccgactcatatttccttctgatgttgcctaagatttgttctgtgtttggaaggtcattcagcaaaaggcctggtttggcaggccacggaaactgacagggaatttcgggaagggctctcatctctctggccttctctgtgaagcaggtttaggtgaagacccttaggccagtggccaagaagaggtaggtgcctttgtatacctgcaggtggtgcctggaggaagcagtgggagggggtgcttgggaagagaaagactgctgagtgactttggagagccagcctggggaccagagcagagagaggcacaagtggcttccctaagaccaaaggccacagaggccacgtgttgaacacagaggtctgaacatgctctgttgcccaaggtggagtgcagtggcatgatctcggctcattgcaatctccacctcccaggtacaagcaattctcctgcctcagcctccgcagtagctgggattacaggtgggcaccaccaggcctggttaattattgcatttttcagtagagacagggtttcgccctgctggccaggctggtcttgaactcctgacttcaggtgatccacctgccttggcctcccaaagtgctaggattacaggtgtgaactaccacacctggcccaaagactttcattcattcattccacaaatactgataaaacatttattatgagctaatatctgagccaggtctcccaactgcatagctgaatatgaccctgtccctgccctcagggagctgagagtttagcggggattcagacaagtcaacacttgcaaatccacctgacaagtgctgggataagagaagctgaagaacctggggtggggaggaggggagagccttatacagaagatgtcaaagttgagtgggaggcgggatgtggtgtctcatgcctgtaatcctagcactttgggataccccggcgggagggtcacttgaggccaggaatttgatatcagcctgggcaacacagtgagacctccatctctgcaaaaaataaaaaaattagccaggcatcgtggcactcccctgtagtcccagctacttagggggctgaggtgggaggatcacttgagcccaggaatccagggctgcagtgagctatgatcacatcactgcactccagcctgagtgacatagtaagactccatctcaagaaaaaaaaaatgttgaggccgggtgtggtggctcacacccgtaattccagcactttgggaggctgaggcgggcagatcacttgaggtcagtcaggagttcaagaccatcctggccaacatggtgaaaccccatctctactaaaaatgcaaaaattagccaggcatggtggtgcgcgcctgtaatcccagttactcgggaggctgaggcaggagaatcacttgaacttgggaggtggaggaggtggtagtgacccgagatcatgccactgcactacagcctgggtgacagagtgagaatgtctcagcaaacaaaaaattgttgagtgggcctaggcaggtgaaccagaagaggctggaggggaaggcagatgtgactgagaagggccctggacactgcagtgaagagctgggccggacctgggggtggagggaagcctcatgctttgcagtcagttacacacccatcttgctgttaggtgcagaatgaactagaatgggtaagagcagagtggggagcacagtgcagagctgctgctaagacccagatgagacagtggacaggctacagagacacgaaggaggtagaattaaagggacatgaaataaccaagtgccttcagctagcgagctcctccggagatggagccattggattccagcgcctgatgtcactgagagtggaataaggcagctaacccccctgttttctcatgcctaccaagcagcctcctgattataattgggcttcccatgtagctctgcctacgggaagagaaagcaccgctggggtggaggccagggctgcggtcttgctctaaattaatcaactgccattctggtttgtagctatcagtctctgggagctgggataattggagacacagaccagctcttggtttgccagcaactctggttcctgtgcttgaggggttgcagatctgagtgggcagggggctggggcatcatggatatgatgccaccctgtagggcccttggtgggtggtcaacaggcttctcccaagggtgccctgttagagctcacacctgtaatttaaactcttcggggggccaaggcagggggatcatttgaggccaggagttaaagcccagtgaggtgcaacacagtcagaccccgtttctacaaataattaaaaaaattagctgggcatggtggtgtgtgcctatagtcccaggttctcagaaggtagaggtgggaagattgtttaagcctaggaggtcgaggctgcagtgagccatgatcacgccactgcacgccagcctgggtgacaaagcaagactctcaatcaatcaatcaatcaatcaatagaaaaaattagaactgtgagtcttctcagtatctgggggtgctctgtcctacaaggggaaaaccacagaactacataccactcaggaatgtggtcaacaagaacaagaacaaagaactcagggcagtcatgggctttacatcatctaacattagatctggccagctgcggtggctcacacctgtaatcccagcactttgggaggccgaggtgggtggatcacctgacgtcagaagtttcgagaccagcctggccaacatggtgaaactaaacctggccaaactgtctctactaaaaatacaaaaactagctggacatggtgatgggtgcctgtaatcccaggtactcagcagtctgaggcagaaaaattgctttaacccaggagacagaggttgcagtgagccgagatggtgccactgcactccagcctgggtgacaagagcgggactccgtctcaaaaaaaaaaaaaaaagaaataccattggatatgaaaggaatcacttcaatggcattaaatgttctctctggctttattctccactacagaatagtctccatggtggtgctcatgccgccttgacgctttgtttccttgtcatcaagacagttttctgcaccaactcaagcatggcatgaaatttcaaacgacttaatagaagttttctaactttatctccatggaacagctggaaaacatctccaattatgtgagcttattgcaaaatgtcttgaaaatacaaaatgttccgctgggtggggtggctcacacctgtaatcccagcactgtattcccagatgggactaaatccgttactctctccggattctggaggagaacttaatccacctcaccagaggaaaactgatcacgtcccgtggccttgggaagccaaggtgggtgaatcacttggggtcaggagtttggaaccagcctggacaacatggtgaaaccccatctctactaaaagtacaaaaattagccaggcgtggtggtcagcgtttgtaatcccagctacttgggaggctgaggcatgagaatcacttgaacctgggaggcggaggttgcagtgagccgagattttgccactgcactccagcctgggcaacagaacaagactttgtctcaaaaaaaaaaaaaaaaaaaaagtaagccctggtgaaaggaagaacgaggacaaagagaagagacacaacagttgtcaaaactggaatttgccaaatcactggtaacccagggaatctgcctagaacagactgtttctcttgaaaggcccatggcaggtgctaccagaaagataaaggaggtgggtgggctagtgccttagagtgccatcagaaattgaggtgtgacctccagaaatggagggtcttcattctgtgcgtgcacgtgtctgtcacatatatcactggcagcaaaagatgggactaaatccgttactctctcctgattctggaggagaacttaatctaccttggcagaggaaaactgatcaggccccaggaactgtccgctaaagccacatcccaggatttcctgagtcacagctgatgaatactggagggcagcttgactcttaaagatcgtctgcccttgagcaaggtgcctgcttcccagagaagtgaaagcagatgtccctggcatcttgccttctcccaaggcacatgcaagccacattcacacccacctgcactacccagtctacttcccccaataaacccctcctgccacttccagaactccaatcttcaactgtgagcagctatggcacactgagtacttaggctagggtctgttctccatgtcttggaggcctttctcatttaatccttgacaccatcctgcaataaggctactattactattcctgttttatagacgaggaaactgaggcacaggaggattaactagccagacatgcagtctgcaagtccaagagctggtatcagaactcccggcctagtcctctctccctttttgacacattgcagagagacgggagaaagatctggaaatgccctctctagacttgtccttcctccctgaaacccgtggcccggggcctctacctgcgtggatgaacttgtctgccaacttcttccgagtggacttgctgaggttgaagtagtagtcgtcgtcctcgtcgatgctctccaggaacagcgggatgtgctggaagacgatggcatgctggcagtgccgctgcctcgcgatgctcagctgctcgtccagccactggtcctgagcctgcttcaggctggggcatttggaggggttctcgtagaactgggagttgaggaccaggaacaggacgcccccgacccagaagctgaagtagtcatctccccaagtccggcagaactcctcgacggtctcggccgtgggggtgttgccaatgtcatggttgccgctgacaaggaccagtgggatggccctgtccactgccctaagcactcgcttcaggtcctccgtctgctccgtccgccacggcttccctggaagagtgagggtcacgtcctgagaaagccaggggcttattcacttgaaataactaacttaagtacttactaacataaaatttaaaaaaagagtaatctggaaatccactccacctagcacatggaaactgcaaaatgcagtcacgtgctaaaagcaaaccaacaagtccgacgggggcctctgcccatccttccccaggataccttagaaattccatgactacatggccccctgccctatgttgctgagtgatggtgtgaagtcaatcctgagattaaatattagtggactgggtacagtggctcacacctgtaataccaacacttggggaggctgaggtgggagggatcacttgagcccaggaattatgagacaaacctgggcactacagtgagaccctgtcttcataaaaaagaaaattaggctgggcgtggtggctcatgcctgtaatcccagcacttagggaggccgaggcacgtggatcacctgaggtcaggagttcgagaccagcctggacaacatggtgaaaccccgtctctactaaaaatacaaaaattagctgggcatgggcacgggcacctgtaatcccagctactcggcagggtgaggcaggagaatcgcttgaactcgggaggcagaggttgcagtaagccaagatcacgccattgcactccagcctgggcaacaagagcgaatctctgccttagcctcccaaagtgttgggattacaggcgtaagccaccgcgccgggcagaacatgcgttctttcactgttgaataccaagttcctcatatttctactcaatcaaactcattaatggtgtggttcaaattttctgtgtcattatccttttctttcggcctgttgatgtatatttgtttctgagagacttggttaagttgtcgctgtaactgtggattgatctgtctctttctgtaattctgccaaggttcacgtcatttacttttagttacattgttagacgtgtaagagttcagaatttcaatatctcactgcaatagttttatatttaaccctaatgaaataaataaatatcaagataagaaacaggcgatctatattaatgctatgagaaaatctttaatatatagtaagttaataatataaggcacagaggaataaaatcacacacaaatttttaaaagcctcacatgtattcatgtattatggataaaatgtcccccaagattcaaagaaaactgttaactctggttaaatccaggaaacagaagcagagagggagggagtcttacacttggtttaaaaccctttatattaggttggtgcaaaagtaattgcagtttttgccactgaaagtaatgacaaaaattgcaattacttttgcaccaacctaaatactttctttctttccctgcctctctcccttccttccttccttcctttcctttctcccttcctttccttcctcccttccttctttccttcctcccttttcccaagcttatgtataattttcaccgaaaaaaaaaaaaaaaaaaaactcaaagattttgactccatggttctggggcttaaagaagattgaggaagccagccaggtggctggaatgaatgtttggactggcagccccagggccagcctggatcaactcagaccagccatgaggccaatgtggactgcagacaaaccctagcacccctggaagagaggactctcggtccctggagcaggcacgacctgcttccacaggaggctgagcagactgggcttcagaccccaactcctgctgcaggggtcagccagcctttcccgagcccattccactggtgtccagaggtgagaggtggctgcacggcctgaagcctagtggagggagccttagggagaagcaggttctgcctgcaccagaaaccaggaggcctctctctcaggggtgctgggggttcattcacctaccgtctgcatcgaaggtgccattgattgacattgcttctttagccgaacccggactgcaggcatctgtgctgacttacatgatcctctctaagactccagtgtctggttcttttcccatgccagtttaggaaagacaagtcctttgtagctttgaacacaacaaactctctcaaagcgacccttgtggtccaaggctgattcattaccactttcctcactggattttctcaaagacctcaaagccgcccctctcacttcttcttctttctgttcacactgacttggggattttgggatattcaatcactgacaatacttcttagcacttcctacaggccaggcactgttctcagagctgtgtgtgcaccgacttgcttcctctggacacccagtggaggagtggggatttgaacttggtggtctggctcaaggtgctgtctacagtgtcctggtcacaaactaaggtcgttgctctcaggatgacttctcctggctgccctgagacacaggatgaggactttataatacactggggtgcagagcatctcctgttcttgattttcaaagtcattaagtatggcccctcacatgctaactgaggcaggtatggaaaaatgtccgaatccctaatgaccataaacagaaaagttaagaaggggcagttcaaaagaaaggctgacttgggaaggaaaccttgtctaggaagcaaccaacaaggaagagctgggaattacacacagtaatgtgatgtgtgtttccaaacaaagagggatgctgcttttggggaaaccaccaatatcccccagtaatctgttaaaaaaaaaacgcagctcatcttccctaaatttccttcagcaaaaatgagcctcttggcagggcgtactgatgcatgcctataatcccagcactttgggaggcctaggcgggcagacaacttgaggtcaagagttcaacaccaacctggccaacatggtgaaaccccaactctgctaaaaatagaaaaattacccaggcatggtggcatacacctgttgtcccagctactcgggaggctgaggcaggagaatcgcttgaacccgggaggcagaggttgcagtgagctgagaccgtgccactgcactccagcctgggcaacagagtgagattctgtctcaaaaaaattatttatttatttattgttggaaaaaaaaaagatgagcctctttcttgtgtagcttttccaacactttctatacctcttgcatggagtcacaggtgctgaggtggagtgagtgtgccctggggttggtctcttgccccttacaagctgcatggccttaggtaagtcccttggttcctctgagtcttggtttcatcgtgtatgaaatggggatgataattcccatacctcaggaatggctgtaagaattcctactaagataatgatgtctagagtctggtacaaacaagaatgcaaagctgtcagctgtctgctttccacatcccatccccctaaatgtaataaattcttccatttttatcagcgacccactgtgtgtgcataacaaccagtaaatcgtttcagaaggaatgaaaatcttccccagggacagaaatagtttttagttaagaatctggaaataaaagagtaaatcctagattacaaaaacccaagttgaatgccaacatttgcatgatctttaacaagctctcatttgcatgtaacagaatctctgtagggttacgtactatattaacaacaacttagtattaacaaagatcatagcacaacttagcagagcttcctgaaaaatagtcccattgtggctgggtgcagtggctcatgcctgtactcccaggactttgggaggctgaggcaggaggatcatttgaggtcaggagtttgagaccagcctggctaacatgacaaaaccccatctctactaaaaatacaaaaattagctgggcatggtggcatgggcctgtaatcccagctactcaggaggctgagacaggagaattgcttgaacccgggaggcagaggttgcagtgagccaatatcgcactattgcattccagcctgggtgacaagagcaaaactctgtctcaaaaatgtcccattatatatgagaacccaaagcccaaagccaacctcaccagcatcatgaacagaaaaaacagaaacctgcccaaggacacagagcttcaatgagtttcctgtctcacgcagggttctatgttcacaaaaagaatgtatataaaggacaggaagaaaggcagggaaacaaggggaaagactctgaaaaatggcaagacatgactcagaagaggggcagagaaggattgttctggggtctccaaggtggataagaggtatctgctgagaagtgggtgccaagagtacagggaccccaatgtcagcacacacctgacccccacggagaggagccctgggtgggaatggcgagagcagtgtagaaagctgcaaagcgtttaaaacacttaaaaaaattttaatgcaattggtcaaaataaaactaggaggtaaaaagcatgataacgataattacaaaattcttatttgtatcagtggtactgtgagaggtatgatttatttttgtccatattcattaaggcagacattagtatcttggttgttttccaaatagccttaaaatacattgtctaataaaatctctttgtgagttaggaagagaaataaacatccttaactggataaaggacatctgtaaacaagtatagctatgatcataggtaatggtgaaagactgactgccttcctccaagatcaggaacaagacaaggaagtctgctctcacactctcactgaacatcatactagaaatcctagccagtgcaataggcaggcaggcaggcagtcagggaaggaagggaaggaagggaaagacggggggaaggaagggaaggaagggaaggaagggaaggaagggaggaaggaaagaagggaaggaaggcaaggaaggaaggaagggaagagaagagaaggaaggaagggaaggaagggagggaaggaaaggaaagggcatacagattagaaagaaagaaatcagtcaattctcagaagactgtctccacagaaaatcccaaataatctacaaaaaacaaaagaacaaaacatcaaagactcttagcactaataagagaaattagcttggatgcaaagtaaatatataaaaatcaacagtatttctacatcctaacataatataaaaattagaggtttaacaagaaggatttaagagatatttgggaggtagaactgacaggaatcctcattgtactggttacaggaaggactcaaaattaattcccagacatctgagcaactgggaggctggtcatgttgtttactgtcagggaaaagactaggagagaaataggttacaggtagaaatcaaaaggtcattttgaatataaaatttgatgtattgttacaggccaaaaaaaaaaaaaggagggggggaacagacaaattggacctcatgaaaatgcaaaacgtttgtgcatcaaaagacactatcaacagagaaaaaagtgcaaaccacagaatgggagaaaatattctcaaattaaatatctgatagggaatgaatatcagagtatatggagaactcctaaaactcaacaaccactaaaacaacctaactcaaaagttggcaaaggattgaacagacatttctccaaagaggatatataaatggccaataaggacattaaaaaggtgcccaacacgactacttattaaagaaatgcaaatcaaaaccacaatgagacgccacttcatacccatgaggatagctactatcaaagagacagaaaataacaggtattggtgaggatgtggagaaaatggaaacctggtgcattgttgatgggaatgaaaaatggtgtagccactgtggaaaacaatatggtggctcccccaaaaattaaacgtaggattaccagataatccaacaattctatatctgagtccccaaaataactgaaagcagggtctcaaagagatgtttgtacacctatgctcacagtagcattattcacaatagcttaaacatggaagcaacccaaatatccactgacagatgaatggataagcgaactgtggtatatccatacaacgaaatattattcaaccataataaagaagggaattctgacacatgctacaacatggatgaacctttaggatatatgctaagtgaaataagtcatgcagaaaaaacaaatactgtttgatgtcacttatatgaggcacttagagtggtcaaattcagaggcagaaagtagaatggtggttgccaggactttcaggagggaaggatggtgagttattgtttaatgggcacagagtttccattttgcaagataaaaagagccatggagacagatggtgatgatggttgcacaacaaataggaatatacttcatgccactgaacggtacacttaaaatggttaaggtggtacatgtaacgttacgtatattctgccatgctaaaagaaaagagaagaaaccaccaaagttatcaatatactcatgatccctccaggttgggctgttgagagggcagctgggtctaggagtctggagttcagtggagggtggggctggaagcagacacattcaccatcattctaataggagcccccatgatggtgcccttggggttggcttttcaaggggatccataagtgggctccagattcagaggacctgaggttgctctttattaggggtgtcctctggggatgttgccctctgagcctgtcttctagaccctaaaatgaaaatattatcacctcctttatggaaattctgtgagataaatgagatcatgtatttaaagtgtccagtatgtagtatgtgcataccttcctttcccctctttctaacagccccctacccagggaagagacaggggaggagggaggcaggtctcaggtgttcagagatctccctcccattttcctcattctcagggagcttagcccccagtgccgctgctactgtccctgagaaatgcaggaaagaacacacatgtctgcatgttgacatcctagcccagagctcacgtttacctgacaactcgtttactgtggtgcctggaggccacacctgtcctgcagacagatggatacatggatgagacagtgcttaggcccttgcacagaaagggaagcatgccaaggacaagaatttccagagacagccctaagaggtccctggaaacagagtcgatggggctccgtccctacctgcaggttggaaacggaatagtcaagccagggcatcaactatatggttaagatcatagctcagtaattaaaactcctttcagggggcaagtagaactcctttcaggggggaattggaaatatccatttaaactttaataacttcatgatattgagtgagccagcagttccatttatcagcctttatcctacagacacatacacaagtgtgcaaaacataactattccttgtagcaacaattgagaagatataaacatttaaattggcttaaatgtttattaataaggaatagataatatgtatagagtaataaacaggcatcacaaagaatgaaggagatccgaatttagtggccacggatatatagaaaaggtgcactgttaaggtttggggagcaagggttggctggcagtgggggacagtaagtgaaaacaggaagttattagagctagtagtacgacacaattttattaaaaataaatctacgagttggtatattcagagataaaaatatctagaaaaacatggcaaaactgttaatagtacctgtctgtggggaagtggaaggacagaaaacatttcagtttcctgaaaaacttaattttttatgagcataagttactttcattatagaaaaataatcaagacattaaaaaatcacagatgcactaaaattagatcttgttaagtaaacaagtatacatttaaataaaatgggaacaaatgtaaaacaagtgacaaggccaattgtgtaagtactgttctttactctcagaaagagagaaaatggggaaaagagagtaccagaaaggtatttcgaaataagttcttaaaaaaaaaaatcgcagtgggtaaattcaatttaaaaaaatgtataaaaaattgtgctcaggacgaattgtgttctttctgaatctgaataattacattttcaaaaagagagttttcttctagagcagatgactttaaacgtcaacacctagtgagtatcagaggcagcacaatgtctctgctactattttgatatctgaatgaaatagcatcaaaggagaaggtggttgtcctggtcttttaaatctagtttcttcttttttattttttattttttttgagatggagtctcgctctgtcacgcaggctggagtgcagtggcgcaatctcggcttgctgcaatctctgcctcctgggttcatgcgattctcctgcctcaacctcctgagtagctgggattacaggcatgtgccacaacacccagccaatttttgtacttttagtagagacggggtttcatcatactggccagtcttgaactcctgatctcaggtgatctgcctgcctcagcctcttaaagtgctagaattacaggtgtgagccaccacacctggctataaatctcgtttcttcaatcttactaaaatatgatatgtgtttctcaatttttttttcattattgctgcccccaggagacccaaaattagactttttcctaatctcccctccactaataacagcttgagatataaatacacaaacaatataattcatcctctgaaggtatgtttttagaatattcaaagagttgtggactgtcatgaaaatcaattgtgggacattctcaccaccccaaaatgaactttcacccattagcagcccttccccattgccccccaactcccaccaccctaattctaagcaatcactaatctaccttctatagatttctccactccaggcatttcatagaaatagaatcatataaaatgtaggcttttgttactgatctttcactttgcatgatgttttcaaggttcatctattttgtagcctatgttagtgcttcattctttaattgctgaatactattctactgtatgaatatatcatcatattttgtttatccattcatctactgatggacgtttgggttgtttctactttctggctattatgaattatgctgctataaaaatccacgtgcaagtttttcacatgtgaaaagatgtgtggatatctttcatctctcttgagtgtatacctaggagtgaaactctgagttacatggtaactatatgtgtttacttctttaagaagctagcagactgtcttccaaagcaccatcctacattcctaccagcaatgtatgagggtcccaatgtttccacatcctcaacacttgttatttttcacccttttaattgtagccatcttagtaggtgtgaggtaaaatttcattgtggtttctatttgcatttacataatgactaatgatgctaaacatttgttgttgtgcttactggcaatttttatatcttctttggagaaatgtctattcagatactttgcccatttttcagttgggttatttgtcttttcattattaatatttagttgtaagagttctttacatattatgaataccagatctttatcagatacaggatttgcaagtattccctcccatttggtgggctgtcttttcacttttttgataatgtcctttgaggtacaaaatattcaagtttcataaagtccaatttatctattttctgttttgtcacctgtgcttttagcgttatatctaagaaatcactttccaatagaggatcacaaagatttctgcctatgctttcttctaacagttttctagttttagctcttctttgggctttgatccattttgagttcatttttttttttaatatggtgtgaggtaggggtccaaattcactcttttgcatgtggatatccagatgtccctgcaccatttgttgaaaagactaccctttccccattgaattgtcttggcgcccttgtcaaaaatccattgaccctaaatgtgaggatttctggattctcaattctaatccattaatctctatgtttatcttcatgccagtaccatagtgttttgatgactgcaggcttctagtaagtttgaaatcagaaactgtgagtcttccaactttattcttccttttcaaggttgttttcgctattctgggcccacataattttcatataaaatttaggatcagcttgtggtaactgtgtaatcaaggagaaataagatcaaggtccaacacttaagcagcttatagcttttaggctgggtgtggaggctcacgtctgtaatcccagcactctgggaggctgaggtgggcagatcacttgaggtcaagagttcgagactagcctggccaacatgttgaaaccccatctctactaaaagtacaaaaattaggcaggcatggtggcacacatctgtaaccccagctactcgggaggctgaggcaggaaaattgcttgaactggggaggtggaggttgcagtgagctaagatcatgccactgcactccagcctgagcaacagagcgagactccatctcaaacaaacaaaaaaagctaagctatcttccagataattttgtacttttagtagagacggagtttctccatgttggtcaggctggtctcgaacccccgacctcaggtgatcctccagcttcaccgtcccaaagtgccgggattacaggcatgagccaccactctcagccccaatgggatggttttaaggaagcttgtccaacctgcagcccgtatgcagcccaggatggctctgaatgtattttatgtgtggcccaagacaattcttcttgtaaagtggcccagggaagccaaaagactggacacccctggtttagagggaagagagtagagggagaagggttggcaaggtagtgattttatggtttttagccaagaagtaacatggactgaacagaactatgataccgggcacagaaaagaagacaaccatctacatatgtgtaagctttattctgcttaaatgaaaaaccatgaaagagaaaaatatgtaattgtgaatgtcactggacatgttacttctggtcaaggtcttccataaattatttttcctccaaagtgatcacctctcctgtatttaccttctttagcgctaacgctggtgctgctataaggtatgtacacacttaatcatagaatattccatttaacaaattgcttctgggcacttggtacacatgaggcattgctcaaggctaatgatgcacaatgtgatatccagggacgaagaagttccaggacaattacatgcagattcactactgccaagtcccttcgctggaaggaaagagcacaattcatttctgtttagagattctggggtgtcagatccacgaacaagtcttatttagaatgactgcctttttttactttaagattccatgctacagtctgaactcaggtgtttgtggctacgcccctaaaacttcagtcctatttgggattttaaatacgcaacctaatgaaaagtcaattaagagttttacagttaaactccatatatagatactgctctttcaaagccagaggcagaatctgagcaggcttagtcattacagggctagaaacataaaaattatttgtcttcaggtaggcatttattcaatgcacccctgctacccactgtgtgctaggtaacagcatgactgagacagtgtctttgttctcaatggcccaagttctagggaggggcccagacatgggaacaggcaatgaccttgtggtgttgcatgagttatgaagttacgacacggaagcactgggtgccgtggaagctcagggtgggggtaactaagccagttgggaggcaccccagagctttcccagaagaagcaacattcccaccaaacatcacagggcttaggtggaactagggcctgctgaacagggggaaagaaggtggggagggggctttcctaaccaaaggtaatagtagggtgaggggggagaggtttaaaaaaaagaccagggagccttttggaaagtggggcagtaaagagtaaacaaatcagagtaataaaaagaacttgggtttctgaagcaccaactatgtaccaggctaagtactctacacagattatctcatctgaatctataagaatcctattgggatctttttttctttgaggcggagtctcgctttgtcgcccaggctggagtgcagcggcgccatctcggctcactgcaagctgcgcctcccaggttcgcgccattctcctgcctcagtctcccgagtagctgggactacaggcgcccgccactgcgcctggctaatttttttgtatttttagtacagacagggtttcaccgtgttagccaggatggtctcaatctcctgacctcgtgacctgcctgcttcggcctcccaaagtgctaggattacaggcgtgagccaccgtgcccggctgggatcattttttagtgtaactatattccaggcaatacttgtgttgaaatagagacagacagacacacacacacataataataattattatttttgagacagagtctcgctctgttgcacaggcgggagtacagaggcacaaatcttggctccctacaacctccacctcctgggttcaagtgattctcttgcctcagcctcccaagtagctgggattacaggagcctgtcaccatgcccagctaatttttgtacttttagtagaggcagggtttcaccatgttggccaggctagtctcgaactcctgacctcaagtgatctgctcacctccgcctctcaaagtgctgtgattacaggcgtgagccactgcacccgacttgttcctatatttttcttatcaaatttacccttcgtaaactcaagtcccatctgggttaacccagtctgactccagagctggtgttttcagctaagaatgggaaagactacactgtctcctggtcagcaccaccagtagatacagcaagaactctgtcaggggaagagaagagagctacagttagctccatgaatttcaatgttgagatacaagattatgacttcaggtccaatcccttaagcagtgagtcagcttggccacgtttttcttgatgtgatatctatcacactggcaacaatcaaaaactgtagattggccaggcgcagtggcttatgtctgtaatcctagcactttggcaggccaaggcgggcggatcatttgaggtcaggagttcgagaccagcttggccaacatggtgaaaccttgtctctattaaaaatacaaaaactagctgggcctggtggcaggtgcctatagtcccagctacttgagaggctgaggctggaggatcacttgaacctgggaggccgaggttgtagtgagccgaaattgtgccactgcattgcagcctgggtgacagagcaagactctgtcttaaaaaaaaaaaaaaaaaaagaaagaaaaaaaaggtgttgataatacgatttgttggtgagagcatggggatacagggattctcttatatggctggctgggatgtaaatggtttcttttattcaaatctgaaaatgcacattcagctgggagcggtggctcacgcctgtaattccaacaccttgggaggctgaggtgggcagatcacttgaggtcaggagttcaagaccagcctggccaatatggtgaaaccctgtctctactaaaaatacaaaaaatagctgggcgtagtggcatgcaccaataatagcagctatttggtaggctgaggcaggagaatcatttgaacccaggaggggtaggttgcagtgagctgagatccttccactgcactccagcctgggtggcagcgcaagattcttaagcaaaaaagtttcacgggctaatagtttcatgtggctggggaggcctcacaatcatggcagaaggtgaaaggcatgtcttacatggcggcaggcaagggagaatgagaaccaagagaaaagggaaaaaccccttataaaaccatcagatctcctgagacttattcactaccataagaacagtatggactgggaggctgaggtgggcggatcacaaggtcaggagatcgagaccatcctggctaacacggtgaaaccccgactctactaaaaacacaaaaaattagccaggtgcggtggcgggcgcctgtagtcccagctactcgggaagctgaggcaggagaatggcgtgaacccaggaggcggagcttgcagtgagccgagatagcgccactgcatgctggcctgggcgaaagagcgagactgcgtctcaaaaaaaaaaaaaaaagaacagtatggaggaaaccgcccccatgattcaattatgtccacctagcaccacctccttgacacgtggggattatgcaaatatgcctagaaatgtctcttggaaagatacccaagaaactggatgtggtctccaggagcgaagacggaaagattgacttaccatgtccttatataccttacctatatataggatttgatttttccctccatacgcacaaatgaccttaaaaattaaacacctttaggccaggcgcggtcactcacgcctgtaatcccagcactttggaaggccaaggcatgtggatcacctgagatcaggagttcaagaccagcctggccaacacggcaaaagcctgtctctactaaaaatacaaaaattagccgggcgtggtggcacagtcctgtaagtcccagctactctggagggtgaggcaggagaattgcttgaacccaggaggcagaggttgcagtgagctgagatcatgccactgtactccagcctaggcgacaagagcaaaactccatcacagaaaaaaaaaaaatttaaacacctatataaatacgtgtacgttaattatatgtccattacactatgtgcacacacacacacacatacacacacacctatctgtttttatcaggccattattaaaactgaacaaaactggatgacttcatatagttctggacaggcctagacaggagagcacagatgccttcacaccgatcctgtcttcccgagagagatacgctcttggtttggtgagtgtgtggcaatggttttctccccaggagatggcaccccagataaatcaatcagagcagtgtgggaccaggcctttttcagccttggagaaagaagcctttgccctaaaaatacaaaagtgtcagcttctcttctgtgttctttgtagctgtacctgaaaccaagcacctgtttgtgacttggcttcagttactagcaagcttttcctaaagaggtgttcaaatcccgcacaccaaaggatttgtgcttcagtgaaggaaacttcttgttttctgtacctttacctttgatattaacaaagtgttttattattttatttattatttattttgagactgagtcttgctctattgcccaggctggagtgcactggcgcaatcttggctcactgaaacctctgcctcctggattcaagcgattctcctgactcagcctcctgagtatctggtactacaggtgtgcaccaccacacttggctaatttttgtatttttagtggagacagggtttcaccatgttggccaggctggttgacctcaggtgatctgcccgtcttggccttcaaaagtgctgggattacaggcgtgcgccatcgtgcccagcccaaactgttttattttatacaaattctgtgcaaagcttagtttacagctcaacacaaataaacaaaattatatgttattaggataaaaatcccatgcccaattcatttatccctcagttaaactgttttggcatgggggactaaaagtaaacaagatttggaatgtccctaggatggctatgaatggcatgttgccatagtatttcagaagccactggtaaagccctagatggataggatgagctcttggccacaaagcttttcttaggattttaatatactacaatttatcgtttactgggaacccaggtggagtgacttcatttccaagaacataggtgtccacgttaccacgattatttttttcagattaaggctctatcttctgaagggaaaatgaccactatgcttcactgaaagtccatctcaatcagaaagacaggcagataccacggaaacttagtacttacctgccaagcccaagacatcaagatgatacacattttgtgtttctctctgagggtaaaagaagaaggaaactgctgcaaagtaccaaggaatataacccggttataaaacagacagaacgagaaacaaatggcaaacccaagtgttgaccttcccattcaaccagaccacccctctgcttgctggaactaggagtagagaaaaaatacaaaaaaaggaggccggggctgggcaggatggcttacgcctgtaatgccagcactttgggaggctgaggcaggcgcatctcctgaggtcaggagttccagaccagcctgaccaacatggtgaaacctcgtccctactaaaaataaaaaaattagccgggcatggtagcgggcacctgtagtcccagctacttgtgaggctgtggcgggagaatccacttgaacctgggagacgaaggttgcagtgagccaagatcacaccactgcactctagcctgggtgacagagcaagattccgtcttaaaaaaaaaaaaaaggcaaaataaataaataaataaataacaaccagaccatcccagccagcaatatgcagagctgctaagattctactagcaaataatttttaaaaaccaaccacctctgagaccttcaaaatattttctctccgctatggaggttgtctaaataacagattctgtgaatagacttcaactgtgttatgaatccatttactgtcttagtaagaatgtttttttttcccagcaagaacaagcaaaccaatgttctctgaggcaaacagacaagaaaagatgctgcttagttaaagaaaataagacctcgctaatccctattccctgaaggcacggcaactcaaaggagaactgatgatgatacactcagccactgctggaaaattttaaattaaatagcaggacaaccttagtaagcggagaaacagtcaggtgatgtaacaggccactaatggagccttttactcattcggggtggcagcgagtggacttcccagctcaatataagcagcagccaaaagaacaacaaaatcaatatcgccctcaggtaagtagatgccgagcagttagttgcaaaccaaatgatttctccagctgaggcaggctgcagggcagccagacgaatgacagtttgcaatgaggaagaatttcctgctggaaagactgctgccatactttgtcaaatcctttcccagctgggcgcggtggctcacgcctgtaatcccagcactttgggaggccaaggaaagcggatcgctggagccccagagttcagaccagcctgggcaacacggcgagaccctgtctctacaaaaatacaaaaattagttaggtgtggtggtgtgcacctgtagtcccagcgtgaggcaggaggctcacctgagcctggggaggtcaagtctgcagtgagctgtcattgcaccactggactccaacctggatgacagaatgaagccctgtctcaagaaaaaaaaatcccttcccaccagcatagtttcctcagcctgccctggctttcaggggtttctttctcccagggattctagccactggctttcccacggaccccaaggctgggtggtgcagtaagatgcaggctccagtgtattttcattgcacaataaagatgctcagtagatgtgtgtgggttggtctaatgtgaaatgagctgagggcagaaattaacaggaagacatcgggatacccacttcttgactctcctcacccctatttcaggagtgggttatcagcggggctctctcagaatccttcctcatcagtccaggctttctgatgagaacaggagggtcggcaacgtctccacccggctcccatctaacttccgtatgtgcgcacacacaccgcacatgcacacgcatgtacacaatgcacacatatagtgcacacatacacatgcacacagggtgtcattcctttgtcttctatagcctcttcccctaacagagcagtgggcgagccttaggcaattacaggtgtgacttctggcttactgcaatctgtgaagctgcaatgggcaggatatgcctgttctggatgaactatgtccctgaaaattcctatttgaagtcctgaccccagtacctcatcatatgactgcaactggacacggggtctccaacaaggtaagtaagttaaagtgaggtcgttagggtgagccttagttcagcctgactggagttgttataagacaaggggattaatgagaacacagctgcagagaggaagaccatgtgaggatacagggagaagtcggccatctgcaaggcaaggagagaggcctcggaaggaatcgatctaccaacactttggtctcaggcttccagcttccagaacggtgagaaagcaaatttctgctgtgtatacccccaatcctgtggtccttccagccttacagaaaaggaattcactcccagggagggacgacagtgaggtgtggtcggagcagctgtgcttctcttacctgaagcctcctgatgctctgggagaaggaatgctctttggaaaattctgccagctgccatgggataggacgtgggtttgtagcatgcctcacttctccccactggtttctgcccatgccactgcctccaccacacggggaaaagctgccatccacccagctgcctgactcagagatctgatccctgaccactcccttcctgccaccctcatacccagccaccaccatgtcttggggatcacacttcccaaacgtctctcaagcccttcatggtgcatggtttcctttgcctaaatcagagcatacttccccaaataacttgtgatgtatgcaaaccaccccccactccggcccccaggttccctctggggcttcctccaggtcaggaatgacaaggaaggggtcacagacacctcctgtgttcacagtggtggcggcctggatggcagacaagaagaggcatgctcagtgctaagacgtccccgaactcacagactctgggggtcccactgacttactacccaggtcctaccccagtgagctcaccctctgtcctctgcttcaattcctcacacactttacccatccctcttgccttgcagaactggcaagagcacactccttctcccggggctacagctcactgccggggaaacaataacctcctgaccagcctgtcacttccatgagtggcccgtgcaatccattatcgcgcagctgccagcagtggctctttcagctgtcaccagcctggcctcttccaatcacaaacggcttacagcttcccgcactcatctcatcttcagatcccttatcccactgacaccttacatcatcccttccctggtgctgtagatggacttgtggtatcttatgcaagagatccttctggaaaaccttgcccatttcaaggcttgaacatttcaagactaattctgcaacagaagggtgtatttccgttaccagctgaagtgtccatgccattttgcaagagaatggaaagcgttttgcatctactcattaccagctctgaaatgacacgattctttttctttttttttgagacggagtgtcactctgtcacccagactagagtgcagtggcgtgatctcggctcaccgcaagctcagcctctcgggttcacgccattctcctgcctcagcctcccgagtagctgggactacaggcacctgccaccacgcccggctaattttttgtatttttagtagagacggggttgcactgtgttagccaggatagtctcgatctcctgacctcgtgatccacctgccttggcctcccaaagtgctgggattacaggtgtgacttactgcgcctggccaacatgattctttttgttttgtttgagatggagtcttactctgtcacccaggctagagtgcagtgtggtgtgatctcagctcactgcagcatctgcctctcaggttcaagtgattctcgtgcctcagcctcccaagtagctgggattacaggcatgtgccaccacacctggctaatttttgtatttttagtagagatgggggttttgccatgttggccagggtggtctcgaactcctgacctcaagtgatctggctaactgtaatcccaaagtgttgggattacaggcataagccactgtgcccagccaacatgattcttgacaagtgtttactttgaagggacttgtaagtgaagatcacttacaagataggcttttatttttttcacactactttggattcacgcagcatcaatccctttattccaccacaaccatttacggatgagaaaactgaggcttagtgcagtcatatggggagaggggagggaggaatgaggactcagggttcagctgcagggggtccagcacagccacagaaggtcagcctgggaactgatttgtcaaaaggaccacaggtagagacggggggaagtgtggagacctcgtgttcaaatctctctcagtgaccactagctgtaatcttgtgtgccacaatgaatgaaaacacgtcttagatatctttagcgagtgcttccatctgccagggcaccaaggccaagtatttcacatatatttcatcttgacaatacctctgtcactttgacaccacctcttacctagctgtgtgctgtcttaatttctctaggtataaagcagcaataggtcagctacagtggctcatgcctataatcccagcactgaggctggggaggctgaggcaggaggatggcttgagcccaggagttcaagaccagccagggcaacatagggagatcccatctctaaaaaagaaaaaatcattttttttttatgagatgaagtctcactctgtcgcccaagctggagtgcaatggcacaatcttggcttaccacaacctctgcctcctgggttcaaacgatcctcctgcctcagcctcccgagtagctgggattacaggtgcacgtcaccatgcccagataatttttgtatttttagtagagatggggtatcactgtgttggccaagctggtcttgaactcctgacctcgtgatttgcccgcctcagcctcccaaagtgctgggataacaggtgtgagccactgcacccagcccttttttttttttttttttttaatacagagtctcactctgttgcccaggctggagtgcagtggggtgatctcagctcactacaatctctacctcctgggttcaagcgattctcctacctcagcctcccaagtagctgagaccacaggcacatatcaccacacccagctaatttttgaatttttagtagagacggggtttcaccctgttgggcaggctggtcttgaactcctgacctcaagtgatctgcccacctcggcctctcaaagtgctaggattacaggcgtaagccactgcaccaggcctacaaaaaatttaaaaattagccaggtgtggtggggcatgcctgtggttccagctactcgggaggctgaggtgggaggatggcttgaacgcaggatgttgaggctgcagttagctgtgttggcaccactgtactccagcctgggtgacagagcaagaccctgtctcaaaataaataaataaataaataaaataaaaataaagcagcaatagtgtactttatcttcaaagaatagaggaaaaaaatggtgttagtgtacggggctaggtgcctgggagagggtggtgaatgggatgctcaccatgcctgtgaagctcagaatgtgcacatgaggcttatgccagagctgtcaggggaaggacgctgcccctcatttctaaggaccatcctcacagcacctgtcaaggaaccgttgactaagtgatgatgaagagcaaataactctcgcaggctttagaccatatacaactggagccctgcgttggccacattcagttcagtagagtacaaccaaatgtgtgtccagtatagaggggttttagacactgttggaatgtctccagtttaattatccagataggcattctggctggtggcaacaggcattctggctggtggcgacagggaaaacagtaacactcaatgatcaaatcccagaggttatcaaggaggtccctagaactgtaggggagagtctggatatcaaagccttttgtttctttgtttgttgagatacaatcttgctctgctgcccaggctggagtgcagtggcatgaccataattcactacagactcgacctcctgggatcaagccatcctcccacctcagcctctcgagtagctgagaccacaggcgtataccaccacatctggctaattgttaaaagttttgtagagatggggtctatgttgctcaggttggtcttgaactcctgggcttgagtgatcctcacactttggcctcccaaagtgtagggattacaggcatgaaccaccatgcctgaccgaaagccatctgaattcaaacattttaatctgatggagtaatgttaattcctcaaataatgacaaggctatacaacttctgaatccatcataaccctgcactaaagaacattacaacacggacttatgaacacacagttcgtaaattatccccccttgcagcagccagtagtattaaaaagcaaagacaccagaattataacatactattattctcctacagtcatcttcaccttacaaatgtatggtatgcaaaaatttgttcataaactggctgcctggaatgcaactatgttttgtcatagagatcacgttataactgatggtgagatctcaggctaactcatacaaactgaattaattcacaatgcagatgaatacactaattcaacttcatttacaatcacgcttccttcccttgctgcatggtttactttcccagcgaaatatttgcaatttctgttattattgctggattttgtgtctttttccgcttttcaaaattgctcttatcagcaagtataaaaacctaactgctatttatacccacaggtgtaatagcaatgatcataagggaattcagtgtaagagaggggagaaatgtattacgtacagtaataagcatattaaatgcctttgattagagggtccgtagaggtataattatgtgattatctatactgagaaatactatttgttatattaatagaaataaaatatactgaattcgtagatttaggataacatatccctgatacataaaaaagcaaaagagatgaagaaaggattacaggttgcttataatcttgagatcccccgagaaagattgagaggagccaattacaatttgggtgtgaccaagtgaagcaaaacatttcctgagctgcccagaaagtcactctacagaataaatcatgaatatactagcgatcactcatgaaactcttaccacatggcaggcactgagcactttacttgcatgattgcaaccttcctagcctgttactctacaacaagatgctacattcctggctgaccaggtggctggggcctctccttgtgctaatactattttaatgagtacaacgacatcaaatgaagtgagctataaccagggaggagcagtgaggcctggccagttctgtgaggcaagagggttctgtgaggcgagaggcaaggcccaggagttcgagcccagcttgggcaacatacggagaccctgtctcttcaaaaagtgttcaaagaattgaagcagaggacaaacggtgagctcactggggcgggacctggatagtaagtgaatgggaccccctgtctgtgagcttaggagcatcttggcactaagtatacttgttctctgctggtgaggtcaccatcactggaaacatgggtgtctgtgagtcctccttgcaatttctgatctgcctgtcaccatctctgtgctggaggaagccccagagggagccctggggtgagaggtgtggagagtccagcatatatcattagttctttgggaaaacctgatctgacatccaactcaggtctctagaagttcagctgtgcctcctagccctggcataccctaaccaaaatagtgaagatggctccaagggccaggggaatacctgggacccagggatattattaatattacaaggttaatttggggacattacaaggtttaaggttaagacgtttttatttgcctggacttgaagaacgtgatcagcttaaatgtccatataattgtatacaaagatttttgcaaactcaagaaaaaaacatttaagagaaagcatcccacagactgtaccttcagtttgaactgtttattaatcattctatctaataaagatgtggaatcagaatcgtgttgtcatcttgttggcaatgcagactgcagaaaacgacgtctggagtactggtgagaggcggaggcattaaaattttgtttttataaagccactgagcagaaatgactcagaggaaacacaagggtattctgtctggggagactgagagagctaaaaagccatcttaaagtcataataaaggtttccagttaaatatagtagattgaaaacacattcagctttgttccttccacaaatcccactgtaaaggcaggaaactctcaaggacaaacaggagagaacagccacagaatttggaaactggaaagtacatggacaagtagcaatgggcttagctgagttattattgcttcttttgagatgggagtctcactctgttgccgaggctggagtacagcggcgtgaccacagctcactgcaacctcaacctcctgggctcaagttatcctcccagctcagcctcccaaggttctgggactatagacacatgccaccatgcctggctgattttcaaattttgtgtagagatggggccttgctatgttgcccaggctggtttcaaactcttggcctgaagcaatcctcttgccttagcctcccgagttgctgggattacacgtgtgagccaccacggccagctaattttttttaaaatttttttggagagaaagggtcttcctatgttgccctggctagtcttgaactatgagcctcaagcaatcctcccaccttggcctcccaaagtgttcggattacaggtgtaagccactgtgccaagctgcagctgacttagtttaagttaaatattcagctggcagcgagaaaagtcaagaatcaactggctttggaaaactctcaggcagtatttgccaaagacaaacccacatcttcccgatgacccagtaattccactccttggaatatacccagagaaatgagggtgttggtctattaaaagataggaaccagaatgctcttggcagctttattcacaatagcccccaagtagaaataacctagagatccattagcagtggagtgggtaaataatttgtgatctgttcattagatggtatactacatggctataacacagaaccaattgctgctacatgtaataacacagatgaatctcagacatcacatacagcgaaagaagccagaagacacaagagtcaataccgcatgatttcatttttatgaagctcaagaacaagcaaacccaactagtcctggtgacagaacgttgactgacagagaaggcgcacgagggagccttctggagtctggcaaatgttccacatctcaactcgagtggtggggaaaggatgagttcacatgctccagctctttacttcacattacccgcattttagttcctgagaaacctcaatttttagctatccttgggtataggaataaaaagagagctaaaacagaaagatggcttgaaactgcatgaagcttgaccactgtccttctcaccctggcagaagatgggacttttagtctttataaagagtaaacaaaggtcccagcactttggaaggccaaggtgggaggatcacttgagcccaggagttcgagaccagcctgggcaacatatggagaccctgtctcttcaaaaaaaaaaattttttttttttttttgaggcagagtcttgctctgtctcccaggctggagtgcagtggcgcgatctcggctcactgcaagctccaccccccgggttcatgccattcccctgcctcagcctcccgagtagctgggaccacaggcacccgccaccacgcctggctgattttttgtattgttagtagagacggggtttcactgcattagaaaaattttttttaattaaaaaaaaaaaagagtaaacaaagaagttctgagaggcagcagagactgctggggcatgggtcccccggggaaaacaaggggataaagatgaaagttttaccctggatttcaggatggagtcttttccttccatttggctcctagaacacttagagcgaaagaagccaggcagagccctccaacaggagtggtctctggggaatctgagagccaaaaagaaacaaccaaaagccaccgataatacggaaatggggagccttcatcacgcgatggtgaaggccgtgggcgagaaggcctccctcccccgcatttgtcagtttttctgtgctgtactctttttcattcttttttttttttaaattgcacttttaaatggaagcaggcagccaaggaccattagatgtatgagcaatgtgtctaatatgaaaaaaaagaacaaaacaaccccaatggtaagaaacagaggcgatatggggaggaggaaaaaaaaaaccattagcaggctgggtgtggtggctcacgcttgtaatactagcactttgggaggccaaggtgggtggatcacctgaggtcaggtgttggagaccagcctggccaaaagggcaaaacccggtctctactaaaaatacaaaaagtagctgggcgtagtggcacacgcctgtaatcccagctactcaggaggctggggcagtagaatcgcctggggggcagaggttgcagtgagccgaaatcgcactccagcctggatgacaaacgtgaaacccgtcaaaaaaaaaaaatcattagcattctcagacagagaagatactgcattaatcaaccaattacaggatgctattttgaaaaggaataatgaaaaaaaaaaaagctcttgaaaattaaaactatggtagcaaaaatgaaaagctcggtagaaggcttagaagataaggtgaggaatcatctcaaaaagtagagtgagcaaggaagtgaaaaaaaaaaaaggaaataatatttgaggaccagaacaagaggtccaatatttgtagactatgagtaccacagtataggggagctcccctgcccacacacaacacacacacacacaaacacacaaacacacacacacacagatggagagagagagagagagagagagacagagagagaggatgaaataattcaaaaggacttccgagaacaaaagggcatgagtttaaacggactcataccaaagtccctcacagtattattgtagaaccctggatgcaaagagaagatcctatgtgtttctggtttcatataaaagatcaacaatcaaaataaaattgaacttcttaaaatccatactgaaagaacaaaggcaaggagacaaagccttcaaaattctgagagaaaaataactcctcacctatcattctatacccagccaaactatcaaactatcactttaatgtgagggtggaatgaagacatttttggtgcaatttcttctccagaagctactggacaataggatccatctaaaaaggaggcaaaggtagatccaacatgagagagaagcacagatggttcctagactagacacagaaatcctaagatcacagctgttagcaggcctacagagcaagcaatcaggaaatagctccaggagaaatttcaccaaaaagctgagattggttattattttaaatttattgacgggaaattggtaagctcagacttttggaagaagagtctgaggttgaattagcactcttcaaaaacttaaagcaattttaaaaccacaacaaataaagcatgcaggaaaaataaccatgcctacaatgtggctctgttgtgaatgatgtttaaaataacatatgtacaggcaagatattataaatactaaatgctgatacgacccgaattaggaattttttttttttttttttgagacagagtcttgtactgtcacccaggctggaatgcagtggcacaatctcggctcactgcaacctctgcctcccagattcgagagattctcatgcctcagtctcctgagtagttaggattacaggcgcccgccaccacattcggctaatttttgtatttttagtagagacagggtttcagcatgttggccaggctggtcttgaacttgtgacctcaggtgatccgcccgccttggcctcccaaagtgctgggattacaggtgtgaggcactgcatgcagccaaccaaattaggatttaacgacactggaaagacacggggaagaaatgtgggagtgggatggagagaaggacagagctaaatcctcattctccaggacacaaattcaatacataacagtaagtaagatctagaaacatcaacacaagcatgttgtttagaacaatggaagtgaatatccacaaaattagctcaactcacgagggtggctgcctctagaagtgagcaacaggccaatgaggagttgtgcactgctgctttgtaaaacttgctgggtacagctacttgacttcttaatctgcatgcatttataacgtgaataaagacagaaaacaaaatgaaaaaaaaactaaatcataacctcgtttttgcttcctataaaacagcaattccataacctgtagaaagcattacacaattaattgcttctagttggcaataattacaggacaataatttgtctttgtctctgttttcaaattacacgttttttttttttttttttttttttttttttgagacgagtcatgctctgtcacccaggctggagtgcagtggcacgatctcgggtcactgcaacctctgcttcccgggttcaagcgattctcctgcctccgccttccaagttgctgggattacaagcatgcaccaccatgcccagctaatttttgtatatttagtagaaacggggctttgcgatgttggccagcctgatctcgaactcctggcctcaagtgatctgcccacctcggcctcctgaagtgctggaattacaggcatgagtcactgcacctggccacacaataattttttttttttgtttttgagacggagtctcgctcttgtcgcccaggctggagtgcagtggtgctatctcagctcactgcaagctccgcctcctgggttcacaccattctcctgcctcagcctcccaagtagctgggactacgggcgccagccactgtccccggctaattttctggatttttagtagagacggggtttcaccgtgttagccaggatggtcttgatctcctgacctcatgatccgcccacgtcggcctcccaaagtgctgggaataattttttaactagcaaataattttcctcttccccaaaggtatttaaatgtctggcctcaggatgtggttccactcccctatgagtctacagggttcccatggcatcactcatcagagagatgagtcctctcatggtctccccacaggaacacaggacaccatgaatcaggacttgcaccccacaaaaatcacaatccaagtgcaagcctcgaggaacacagggatgaacctgggtcaggtggtaaagggatcctgtcttacctagcactccccagctctcccatgcccatcaccagactgcagagaccaggcaaggcagggaggctcaagacagatcttgggtcaaagccagggcaatagggtgaaccccaccaacaggcagagaagcagccgggagtactatctggagggtcaccagcagcagagagctagggaaggcttgtgttgccactgtcccaagtgcacggatgtccaggtgatatcgggtacaaattcccttttatggacctgaaaatctgctcccaacatactccatggaccaatgattatttttgcctttctcttgggaaaagagaatgggatgagtagactatgacaataaagtattttgcaccaagatccaatggccccttccccaaaaatatatatattttttttagatggagtcttgctctgttgcccaggctagagcacagtggcatgatctcggctcactgcaaactccacctcctgggttcaactgattctcccgccttagcgttccgcctcagcctcctgagtagatgggattacaggcgcacattaccgtccctggctaatttttgtatttttattacaggcgaggtttcaccatgttggccaggctggcctcaaactcttgacctcaagtgatcagcccaccttgcatcccaaagtgctgggattacaggcacgagccaccgtgcctggcaccctaaagataaattacacttagtgtaacaatatgtataactataccacctgcttcataggattgttatgaagattcagtaagttcgtctctgcaaagagcttagaacaatgcctggaacacagcaagccctatataaatgttagttattacaaataaaataaatcaggggaagagaacatgacttgtttgcaaaggtgccgtgagaagtctctctctgtccagacattatgctcacatgctgtttaaatgttttgcatgagactaaaaagaggcctgcatccccagtgccccagtaaggaaagaaagttatatttaaactgcccctaatggtggaagagggttacacctggagaccattatgggccgtcactttagtccagtgcataaagggatcaggtcacctcccacctaggaagcaagatcccctgggccctggagcctgacggagcttggtgcctggcacttctgtattctgttctgactttgtaagggtgagcagggcatggggcagtccttatatctagggaagcttgggccttcagaggagccccaaactcagaagtgggctgtagactgtgtagatcatatgcaagtattactaaactccatcagcagatgaagaaaaggttaaacacctttggattttttttttttttttgagatggagtctcactctgatgcccaggctggagtgcaatggcatgatcttggctcactgcaacctccacctcccaggttcgagtgattctcatacctcccgggtagctaagattacaggcacataccaccatgcctggctaatttttgtatttttagtagagacaggttttgccatgttggctaggctggtctcaagctcctggcctcatgtgatctacctgcctcggcctcccaaagggctgggattataggtgtgagccaccgcacctggcctggattttggctttcattgtctggaaacttctagctgttgtgttgaagggaatcaaagtaaattctagcccatagaagtgaatacaaagaaaagggaggaggagagacttagattcagtattcttccatttgcttaaccattatttacagaatgctaggcaatctaaacactaagattctaggcactaagaatacaacaaaagtgtctgccttcatggagcttatgttttaatggagaaagatggatgatcagtgcagctaataggtaaagcaggcagtatattagatggtgctaagtgttacggagggaaaccaagtgggaaggcagtggggaggggaagagctgcaactctaaaatcagagatcatcagatgggtgcggtggctcacccctgtaatcccagcaccttgggaggcccaggtgggtggatcacttgaggtcaggagtttcagaccagcctggctaacatggtaaaaccctgtctctactaaaaatacaaaaattagctgggtgcgatggcgcacacctgcagtcccagctactcaggaggctgaggcaggagaatctcttgaacccgggaggtggaggttgcagtgagctgagattgtgccattgcactccagtctgggcgagagagtgagaccatgtctcaaaaaaataataataataataataaaaaaaatcagagatcatttcaatgaaaaggtaacatttgagcaacaacttgaaggtgtagggcaacaaagatctgaaggacaagcaggcagtccaaattcatgggaagaaggagaagaagggagagcaggcagagggaacagtgtgtaggaagagggaacagaatgtgaaaaggacacagaggaaccaaaaagcaccccttacaggtggggcccagagtgacaggagatacagcaggcagggccagatcaggcagagccttgtggttcccatgcagggacctgtctggattctcagagcaaccggcagcccctggagggttttaagcaggcaagggcatactcagggctgagcgtttgaataacctctctggctacaatgcttttattggccacaatattttggaagactgaagttaacacatggtctgagcagcttactcttgcccccctgaagaattctaggaactgtgtgaggctgcagtggtcagaggggctgctgagccatgagaagaaaagggacactggagctgcgcagcaaaagggctctgaggtcgccagagtggctgccagataaggaacagtgggagggagcggctggagggaacatttgagcaattttctctctctcttcttggtcttcttggcattcatcttccctgtgtcaggggacccctgcctgcaaaaccgaggaatccggtcattttttaaagtataaaaattgccagcatcctgttctaccaggacaaagtcatcatggaaatgataatgactgacgccttcctggggataagtggttaacacggtacccgacgcaggtagagggcctgttggcagatgcgtcgtggcttggattattctttctttagaaaatgttaagaattcatgtatccgggagataatccgaatgtgcatcacgagaagagcagcccagtaaaggattgttgtgttcttaatgaaaggacattacgcagccgttcacaatgatgcttgtaataataaggaggttgttgatattatatgaaaaattgcagcacacaaaaccgcaaataatgtaggaactcagctatgcaaaaaaaatttttaaaaattaggaaggaaatatgccaacaatgttaatagttattacctctgggtggtacagaattacgagtgattttcctctcttcttccaaaatgtcttttgattgcatatctattacttttataatcacacacacacactcgcgcacacacacacacctgcttattattaaaaaaaatgttgcagagatgaaatgtctctgaatattttagttcacaaatgtgtaactgtaagctgtggacatgaatacagatgaccactgattcatttattcagaagcaagaatgctgagatttttcaggaataagaaagtaaaagcaaaatctcctagcaaagtgccttacctacttaaacaggaaaaaaattattcaaattatttagagagtttatgggtatggactaacctctgggtaatttagtagcctaccatacaaggtcctgctaaaaattataaccctactcataaaacgaatgtcatctagttaggccccaaatataaaatcaccccaaattacagattcaatatattttgttcagttgcaatattattagcaaactgttttgccaaaacatgtttaatgtagcagctaaaccctggcaggctaatgatcattacctcctggtagagaaaagttaaatgaaggagttttcctactctgatcccaggatcagcagtgcttgctcagggaggttagcaccacacggtgaagggtgagtgggtttgggagggaggcggctttcgcattgagtcttgggtctgctgcttaccgagctgtgtaaccttaagtaaggtattgattcttcctgagattgtttctaatcccaaaataaaaatagtagcgcctcactggacagaatggtcatgagaataagaaagtgtgcatgtagaataagtagtagagagactggcttgccctggacactaaatgaatggataaatgaatggacaaacagtccaagcaagtgagttttttctacctgtccattaataccaaagtgctggccaggcacagtggctcacgcctgtaatcacagcactttgggaggctgaggcgggtggatcacctgaggtcaggagttcaagaccaggttggccaacatggtgaaactctgtctctactaaaaatacaaaatattagttgggcatggtggcaggcgcctgtaatcccagctactcaggaggctgaggcaggagaatcacttgaacctgggaggcggaggttacagtgagccaagatcacaccattgccctccagtctggacaacaagagcaaaactccatttcaaaaaaaaaagtgcttgttcgagtaaacactggggctgcaagagtggggcagattgctacgagtaggctaacctctctctcatttcctcctttttctcccatttttgcctctagtatagaggatgccaaagcaacaacatggttcgcagcctcctctctagttagaggtggccaagtggcaaggagacatgaggagaaattggctgggggattccagggaaacttttggtttcttgataaaagggttaggtgtcagtggtactgcctcccttcctgccttcttctcttaaacagtgaggtgatggctgggctacagcagccattttgcaaccatgaggaaaataacaagaaattggcagagacactggtcatgacagtgtaaaccaaataagtcaatggtcggagctgcctagccttgttattatgtggaaagaaagacgaaagaaagaaaagaaaagaaaagaaaagaaaaggaaggagaaaagaaaaaaagaaaggaaagaaaggaaaggaaggaaaggaaggaaaggaaagaaaggaaagaaagagcgagccagccctgctttatttaagatactttttaggccgggcgcagtggctcatggctgtaatcccagcattttgggaggctgaggtgggcgggtacctgaggtcaggagttcaacaccagcctggccaacatggtgaaaccccatctctacaaaaatacaaaaattagccgggcatgacggcaggcacctgtagtcccagctactcaggaggctgaggtgggagaatctcttgaacctgggaggcagaggttgcagtgagcagagattgcaccactgcacaccaacctgggcaacagaacgagactctgcctcaaaaaaaaaaaaaaaagctactttttaaaaacccgtagccaaaagtattcctagtgcataccaatcatgactaattaggtctggtccttgcactcatggagtttaccgtctactggggatgaggacaatagaagggcctcacagctaaatgtcaaattagaatatattattagcgttacaaagaagggagtgcttggcccactcctttatatagcaggggttttcagccagctgcaggggcaagggcagctttcctcagtgggtgatgagaatgctgggggagcaggggtgaaggagagaatccctagcagagtgaacagcaggtgcaaggccctgtggcaggaaaggagagcacagagtgtgagaatctgtcagaaggttagaaagcccctggtccgggagggtgctgctgggctgctgcaccatgtcccctactgctttcagctcccaatactgggtggcttgttacctgcaggcaaacactctcctaagtgatccaccagctttcccggctgatcacaagagaaaaggatgagtccacaactatttaacaggcttagcaagtcatttaatccacatctctaaggagccagcattgcactagataacagtgccctttctaaaacaggaaaactgcccgacatagcaatataatggggcccaattatgacaaaatatcatagtaactccaggccaactaggatagtacttaaaatatagtgggcaggacggcagagagagtaaatcatcagaaagaatggttctgcctcataaatggcaccagagacactcagaatggtttcacatcagacttttaaaaatcagcagaaaaaaataaatcctcctctggctgccctttttttttttttttttgtagaataaatgaaccgagacagacttgtttatcgagagctgaggaggctcacatgtgagtggagagagatgtcagagtcattagcggtgataaagggacgccattcactgtgggtatgatttaaggcaggaagctcaaccaagagcagtttttgcaatgggcctgatgatttgctttcccccagtggggaaggaattagatggacaccattaatctgttcacacaggccatcagagaaaaatcatggttgaagagtaggttgggtacatgaatttctatgggacagaagcccctttatggacaaatgagacatctgttagggtttgatgagatggctcacagttaactgcgctacactttgcactttccagtatatgatggtaatcaccatagtctatgtgcgtgcctctctcctctcaaagacaacagtatttaaaacactgcaaaactgacctggcgtggtggttcacgcccgtaatcccagttctttgggaggccgaggcaggtggatcacttgaggtcaggagttcgaaaccaggagttcgaaaccagcatcgccaacatggtgaaatcctgtctctactaaaaatacaaaaaattagcagggcttcgtggcacatgactgtaatcccaatgacttgggaggatgaggcgggacaatcgcttgaacctgggagggggaggtcacagtgagtcgagatcagaccactgcactccagcctaggtgacagaacaaggctccgtttcagaaaataaaataaaataaataaataaataaaatactgcaaaaatagatatattcttacaaatacatgaatagagaaatatgtggaaatgaccatgatactcagagaaacggcattttacataactacagacctgtctttaacacactgtaatcacataaccaataataagctattacctaaagaaacactctacaagtaaaagcaactggttgcatagcgtgacatgttagaaatcacacaggcaggtatgaggagcccgtgaaataactgtgggattttaaactatcggacaagatgaggaaggtagaaaattcctaactaaacatattaaaggaattacaaatgttccaagatgataaaaagataatgattgccaaccttaaatagatatgggaaaatttatttcactcattgcaaaaacataaaatctatctgctcaaaagagttaccgctgaatgcctgccaccttcctccaaaccaccgtggagctttcactgttcctttcctatggtgatcaatgaccatttattgggtgatacaggatatgcaccctgcactgaaaaatcaggggtagtagatggatgttcagatgaagacatgaatgttcaagggtagttcagaacattgcccaatagctgcttctcagttattttattatcagtggggaaacgacagttgttggggatcccaaagatcacccccagattgaactgtttgttaggaggactcacaggaccccgcatattgtcatactcctggctgtgatttatctcagcaaaaggacaaaaaacgagatcagcaaagggactggaggcgtgggacgaatacacagggaaccaggcaccagtttcctctcccagtgcagtcacacaggatgtgctaactcctccagcaataagctgtgacaacatgtgtggcattttgtctatgggtcatgagtgacccagcacccagggctgttgttgaagctggtcacttaggcagcctctgtccaacatatacccaaattccagactcccagaaggaaaggtgggtgttcagcatacaccacattataggaaccaccccaaaatccaggttctcagatgcacgccaagtgctagccttgtgaatggggccttttgaagggtaagtctcaggacttctctgctagtgaagtcttttctgcacagaaagactattcaaaaaatggaaatggggccactggcataaccaagtggaaaaaaaatgaaataaaattgtgatccttatccccaccacacaaaagccaatcccaaataaattaaatataaaacaccttttcagctcttaaaagaaaatacagtagactatctttatgacctcaggataaagaacgatttcttaaacaagaccctaaaatgcaccggtcataaagaaaatggacaaagtggactacgttaaaacttaaaaattctgttcattgaaacaatgtaatttttaaaatgaaaagaaaaatctaagaaaagatagcagcaactgatataagttgataagggattaacctgtaaatacacaaagtactctaagttaccaagaaaaagtcatttatctcaatggaacaaacaggctgagatgaacagagaatgcagagaaatggaaatccacgtgctcagaaaacatacgaaagacactcggctgagcacggtggctcacacctgtaattccagcactttaggaggtcaaggcaggtggatcacttgagcccaggagtttgagagcagtctgggcagcacgatgaaaccccatctctacaaaaaaatacaaacattacccaggagtggtggctcacacctgtggtctcagctacttgggaggctgaggtgggaggttcacgtgagccagggcgacagagcaagaccctgtctcaaacaacaaacaaaaaccaaaaagaaagaaagaaagatgtggctgggcgtggtggctcacacctgtaatctcagcactttgggaggctgaggcgggtggatcacgaggtcaggagattgagaccatcctggctaacatggtgaaaccctgtctctactaaaaatacaaaaaattagccgggcgtggtggcaggtgcctgttgtcccagctatttgggaggctgaggcaggagaatggcgtgaacccaggaggcggagcttgcagtgagattgtgccactgcactccagcctgggcgacagagcaagactctgtgaaagagagagagagagagagagagagagaaagcaagcaagcaagcaagcaagcaagcaagcaagcaagcaagcaagctcaacttctctaagaattataaaaaggaaattaataccacagtgaggacttatttcttcttctagccaaggaggaggaacacacactgggtttaccctcctgcctggaagaattaaaaaactggacaagaaacacgaagccacagtacttgagacatggactagcaggctacggcagccagtgacccgtaagagacaggacgctagtgagacaggccctacaggcgtcggactgcaggatttctaggccatgctacagagaggggaacacaggaagggtctgacagtctccctgagatgagaaaatagagctgggagtgcaggcatcaaagcattaagagtttgaaggacagaagccaggcgtggtgactcacacctgtaatcccagtactttgggaggccgaggcaggcagactgcttgagctcacaagttcaagaccagcctcctgggcaacatggcaaaacaccatctccacaaaaaatacaaaaataagccaggcatcgtggcacatgcctataatcccagctacttggaaggctgagagtatgggaggatgacttgagcccaggaggttgaggttgcagtgagctgagatcacactactgaactccagccttgggcaatagagccagaccttgtctcaaaaatacaaaagtaaaaataacagattagacactacaaaaggaaagatcaatgaacttaaaggcagtccaaaaggaaatatagagggggaaaagagacaaaaacagtaacaaacactctcggagtatcagtgagctgtgggacaacttcaagcaggctaataagtgtgcaacagaaatccctcaaacagaggtggggacagaaaaaatacgtgaagaaaggcgggctgaaatctcttcaaatatgatgcgagttatgaattcacagactaagaacctcaatgaactctgaatgaaagaaacataaagaagacccagcaatcccattaccaggtacatacccagaggaatataaagcattctaccataaagtcacatgcatgcgaatgtgcactgcagcactgttcacaatagaaaagacatggagtcaacctaaatgcccaccaacgacagattggataaagaaaatgtggtccatatacaccatggaacactacacagctataaaaaaaggaacgagatcatgtcttttgcaggaacatgggtggaactggaggctattatctttagcaaattaacccaggaacagaaaaccaaataccgcatgttctcacttataagtgggaattaaatgataagaacttatgtgtacaaagaaggaaacaacagacactggggtccgcttaaggcgggagggtgggaggagagagaggagcagaaaagataaccattgggtactgagctgaatacctgggtgatgtcataatatgtatagcaaacctgttactgtggaagttaaaatatgcaacaatagcacaagttacctatgtaataaaccttcacatgtatccctaaacctaaaataaagatgaaaaacagaagaaacataaaatgacaccaaggcatattataatcaaattgcttaaaaccaacgataaagagaaaatctgaaaagcagccagacagaaaaaacacattatacagaggaaaaggtaagaattgtagcagtttcttcttggaagtactgcaagccagaagaaaaaaaaaaatttaggtactgaaaaatcaatacaaaacaaaattgtcacgctacaattctatgtcccggcagggtgtggtggctcacgcctgtaatcccaacactttgggagactgaggtgggcagatcacctgaagtcaggagttcgagaccagcctggccaacatggaaaaacctcgtctctactaaaaatacaaaaatgacctgggtgtggtggcacacacctgtaatcccagctacttgggaggctgaagcaggaaaattgcttgagccttggaggcagagttacagtgagctgagagtgtaccactgcactcccgcctaggcgacagagcaagactctgactcaaaaaaaaaaaaaaaaaaaaaattcgatgtccagtgagacaaactttccaaaacaaaggtaacataaaaactttcacagacatcctgaaaaagtacatcatcagcagcctggggctggttacaaaaagaagggttaaaggaaggctggaagcagaagaaagccaataccagatgcggctctggatctagacaaaggcacgaagcccaccagaaatggcaactatgtgggcaaacacagaatcctttttttttcttataatttaaatttctttgaaaggaaattgtctttgtaaaagaaaaaaaatcacgacagcatatggcagggtttttagcatttatttgtggaagtaaaatatgtgacacccatagcacaaagcacaggaatggaggaatgggtgtctattgttatcagggtcttatgtaatacgcaaagtggggtgatatcgcttgcaggtggactgtgagaagttaaagatgtacactgtgcacgctaatgcaacctcgaaaatgctacaataaagggttatagctaatgggccaggtggaactcaagtgggatcaggaaaaataatctaaaagaagtgaggaaaagaggaaaaaggggaacagacaacatatagaaaaatgggaagtagtgttacaactcttttggaatccaggctttccagagtttactcccaaaaaataaaaaaaaaattaaaaaaaaaaagaagaagaatgggaaataaatggcaacatggtaggtttgaattctaccaatagaaatatcaataaggccgggcatggtggctcatgtctgtaatcccagcattttgggagactgaggtgggcggattgcttgagcccaggaatataagaccagcctgggcaacatggcaaaatcccacctctctataaaaagtacacaaatttgccaggcacaatgactggcatctgtagtcccagctactcaggaggctgaggtaggaggattgattgagcctgacagggtgatgctgcagggagccatgattgcaccactgcattccagcctggacgaaaagggggactctgttttaaaaataaataaataaataaataaataaataaataaataatcacattccatagaaaaggaaaaaaatccctctataggcacatcatactgaaaaatcactcatggaaaaatacatcacctgaatagccttgtagctattaaataaattaaatgtgtaaaaacctacacacaacgaaaactccaggcccatgttgcctgtctggtctcaaactcctgggctcaggcaatctgcccgcctcagcctcccaaagtgctagaattacaggcatgagccaccgcgcccggccttaacgaggaaactttgggcgtgacacgtgcactcattattgtgattgtagtttcacaggtatatacatatgtcaacatttattaaattgcacacttcaaacgtgtgcagttcattgcatgttaaatataacatataacccaataaagctactgaaaaactgttcactgtgtgcgcatttttaaatgtctgccaattatatctccataaacctaaaagaggaacaccacgcagtgcccgtctcacacccaagagactggtcaaaattagaagcccaacaactgaaagtgtcggtgaggaaacagccagtggacattcgcacacatttctgctatgcgtataaattaacataccatttcgtagacaaaatctagcaatatcctggaatgctgaagtgattattccagaatctcttgcatatgggcacagtaacaaaggagaaagctcactcatagtggcataatttgtggtagcaaaaggctgaaaacaacctatgcccaaacacagcacaatggttaactaaattgtgttatactcatatatggtaatactctacaacaatgaaaataaatgaactagaatgatccatatgaatgatccatatgaatacagaaggctttctaacatacagggaaacaaatctgtaaaagaaaatatgtgagatacgataccatttacacacagtttaaaaacatgtgaaataagcttatatatttctgaggaatacatacaaatattaaaagcatacctcagagatattgcagattcagttccaggccacgacaataaagtatctcaataaagcaagtcacacaaattctttggtttcccagtgcatataaaagttatatttacactccgctgtagtctattaagtatgcaagactggccgggcgcggtggctcatgcctgtaatcccagcactttggaaggctgaggtgggcggatcatgaggtcaagagttctagaccagcctgaccaacatggtgaaactctgtctctattaaaaataaaaaattagccggttgtggtggtgcacgcctataatcccagctactcaggaggctgaggtaggagaatcacttgaacccaggaggcagaggctgcagtgagcagagatctcaccactgaactccagcctggacaacagagcgagactccatctcaaaaaaaaaaaaaagtatgcaatagcattatgtctaaaaaaaatacataccttaattaaaaatactttattgctaaaaaaaaaaatgctagcaatcatctgagccttcagtgaatcacaatctttttgctagtagagggccttgccttgatgttcatgacctctgactgatgaggacgctagctgctgaaaggtggggtggctggggcaatttcttaaaataagacaaccatgaagttgtctgtatcaactgactcttccttccatgaaagatttctctgtagcatgtaaagctgttttgtttaatagcatttcatctacagaatgtccttccaaattgcagtgaattatctgaaacaatgccactgcattgtgagtttatggaatactctaaattctttgttgtcatttcagcaatgttcgcagcatcttcaccaagagtagattccatcccaataaaccactctctttcttcattccataagacgcaactcctcatctgttcaagttttgatcatgagattgcaattcagtcacatcttcagactccacttttaattccagctgtcttgctatctctaccacatctgcagttctgtcttctactgaagtcttaaacccttcgaagtcatccatgatgactggaatcgacttcttccaaactcctgttaatgttaatattttaacctcctcccacgaatcacaaattttgtttgtttgtttgttttagatggagtctcactctacacccaggctagagtgtagtggtgcaatctcagctcactgcaacctccgcctcccaggttcaagtgattctcctctcagcctcccaagtagcttgaattacaggcatccgccaccatacctggctaatttttgtatttttagtagagacgggggatttcatcatgttgaccaggctggtcttgaacccctgacctcaaatgagctgcctgccttgggcttccaaagtgctgggattacatgcatgaggcaccgcgcctggcagaatcacgaatgttcttaatggcatctagaatggtgaatcctttccagaaggttttcagtttactttgcccagatccatccaaggagtcactatctatggcagctacagctttatgaaacgtatttcttaaatacattaaacgtttctgttgtggagatggcttctttccttaaacctcgtgaaccttagactttggcttaagggaatgttgtggctggtttgatcttccatcccgaccactaaaactttctccatatcagcaataaggctgtttcactttcttatcatttatgtgtttagaggaatcgctagcacttgttagtttcctttaagaacttttcctttgcaaccacaacctggctgtttggcacaagaagcctagctttcagcctctctcagtttctgacatacctttctcactaagcttaatcatttctagctttctatttaaggcaaaggatgtatgactcttcctttcatttgaacgcttagaagccagtatagggttagtaagtgacctaatttcattattagtgtgattcaggaaataaggaggccccaaaagagggagagagacagggaaatggccactcagtggagcagtcagaacacacccatttatctattatatttgccaccttaaatggacatggtttgtggcaccccagaatgatcacaccatcaaagatcaccgatcacagatcaccataacagatatagtaaagaagaaaaagttcaaaatattgcaagaattaccaagatgtaagaatatgctgttgaaaaaatgatgctaacagaggccgggcgcagtggctcacgcctatagtcccagtactttgggaggctgaggtgggcggatcacttgcggtcaggagtttaagaccagccaggccaacatggtgaaatcctgtctctactaaaagtacaaaaattagccaggcgtggtgcctcatgtctataccagctactcgggaggctgaggcaggagaaatccttgaacttgagaggtggaggttgcagcgagccaagactgtgccactgcactccagcctgggtgacagagcaagactctgtctcaaaaaaggaaaaacaaacaaacaaacaacaacaacaaaaaaaacagaaaaaatgatgctggatgcatggttgccacaaaccttcaatatgtaaaaaaacacagtatctataaagtacaatcaagagaagcccaataaaataaggtatgcctgtaataaaaatatagagagatacaatcaaaaacccaaaactcttaaagataatacttacctctggagggaagcagaggaatgttctcagggagaggtggctaccttcctatctaataacccttctttttgttggcagcaagtgttccagcagagtgttcttaaggaaattaacagtgctactccagtaaacacacaaatgataggaaagtgaaacagccttatggctgatatgaagaaagttttagtgatcaggatagaagatccaaccagccacaacatgaaaatatattacatttttcagtacaattctggtctctagagtaaaagtcattggatagacctccttgaaaagtccttttgctactgacctttcctccttcgtagaatacagatgtgatggctgcagctcctgcagccattttgtaagcacaaagacaacagccataccctaaagatgaaggagcagaaagctaggaagtcccgggtcccaggaacccatgtctccaaatgtctcattacctgagagaaaaataaactcttaacatatgccactgttctttgcattttcttgtcacatgcccttatccctaactaaaactggcacacaggaggcttaaataggactgataatgttttacttctgaagctggctagggatgcatgtgtatgcgttatattaatctttagactatttttggtgtttttttatgcttttcagtttttctaagatgctgaaacatttaaaacttaaaaagaaattgtagcccaatacctaatcctcagtaagattttcaggactcagtgataaaataaatgagaaatgtctgtgctaggaagctctgaataggaagtaaaaagcaagcttcctagagccaccaaagtcatagaattcaaacccagttttgtctgactccccaggtcaaagcatttcccactctatcccaaattactgagcacaactttgctttgaagattaaagcttcctcgtaataaactagttctggtttataaacttaaacacaatgagaatagagcagaggttaaagtgctgtttgaatataaaaaggctcctgctttctttaagaaagtctattaaaaaaacatcacaggctgtaactggattttggtgtgaaaagcatcttctggctcttaaaaagcctaattgatgttagtttatgacataaactggctcctgaatcactgttaggggtttaatgagttgtcatgcttgataagaaactcttatgttatctcctactctaccacacgaaatatggaagctttgtttaatcttgacagccctcacttaattctctctaacggccttctgttcaaccacagttgcctttagattgttgggaataaatcaatctgtgtcagctctgagtagatcaaatttattaaattctgaaaatcagttagaagtctatcctggcaggtaaacaaatgaataaaaagacagtatgtaatggtatgaaaatttatatatatagtatatatatttatattatatattatgtatatgtttatatattatatgatatataatatatatttatatatataaaatcttgcaaactaaaacacatgccaaaaatgaagtgctttcaaaaactgcaccagaataaaataaaaacaaagaaaaacatttggagctagtagaaattatctattaaaattcatctctggcaagacattacataacatatattaattagattatgtattatatactagctgtactatttattaatataatatataattacatattaataacattatataatatataaatatgtcaatatattaatgacatatatctatttccgcctctctagccataaactccaaactctcttgcctttcagattcataaactgaagaccgatagcaaaatgatgttcagttaagcaaattcaacatgtctgaaccttcataaattcggtatagtgtgaatttatgatctaaatttttttttactatcctattattctattcactgtgaaaaatatttctttgaaaagttactggatttctttacacactgctatggactgaatgtttgtgtcactcccaaattcgcatgttgaaatcctagcccccagtgatgctgtcctgcagtgtgatcctggcctcgggagacgtctgtccccagcagagctaatcacctttactctttgggtgaaattgaaactgataatattttgatgtcaacgcatctcattcaagagctgagctgtgaaatcctacgaagccatggcaggggtaggtcccgtgcgtgccccaaaaccaagaaagccaggctttggcaaaggaacaaacaaaagcagcagcagcagcagagaacagaaggccatgcggtcccagtgatggcaaaagtcactgatcgccacccttcctggtcagatggccacctttcctggtcactgatctccatgcctagaccctcccctcctcctccaggtctgactactcttcctgtccctggattctcaatcttcccaagtctcaacaaccccagccacctcatacattcataaattcccccttcctcagaatccatgtgtctacccgccctcctgcccctaatgtgaacacacttcccgttttccacagggagcctgtggttctttatttggttcttctccctacaggagccccctctcatttatttttttaacgtctccctttcataaagtgtagctttctgaggttatccaatcctatctggtgaccgatccaggaaaagaggaaatgaagctggccctcctgtgtggcttggggagaacctaggtaagaatgacaggctgggtaatgaatggcagctctggttgcttgcaagggtgatcctggtcattgcatcacgagaaagtcagtctcacgggggtcttggtagccctcctttccagctgacagccctctgaggctctgcacgcagagtttttcatttctttgtacaccattgctttttcaggtagaagaaaacagagacgcttagtccctaaactgcatctcagtgatggaggggcacactcgggttcactgtggcttttgaacccacccatttgagggtttagaggctctgtttgatgacagatgaaataatattgattttaaaaccagctccacctctagaacatttcgacagagtgttttcaagccaaaccaaacaccagatgaagccctcttagttcaaggcaactttatttcaccagcagctgcttgttagctgtggatctgctgtggtgaacacacacaggggcgcctgtctttccccatcatgagacgggccccccatgctaaaagcagtcacatttaatacactcagggaaggggggcccaatttctaaacctgatgtctacaaatctgattaaacaaattaaaggggcatgtgcacattataagcaggttcttcatcttacaaaagcatccagtgcagagtccctctaaggtcctcctgcatagtctatttataaaaatccaatttcacaggaccttctccacagctgacaggcagaggccaaaagggagaataccagcttttctttggccccacaatggacccaactgaaaaaaatgttaaagtgtagcataggcaggtgctgtggctcacacctgtaatcccagcactttgggaggccaaggcgggaggatcacctgaaaccaggagttcgagaccagcctgggcgacacagtgagacctctgtctctattaaaattaaaaaaaaaattctttaaattaggccggcatggtggtgtgtacttgtagtcccagctattcaggagctgaggtgggaggatggcttgagcacaggagttagaagctgtagtgagccgtgactacagcactgcactctagcctgggcaacagagagatctgttgtacaaaaaatgtgtagctagcagaaaaaggtaagtcagattcactggaaaacatctgctcccaggaagctgcaggcaaatgtggcttattcaagactaaggtgaacagtttcctcctggacataaagtggcaaaaatggggtcaaatcatctctgatgggtcccttctggcattggaattgcatcatttttatgacgagcataccagtgatgctcatgtattaatcactgacattctctcagggtaaccttctcacaagcatacagtatgcattcttttttttttttttttttgagacaaggtctccctctgttgcccaggctgcagttcagtggcacgatcatagctcactgcagccttgacctcccaggctcaagcaatcctcctacctcagcctcctgagtagctgggactacaggtgcatgccaccatgcctggctaatttttgtattttttgtagagatggggtctcactatgtggctgaggctggtgtatgaactcctggcctcaagcaatcctcccacctcagcctctcaacatgctaggattacaggcatgaactaccacaccctgcctcaatatgtatctttatgtgtctacttgttaggatgttagggcatttttgtgatagatataaatactttccagaaggctaatacgcatacaataaagttaatttactcatttgcttcatcataggaaaacagctagacacattcagcaaatttagaagatatgtttgggacagcgtcatgtgaaatccaagttatgtggcatatatgaaatttgcatggcaggggcgtggtgggggcactctgcaagatgcctcaaagaatcagaagttgctgggtacggtggctcacgcctgtaaacccagcactttgggaggtcaaggcgggcggatcacctgaggtcaggagatgaccatcctggctaacacggtgaaaacctgtctccaataaaaacacaaaaaattagccgggcgtggtcgcgggcacctgtagtcccagctactcgggaggctgaggcaggagaatggcgtgaacccaggaggcggagcttgcagtgagccaagatcgcgctactgcactccagcctgggcaacagagcgaaactccgtcaaaaaaaacaaaaaaaaatcggaagttggttcagctctaggccagctgaaactcatataatgacacgtccacaagactggcaatttgggaaggacacgctgtccatactgagaagctgtggatgtagtcagttatcgtcttaaataagagtctcaaactgaaattcacaagggcaaaatgctgcaaattatgggagtgatctgcaacaatgctgcatctcacgtgggcagttccacgcaaactactctggggctgtggcagcagagatgcatttaagaacagtgagccaggtgcggtggctcatgtctgtaattccagcattctgtgaggctgaggagggaggaccacttgaggtcagttcgagaccagctggctaacatggcaaaaccctgtgtctactaaaaatacaaaaaaattagctgggtgtgatggcacaggcatggtggagcacacctgtcatcccagttacttgggaggctgaggcacgagaatcacttgaacccaggaggcagaggttgcagtgagccgagataccactgcaccccagcctgggcaacagagcaagactctgtctaaaaaattaaaaaaataaaattaaaacagtgagtgattcccttgacacatgccaggaaagccagccagcaaaatgataaatcagacaaaactaagcaattaagggtccctatggaagtttatgataccaatttaacccttgagatcaaagttatagacacctacagtgctctcccaaaagtgtttccccctagagagtattaaacatccatgttaaatgatgtcaacaactttccacatcttacttctaaaatttttagattcaatcccgtgaaaaaacgtttatcttcacaaactagaatcagggtaagtaaggtaggaccctattatagcacctcgaggtgaccaactaagttatagcacctcgaggatgaccaactaagttacagcaccttgagggtgaccaactaagttacagcacctcgagggtgaccaattaagttatagcacctcgagggtgaccaactaagttatagcacctcgagggtgaccaacaaagttatagcccagggctgaggggtttcccaggatgtgggacttttcagtgctaaaaccagaacagtcctgggcaaaccaggctggttggtcaccctaatttggaagaagacagattccaaagcataactacaagcattactacaaatttgaagggcccaatataatgcagtcggcctacagggtttgcctaccagaactgcacagggggatcttacttacatggggaaaataaaacccacaaaattgaatgtctctactggcttccctttgaatgttttgtattttacagatagagcctcagatcctgggcatcgatattccacatggatcctgtttgtacctcttgtattcacaccggggaaactgcaaagggaagactgctaagtaatgtaagggggcccgtgcctgcacaaattcttcctagcaggcacactgggggccttagcagcgtatgtgttgtgagcgagtaacactttgcatccgcaacggacttcatgcctttcagacaatctgccagaccagtcctaatggcaaccttttaaaaaaggatgacaagtccttctagcaggctgtcacatgttgccagattaaaacattgtgtaattatttacaggagacggtggggtgtcagatcatttggctggaaagaccatgtttccaaataaatttgagagatagctacagctgctctaaaacagagcaaaatatatggcaacaaaaggaagaagaacacattattgaggcaaatcatgcaattaagtatccactctttgtcatagggcattttggctgtccctgcttctccaggcaagcttttggaatattctgaataagagctggagagtcaaagaaagagaaaacaaagcccctttctatctcccatacttttccttcctgcaggaaaagggacacagtaccatgcagttgaacaccatgtcaagtgaggataaaggaaaacagccatgacatcactccattactgccacccccagtgtgcctcacaggccctgcaatttataatcttgtttaatcctccaagcaaccgaggaatacagatatcatcgcccctgctgtacagataaggaagcagaggctcattggggtccaggagcatgcctgtggacaaatagctcctaaatgacattgagttttaaacccaatctccaaaaagcctgtatgttttgagcgcctatgatgtgtcatcagacagtgaggcaggtacttgggatacaatcagataaatggcagagaacctatccaagaagcccacaagctggaagcgaatacaagaaacgccatcactcatagccatgacaattactgagtgcctgtcacatgcctggcattgttcccattcatgacttcagttcagcctcccaccagcccactgaccaaggcactattttccatgatgtcttcactttctgactttaaaacccagactcttcaccattagatcatgtgcctgagatcaatggcaagagatgaaagcctggccaaagcactgtgttaataaagtaggctgattatacagtttactacaagtagaaggaattgccacaaactggtacttctggagcagtgttcaggaagaaggcaggaactgcagctgaatctagtaataagacacgatgatgatgatgatgatgacagcaatgacaacagcaacaacaaaaatagaggctgggtgtggtggctcatgcttgtaattccagcactctgggaggcagaggcaggaggatcgcttgagcccaggagtctgagaccagtctgggcaacacggcaagaccccatccctacaaaaaattttaaaattagctggacatggtggcatgtatctgcagtcccagctactcagggggctagggtagcaggatcacttgagcccaagaagtagaggctacagtgaggtatgatcacaccactgcactccagcttgggcaacagacgaagactctgtctctaaaaaaaaaaaaaaaaaaaaaaagacaaaaaaaaagtgctagagaaccagatttaaagcagaagcagtccggaaatcacatgcaaaactgctcccagggagaaacgcaagcccaggcacagagccccgcttgatggcaggtgctggacaataacaatgctgggatccccgcctctgctgccactttcctcaccagcatggatcctgccctctcctttgtgtcactcactaaaggctcaaagtctggttcaaggtgagtctgagtactagggcctgggatacatgcctgtgtcctaactgcaaagaaagcagagaggccatcaggccatctagctttcatcatgcaggtggtttataccacaaagcaggtgaatatattcaaggggtgatacggtttgtctctgtgttctcacctaaatctcatctcaaattgtaacccccgtgtgtcaagggagggacctggtgggaagtgattggatcatggggtcggggggtggtgtggttaccccatgctgttctcatgacagtgcgtgagttctcacaagacctgatggtttaaaagtgttgggcagttgccccttgtgctctctctcctgacgccttgtgaaaaaggtgcttgcttctcctttgccttccatcttgactgtaagtttcctgaggctccccagccatgtggaactgtgagacaattaaacccgtatcaggtggtatccttatatcagtgtgaaaacagactaatactggggcaaactctccaaaagtcagaagggaataccaaagtactgggaggtcagaaaggacaaatggacaaccactgaaagctccttgttctgtcttttctaaatgaagtcatccttccaatggcagctgtgggttccacgtctgtggattcaactgctgattgaaaatattcagaaaaaaaattccgtgatgtttcaaaaagcagaacttgaacttgctgtgtgctgagtatgacgctgaatccgtaagaataaagtgatgtgtagcactgtattgggtacaggtaatctatagatgatttagagtatacaggagagtgtgcataggttatatgcaaataccacactattttatatcagggacctgaggactggtggatcttggtatccttgggagggtcctggaaccaatcctccatggataccaaaggatgatgataattgattgctaactttgcccttcacaggtagaaacaattttacgtgtctcagaaagaacaaagagtttaagatggtgatgctgagattctggacaagatggacatggtgatctctactggaatccggggactgctgtactacggtcatatactactgctgggggcctggtgttcccggggtgcactgggggccttgctgtactgatatggtcatatgctactgggggcctgctgttgctgaggtacattgtcagcaggcctaggcatcgaaaatgacacaactgtctcctgttcagaagcacttagaatctcctgcatcgtgtaacaagtgtttagagatccctagatcagggactctggggacagtttttaatttactgataagtaaagttttaaaatgtgacatctttgagtactgctgccctagtctattaaacaaagagaagcaattcccaggccaggatcatcctactaacccaaacctgataatgctgatgtggcccagggctggcaggatggcctggactgtaactaggcatcccctgcttccatttgcagacatgtggctttgccctgatggagacatagtgacagatcattttgtactacgtaggtacagatccaaagggcatcttaggctggctgtcattaagttccagtgaggaacacctgtcttcttcagttcctgtttctccagtttgcatgcagcctcagcccatcagaaggcagcggataagagttcccccttggatggctttaagttggcaaacaggggtagaaaagaggccaagctgcgtggtggcaggcacctgtaatcccagctacttgggaggccgaggcaggagaattgcttgaacccgggtggcggaggttgcagtgagccgagattgcgccaccgcactccagcctgggagacagagccagactctgtctcaaaaaaaaaaaaaaaaagaaaaagaaaaagaaaaaaaaagaaaagaaaagaggagaagttctgagtttctgagatgggctggaagcacatggtcactacccatcagctgggcggtgctgggcaagttgtttgacctgacagtttggtcatctgcaaaaagggataaaagtacaactatttcataataaaacagcaatctttgtggctctatactatgacgagtactattatttacattagtaacaagctcttctcaatttctagtagccgcttaggtttacccaatgataatgaatcaatcaggaaaaatggtgtccctgtgaagagactagttaaccagaaataaataaaagctatggataccagcaatggaactacactagtaaaatcgcttcctattttccaaaagtttgggcttaatcttcagacaacatgttctggataaaaaatgtgagccagggacagtggctcatagtataataccaacactttgggaggccgaggcgggcggatcacttgaaatcaggagttcgagaccagcttggccaacatggcaaaaccttacctctactaaaaatacaaaaagtagccgggcatggtggcacgtgcctgtaattccagctactcactcgggaggctgaggcatgagaatcacttgaacacatgaggtggaggttgcagtgagctgagattgcaccactgtactccagcctaggcagcaaagcaagactctgtctccaaaaaaaaaaaagtgaacaatgtcagcaccataggaaaggtaaattttttttttaaatgggaacaatggaaagaagagttacagtcttaaaataaacatatcctcggctaattgagaggacagcctggggtctgcccaagggcagggaactgggcctccctcttctgcttagtcccctgggacttaaatttccacattaaaaatactctctcatttatttttacttctttgtcgggggaagagggtaacgccacggagatggtgaattcaatttcttggaccactagggatattatttagtaatggaggtaaaaatatgatattgtactagttatgctgtatgtcagggcaagaatctaatttccactttccttaatgttatcatctgaataaagtgattcaaattaatcaacaatctgcttctaagaatttatctcatagtataataaaaagtagtagcagtagatagataaaatgtggtatatccatatggtagaatattattcaacaacagctacaacatggataaaccctgaaaacatcatggtaagtgaaagaagtcgatcccaaggcgccgcatactgtatatttcatttatatgaaatatccagaataggcaaatctacacacggacagtggattagtggctgcctagggctggagtcggaggtgaagggaaatagggaatgacagctaacagggacggagtttctttctgggttgataaaaatgttttgttttgttttgagacagtgttccactctgtcctccaggctggagtgcagtggcacaatatcagctaactgcaacctctgcctcctggactcaggcaatcctcccacctcagcctcccaagtggctgggactacaggtacacaccaccacacccagctaattaaaaaaaaaaaatttttgtagaaatgaagtcttgcgccgggcacggtggctcacgcctgtaatcccagcactttgggaggccaaggtgggtggatcacttgaagttgggagttcaagaccagcctggccaacatggtaaaaccccatctctattctaaaaaatacaaaaattagccgggtgtggtggtggatgcctgtaattccagctacttgggaggctgaggcaggagaattgcttaaacctgggaggcggagggtgcagtgagccgagatggtgccattgcactccagcctgggcaacaagagcaagactccaccttgaaaaaaaaaaaaaagaaatgaggtctcactatgttgcccaggctggtctcaaactcctgcgttcaggctatcctcccgaggcctgcctcagcctcccaaagtgctgggattacaggcatgagcccaccatggctcgccttggtaaaaatgttttaatactgattttggtgatcattacacaactcagcaaatacacaaaagaccaatgaatggaaatggatgagtggcatggtatggaattcaatctcaatagagtcattattaaaaatagaagtaatcgtagttattgggctgtattaaatgccagccaatattctaagcacttttatagattatttcatttaagtcttatgagaaacctatgatgcgagtaccattattatctgcattttacagataaggaaattcagctacagagagattagataacttgcccaaagctatttggccaggaaacaagagagccaggatctgaatttaagccatctgacatcacaggccagttctcaactgctgcccatgtacacaaacgtatggactccaggaggggccctgcagtgctggttctggcaggacttcggacacagtctgagcctcaaatactaaactggtgccaaagtaattgcagtttctgccattgaaagtaatggcaaaactgccattacttgagcaccaacctaatacaagctggtattttgtccactgaaaaaagtgaaacaaatctgcatatcctgctatggaaagaccaggacaacaacaaggtatttaaacattgtgtcttttttgctcccatttgcatttttttttttttttttacaaaaagctacacatgcaagtgtacccatacttgacaagtttccataatttttcatgaaaaagcattaactgtagctttctctgagaagcaggtcaatggtgacagggacattaaggttttttctggataccttttggtactgtttgattttaatttttttttttttcttttgagacagagtttcgctctgtcgcccaggccagagtgcagtggtgcgatctcagcttactgcaacctccacttcccaagttcaagcgattctcgtgcctcagcctcccaagtagctgcgataacatgcacatgccaccacacccagctaattcttgtattttttgtagagaggggtttcaccatgctggccaggctggtctcgaattcctgagctcaagtgatctgcccaccttggcctctcaaagtgctgagattacaggcgtgagccaccacacctggccaaatttttgaatttttttgtagagttggagttttgccatgttgcccaggctggtctcaaactcctgacctaagtgatccttctgcctcagcctcccaaagtgctgagattacaggcatgagccactgcgcctggcctgatttgaatttttaataaaccatgagcctggtgggagccacccagtcgtgctccagtttcaacggagccttctctaactcaaccacctcccaccctcttgggtatcacaggctcagagccaccattttgttttatttgtacctcttgatgcctcatgactctgcctgtctagcctgtaagtgtcctgaggacagacaccgtatttgtttcttgctaagcaggggcaaacacataggcagatcccctcggttcccatcagagaaacaaatgagtaaatgaattaaagtcaaacaacttgacctcacctgccagcctcaaggtcatgagcagtgactggtggaacagaagagtgtcacgctgtaaaccatgtctgtcatatgaactatgtccccgctagcactgggaacactgtgacctaagaagtctggagtggaactcaagtaaatgatttattcctttgattaaacacatttactttcatctagtcccagagaatttatggagccataatcccttccatctctaatgctgttcattatctcttcctaattaatgaaggtatgtaaattcattgatctaaaactttgcaggcataaacgttactcaggtagtgatccagccccacactgctaacagctcaagcttcatcacgttctaccagtttttaaattacacatgttatcagacaagattcatttaattttgcagctaacagctacagctgattatgctggctgctagatatttatagcaactcttgttgaatctgtactgttaacctgcttaggatataattaataaaagagatttaactgtctgacataataggcagctttgtatgatataaaatatgctttaatgtgctttcgggaaaaaaaacattaagaaaggtatattatccaagtgaaatttgttacattgctaccttgcagatcaatacaaaatttcttcacaagaatatttatggatgatgacagtggtatttcactcaaataatatataaagaaagaagggaatggtaaattttttctacaaaccaaataatacatattgaatagaacctaccatggctttccaataaactacttaggaactggggaaaaaccatacagaatttgaaacatgcaggtgactttctaaattctgggttcgcgaaatatatgtcctcacccgttctggcattcaaatgcgccattttccaacctctcattattttttttcattccacattctgatcacttgaccaattacctgataattgaacccctttgggatcatgctccttttcagtgcttcatttcgttgcagaaaataggcccatcaaggaggcaaaatgttctaactccaggaaatgagtgtttagagcaaaaacaatgaaaaagaagatgtaaataatccagtcagctaagcacaagctagaaagacactcgctttgtctatggcatgttgatttgccaggggattgtgcaaacttctgcagaaggcgttcattagctccagaaaaccccaaagggaggcagaggcgggtgcatcaccttaggtcaggagttcgagaccagcctggccaacatggtgaaaccccatctctacaaaaaaaatacaaatatatatatatatagagagagagagagagagagggagagagagagagagaaagagagagagagagagctgggtattgtattagtacatttttgtgctgctgataaagacatacctcagactgtgaaggaaaaggggtttaattggacttacagcttcacgtggctgggaggcagaaggcgtttcttacatgatggcagcaagagaaaaatgaggaagatgcaaaagcagaaacccctgataaaaccatcagatctcgtagtatgggggaaaccactcccataagtcaattatctcccactgggtccctcccacaacacatgggaattatggaagtacaattcaagatgagatgtgggtggggacacagagccaaaccatatcaggtgtggtggcgggcacctgtaatcccagctacttgggagactgaggcaggagaattgcttgaaccaggggggcgcaggttgcagtgagcagagatcacgccactgcactccagcctgggtgacggatcaagactccgtctcaaataaaaagaaaagcaaaaacagaaaactccaaggaagcacaggaggtaggctctaggactcttctgctcagagggctggtctggtgtctctgatcagactgccatagccgatttgcctaacggcctctacaatcatggtctgctatgagcgacagcattcccaggtgggagcagaacacaagagcattcagatcccaagtcattttggctccatggttgctcagaggtcctcatttttttttttgagtcatggagcctgtatcagtcatgtgctccagggaaccaataggagatacacagatatgtaagaggaggcttagtaagggaatgggttcacagggtcacaggggccaagaagtcacaccatctgccatatgtaagccgggggtttcattcagtctaaatccaaaggcctgagaatcagagaaactgatggtgttagtgctggtctgaatctaaaggtctgagaaccaggagtgccgatgtccaggggcaggagaaggtagacgtctcagctcaaacaggaggcaaattcatcttttctccatctttttgttctattcaaaccctcaatgcattggatgatgcctgcccaaaatagtgaaggcatatcttcttcattcagtcaccctcacgaacacacccagaaatcatgtcttctcagctatctgggcacctcctagcccagccaggcagacacgtaaactgaaccatcaccaggtccttgaaggatctgatgagagctgtggaccttctccccactgcagtccccagagcatcatcacgacctcaagcatctatgcaaacacactggactttgcagagctgacagggcccactggctggatgaagcccatccatggagctcacacccaggtaaagaaacctacgccgagaaattgccctactggggtgcagtggctcatgcctgtaatcccagcacttgggaggctgaggcaggcggatcatctgaggtcaggagtttgagaccagcctggccagcatggtgaaactccatctctactaaaatataaaaattagctgggtgtgggggtgggcacctgtagtcccagttacttgggagggtgaggcgagagaatcacttgaacccaggaggaaggttgcagtgagcagagatcgcgccactgcactccagcctgagcgacaaattgggactctgactcaaaaaacaaaaaacaaaaaaacccctgccctattggacactgtatgacttagtgccccagaaggaaagtttcataaaaattttctttaaagataagattttccaggaaaagctgaattcctcttagatacggataagatgttgtttctttgacaacctctctctggctgaaccttcaactgaattctatcaaccaaaaggactcttaagacctttctgtttcgccctgcggttttgtcttcctatatgaacttttattttctttggtcctgacatatttcttctctactgtgtgcttttgctcattttaagccttctcaaatgcttcactgaacaaataaataaggcgaggctctctgttttcactttttgatctaaacactggaacccagacggaaagattatgctttttatttttaacctaatcaaaaggcaactgttaactagtccctattattgagctcttgctacttcttttcattgaataatcaaatatccacacttttctagctacgattaagacttctggcctttaattaaaggtacagtttcaccattgagtttatattttggtcaattaaaatagccacatgttgaccatgaaaaggtacctccaaaaagtcaaagaacaagagtatgtgcgtatgtacacacaggtgtgggctcttattctggggccatggggatctggggttcatcctgtgaacttcgatgggaggaaaccagttttttcatgaacttctgatatttagcatttccttctattatgaagttagtagaaattacagaggtattaacaacccccttgaatttcacaccaacagagatcacatggattttttttcccatcacatcacacttgttgcagattaattcagggtatggtttaaactcactgccattttttctttttctttttttttttttttgagacggagtttcactcttgttgcccaggctgcagtgcagtggcacgatctcggctcactgcaacctccacctcctgggttcaagcgattctcctgcctcagactcccaagtagctgggattacaggcacatgcccccacacctggctaattttgtatttttagtagagacggggttttaccatgttggtcaggttggtcttgaactcctgacctcaagtgatccacccgcctcagcctccctaagtgctctgattacaggtatgagccactgtgcctggccttaaactcaactgctattttgaaactatgacagttattagctctgctattagactgtgttatataatagaccaacacatgaattattactatatccaataatttaaaaaatattttgataaccgtatttcaatagaattggtttcctcgaaaatcctaggaactttattttgtgtatttagaaatattattctgagatgggatccaggggcttcagcaacttgatgaaggaatccgaggcacaaaatgggttaagacgccgagacttggaataaaggactgacagcagccagtgtgtctcctctgccggactgccacgtagaaaatgctggcaggggtggaagggcgatcacacacctaatcagaaacaactttttaagtaatattcccagttccctaattagtcatataaggtaaattagttccaaccacttttaatcagcctcagcagaagggcggcattgtcactgattgcctggatgatttcaccgggctcatactggatgtgaaggagtgcaggagccagggggcttggctgattgctcccaggttactgctcagcattcgacccacacgcgacctgctggaaaatctgagcacagacagccccggcccattccagaggctggtgatatttcaactatggcatcactctcttgcacgcatagaactccctttttatgtttctctgtgttaaactgtagggtaaattgtctttaaatcctggcatttcttggagcctggtgtagacacttaaacataacaacgcaaggctaatgacacagctgcggaaataaacgtgatttaactgagcctctttaaaaacaaaaccaaacaaaacaaacagatcctactttaatatgaacaaaacggtttctgttcaatggaaatgttctgagtatctatgacatggtaggcggtgcaggaacttattgcttacatgaaagggatggaggctgttggctacaaataagagatagcatggaagaaaagtcctggtcagtccctgtccctgagagatgttccccagagaactgctaagagaacggcctggtgtgctctcagtgcaaatggcgctgaggcagattctaaacccaggcaaccctcttggacttcaagcctaaagaaatacttacctgactgtacaacagcacgtctgaggatgctcacagcagcactgttcaaattaactcccacctggcgttactgcaagattaaccaattatgaaatccccatccacagaacgcaatgcagttattaaaagcctcacatgtatgtacaaatgtaaggttttctagacagatggaaggagaaaaagtaaatcacacaacaatgtgcacagtatgatcacgtttgtatttaagaaaagcatgctgaccagggcgtggtggctcacacctgtaatcccagcattttgggaggccaagatgggtggatcacctgaggtcaggagtttgagaccagcctggccaacataacaaaactctctctactaaaaatacaaaaatcagccggtgtggtggcacacacacctgtagtcccagctactcgggagactgaggcaggagaatcgcttgaacccgggaggcagaggttgcagtgagccgagatcgcgccattgcactccagcctgggtgacagagtgaggctatatcaaggaaaggaaagggagggcagaaggaaaggaaagggagagaaggaaaggaaaggaaaggaaaggaagggggaggggcggggcggggctgggaaagggtgagcatgctgacattgatgcacacttttgaccacagtgaccccgagggaagcacttagggggtggtcaaagtttattttaaatatagattttaaatttacaaggagaatgtctctacatattacttgtagaatttaaaaatctaataaagtaacaataaaaagatccgtatctaccctcatttaaatcctacaggagactaggatgacaacaacaaaaaacacggagaacttcatgtttcaatatatctacatgtatctatattccttatttctaagtgaagcacagatttctgtctgtttcattcactaacacagcacaaacatctagaatagtgcctggtgcaaagtagactctcaatacagatttgttaaataaatgaattgactatttattcatgtgttccagaaaactgtactgggtgcctaccatgtgctggcttcttgctaaagatcacgggaaacaaactgtgaatcatttaaccagcattcactgaataccttccacgtgccttgcactgggcactaaatgaaagtacacaccaatacggacacacagacacacacacccccactgccctttaggaacttggaactaagcttgggagaaggcgaactagcagaggttggagcaatgagataaggccttttcctggccagagcctcaatcctggctttggttttcaaaattatgcctccgaggctttgcttattatggcctgtcttgtaccagaattatgttcatgggtttgtgtctgcccagctggaggaaaatgagtatcaaccttcctggattgtggaaccacagaaaaacaaagggctttattctttgcctgaagcccagcaaaccaaagcattctttgttcaatggctttatttcccaattctatacattcattacagaattagaaacctcccagtgggggtcaggcatggtggctcatgtatgtaatcccagaactttgggaggccaaggcaggtgcatcacctgaggtcaggagtttgagaccagcctggccaacatgcagaaaccttgtctctactaaaaatacaaaaattagctgggcttggtggtgcatgcctgtaatcccagctacttgggaggctgaggcaggagaattgcttgaacccgggaggcggaggttgcagtgagctgagatcgtaccgctgcactccagcctgggcaacagaacaagactctgtctgaaaaacaaaacaaaacaaaacaaaaaaaaacaaaattcctagtgaggaaggagtgttgatggtcatttggccatggctactgttatcaggaccttggtctaggccttgacatctaattgaaggtgaacagctaccaaactagatgaattagaagttttcaggtctcactggggcattttcctgatagaaaagcctaactcctttcatcagtaattctactttacttccccatagcatctcccattcttagacgcactctactgatttgcttcctctcctctccagacttttgcagccatatctgcacaaatccagcccttctttaccttgaagttcagacttttctacctaagtggattattctgctttatctatagcaaatatcacttttgtgcatgctccctctcctccatttgttggaatcatttctaaattcaattccattttcatattgagtctctttggtcccaatagaaatggtccccaaaattcaaatatcagatgtctgggacccttttaacttctgaaaatgcagttactgggcaatggatgtgcgaaagttaactcggggaatgacattaaatcagaaaagccttctgtttttagtgatgaaaagcttcttcatctataaatcccaaagtatcaactttgcagatccataagctcttatcccaaaccccctaggccagatctcatttgaaattccaagtttttctaactttagaatggtaagacaggtcatagaacacatattaaacaatacttcaagctgggactcgggcagtgccctgtaatgaaatccagtaatattttgttagcaaaacatatgaatatgctcactaaatattgggatcaataaagaccataaacagccctttgtcacttggaaggcagttttgccaccagcttagtttcaaacttaagaaaaaactcttagttttcagagctttctgaacttttgagatggtaggtaaggggttatgtacaagtgcaagacccaaacgaaagaagccattgtagctctcttaagcattctgcataaagacccttttaaagtatatatgtgtggccgttttcctgaacatcaaagggctattttggaagtcctgtaagaagaggtcatcctgcgttattcagtgttgtgtaaaaagcaaagcaaaacctacaaacttaaagcatttccctttaaatgctgagcatgtgtaagtctaaaggaataatggttctcctgatatacaccattatcagttaaaaggaatgttcacaaaccacttgcatacacacaagattacatttaatacattaaaaagtggccccgactcggcgtggtggctcatgcctgataagtccaacactttgggaggacgaggcaagcagatcacttccagccaggagttcaagaccagcctaggcaacatggtgaaaccccgtctctactaaacatactaaaattagccgggcatggtggtgcacacctgtaactccagctgctcgaggctgaggcatgagaattgcttgaacccgggaggtggaggctgcagtgagccgagatcatgacactgtacccagcctgggcgacagagtgaggctgtgcctcaaaaaataataaaaatacataaaaatacacaaataaataataaaataaaaagtgtctgtctcagccacccacgtgaacaatctgtggtgatttggcatcaccgcgattcctgactctcaatttacatgctaccagtaaacaatcattttgttacacctattcacacctaagtacttaacagtaaaaaatatgacacaccattaacacgggagaaaacagtgtgcccagggaaactaagcagcacagtggcatcactggaatacctgcctcagctgttcagcagcaacagatgacagcaggcttccagtctccacccacaatgctgcgttctgactcaaaggctcctgtgcactgtattttattttttcaggtgagaagaaacatcagaagcagttgagggaccagaaagtgagtccgccagggatgaggaggcattctgctagatggctttttaaaaatgttccctccaagctgggttcagtgactcaacacctataatcccagcactttgggaggcgaggagggcaatcacttgaggtcaggagttcaaccagcctggccaacaagatgaaaccccatctctactaaaattacaaaaattagccaggtgtggtggcaggcgcctgtaatcccagctactcaggagactgaggcaggagaatcacttgaacccgggaggcagaggttgcagtgagccgagatcatgccactgcactccagcctgggggacagagtgagactgtctcaaaaaaaaaaaaagttccctccagagtcatctgccttattaacaagggcttttgtcttagaaatctcttttattaactgacacaatttcttgatctgttatgaatgcatgctgttctagtccttcaaaagctcaccacacattgctatggtttaaatatttgtgtcctccaaaactcatgttgaaacgtaatccccagtgtggcagttctgagaggtggggcttttaagaggtggctggatcgtgagggccatgccctcatgaatggatgagtccattcatggattaatgaatgaatgagttagtggattaatgggttatcatgagagtgggacagggtgcttttttgtgtgttttttgtttgtttgtttgtttgagacagggtcttgctctgtcacccaggctggagtgcagtggcatgatcacggctcactgaagcttggactcccaggttcaagcaatcctctcgcctcagcctcccaagtagctgggtctacaggtgtgcaccaccatgcctggataattttctattttttgtatagacggggtttcactatgttgtccaggctagtctccaactcctgagctcaagcaatccacttgccttggcctcccaaagtgctgggattatagatgtgggtcactgccctgggctggtggctttttaagaagagcagagacccgagttagcacactcagccccctccccatgtgatgttctgtgccactttgagagtctgcagagagagtccccaccagcaagaaggccctcagctgatgtagccccttgaccttggacttctcagcctccataactgaaagaaataaatttcatttcttataaacgacccagttccagatattccattataagcaacagaaaacagactaagacacacattttcaccatgtcatctatgggtacttttcctgcagcactgccatcatcctcatcatcactactataggttgagtatctcttatgcaaaatgcttgggaccaaaggtgtagagttttccactatggtgtcatgtcagtgctcaaaaagtttcacattttgaagcatactggattttcagattagggatgctcaatctatcagtgcttcttgaacctcattgtccatacagttcatctgggaatcttgttaaaattctgattcagatccattaggtctgggcagggcagagattctacatctctaacagctccatctgctgctctgggcaccaccttctgtctgaccagccaggctgcaaaacgaagcgcacaaggtttggaaacagatgaacaagagttcccagtttacaagctgagtggccttgggaaaagcaattcactgctctgagccagtttccccatcaattaaaatggaaatagcaatgacacctcctttgcaagactgtaatgagtagataagatagtaacacagttcctggcagataacagaccctgaattccagtccctgccatctgcagtaggctgaacaatgtccctccagagatgttcgacatcctaactcctggaacttacaaatatgctaccttatatggcaaaaggggaatctgcagatgggattatgttaaggatcttgagatggaaacattatcctgggttatctggatggacctaatataatcaccaggatctttacaagaggaaagcaggagaatcagagtaacagaatatgagagggtggagcagaggtcagacgggagaaaaggtgcaatgctgctggctttgaaggcagaagaaggagcatgagccaagaaacgcagttggcctctagaagctggaacccctagaaggaacacaccgctgcaggttcttgttggacttctgacccctgggatggtaagagaactgtttgattccactaagttggtggtaatttgtgatagcaggaacaggaaactaacataccatcctttggaataatactgatatggttttgctgtggtctcactcaaatctcaacttgaattgtagctcccacaattcccacatgttgtggaagggacctggtgggaggtaactgaactgggggggttctttctcatgctgttgtcgtgactgtgaataagtctcacgagatctgatggttttgtaaagaggagtttccctgcacaagttctcttctctcttgtctgctgccatataagatgtgcctttcagctgggcgtggtggctcacgcctgtaatcacagcactttgggaggctgaggcaggtggatcacgaggtcaggagatcgagaccagcctggccaacatggtgaaatcccgtctctaccaaaaatacaaaaattagccgggtgtggtggtgtgtgcctgtagtcccagctactcaggaagctgaggcaggagaatcgcttgaacccaggaggcggaggttgcaatgagccaagatcatgccactgcactccagcctgggcaacagagtgagactccatctcaaaaaaaaagatgtgcctttcgccatctgccatgattgtgaggtctctccagccacgtggaactgtgaggcaattattctttttgcttataaattactcagtctgaaatttgtctttatcagcagcatgaaaacagactaatacaaatactaaagcaggcttgcctccctttacagaacagaggacttcccagggctacatcatcaactgaaactaagtcacagaatagttgcccaagtgcagctgaatacatgaagaactcttcaaggaaactttatatcaagggaagaattattcctgtattaactgtttttgtgtggttatgccaatttttaataaacagggatgaatgtatatgttagtaacaaactgttctaaaggctcaaaggaatctcttgcaccctaaaggtatcatcatgttctgatttgtcagcttcacacgtaattgctgaaatctaacaaggcttctggggacaaaaccagtgggtcgatacctcagcatcaggaggactgacaagagtaaccctaaattaagagtgaaggatgaaaatcaatgggtctcagtatttgcacaaatgttcacttgctacttacaatgtggcttaccccatagaggagctttataatagaataaaataccaagataacccaaaagatgcctgcaaaacaaaaatgtgtttcaaaactaaatggactttgtgtgaaacaaagaagcctgtaactcttaaggattttcctatgggcttggcaccaaggactcctcttcccatcacatttttgtgcttctctgccaagactctagttccacagaaagacctggtctcttgtctccaatattacatccatagcatctaacactgtaattggcacttagtttgcacacagacatttttgtggatgataagtactataatagatatttataagaaaaagcatattattactttcattaaaaaaaaaatgaaagttctttttttctattttcttttttttttttttttctttttttgagatgaagtcttgctctgtcactcaggctggaatgcagtggtgtagtcttggctcactggattctccaccgcctgggttcaagcaattctccttcctcaatctcccaagtagctgagatgacaggcccacgccaccatgctgagctaatttctgtatttttagtagtgatggggtttcaccatgttggccaggctggtctcgaactcctgacctcaagtgatccacccacctcggcctcccaaagtgctgggattacaggtgtgagccaccatgcctggcctttctccattttcaacttaaatccacttggcccaagatattttcttttcttttttctttctttctttctttttttttttttttttgagatggagtctcgctctgctgcccaggctggagtgctgtggtgcaatcttgctcattgcaacctccacctcctgggttcaagcgattctcctgcctcagccccccagagtagctgggatcacaggtgtacaccaccatgcccggctaatttttgtattttagtagagacggggtttcaccatgttggccaggctggtcttgaattcctgacctcaggtgatccgcccaccttggcgtcccaaagtactgggattgcaggtgtcagccactgtgcctggccagggccaagatactatttatggtagaactaaaagtatgctttctgattttatttgcctattaatatatgcatttgataatgaagaatgtgctaagtagtcaaagcaaataattactttctagtgtctaaccctgtctatgagctaaatgagagggaaaccacttattgcatattaaaaaatggtaactagttttaaaatgctctgtttaatctcaaaccacaatattcaaaacagttacattcctttcactggttcaattaaaaccccagaaaacagtccaagtctccagaacaaattatacattctgcttgagttgcactgcatgtaaaattcacgttcaaaagtttgccaagtcacatttatgaagtcttgaccaactggcggggctgatcataaaaactatatcttttaatttatagtgtttaatgtatattcagtgtatcttatttaaaaagcaacataattgcatgaaaaacttttattttaaatctgattttgaaatatgactgaatacatcaacagaattcagaacaagttggtaaacatctacgagaacatgttatataattccagtgagccctataacattctgtttttaaagagaagaaaccactgaacagaaaaatttgaaatcttcttttcttcttcttttttcttagagacaggggctctctctgttgtctggaggctggagtgcagtggtacgatcatggctcactgtagcctcaaactcctggactcaagtgatcctcccactttagcctcctcagtagctgggactacaggcatgcaccaccacgcctggctaattttttttttttcttttttgagactaagcttcccgctctatcacccagtctggagtgcagtggcgcgatctcagctcactgcaatctctgcctcccgagttcaagcgattctcctgccttagcctcccaagtagctggggttacaggtgcctgccaccacacccggctaatttttatattttttagtagagacagaatttcaccatgttggccaggctggtcttgaattcctgacctcaagtgatccacctgtcccggcctcccaaagcacataagccaccgcgcccggccattctcatgttttcattatgggttttgttctagataagtgggctgccagaaaaaagagccaccatgaggaggaactgatacactcaggcttactacagggtacctcggcttctaaaggagttagacatcatcacagaactcagagcctcggtttacaaggtacaactagccccagacagacacccacacccactgctgtgttttctgcaatggtctaaggtcccctgcctccctgagggacaggagcactctccgtttgcttatacctgcttgctgggctttatctttgcctgggagaaaaggacatcagagtaggcaaaataaataggaagagagttctagaaggtgtctgtcatcgttgaatttccaacatctcacttttttcgggggagactgtcctgttctttagggcacgtggttgcagtggagctgaccccacactctggtggaagggggccatgtgagccagaggggtatgagcctgggactttgttttttgtttgtttgtgttttgtttttttgagatggagtctcactccttcacccaggctggagtgcagtggcacaatctcagctcactgcaacctccgcctcctgggttcaagcaagtttcatgcctcagcctcctgagtaactgggactacatgcaccaccacgtctggctaatttttgtatttttagtagagacggggtttcaccatgatgaccaggctagtctcgaacacctgagctcaagtgatccgcccacctcagcctcccaaagtgctgggattacaggcatgagccactgcacccggccagcctgggactttggaccatccagaataaggcactttctttctgttctggtttctgacaaaaggatacaaatgtagacctcccaggagccactatctagagagagcctgaacgtaaatgaggtcaacccagagaaaggcagatcagagtgatggagagaccaagtccttataaccaagctgaccccctagatccagctgtacctgcaacccaggtctgctcccagactttacagtcctattaggcaacacataccttaaaaaaaaaaaaaaaagggaatcctgttttaagttggatttctgtcacttgcaacaaaaaagcaccaacaaataagggagaaataaaagtgtaagaagaaaggaaatgaggagagaagattatatttatggatatagtgtctggaagcagttcaagtttgtccctggaaatgcagaaaggtgatgtgtgggaatctgttccatttttcatattaagctcaaatcatcagaactgtagctgtgcctaattactgtgattaatctcgccaaactctaaatataacatgagtgtgcactttctgatgttcaatgatactgcaacaatcatgaagcgaaagaacggtccatgactgagcaaagatgccttcgaagcaaaatctttttttctcctgcccaaatgcagtcatgaccggctgaaggagaaaaggtcacaagcgatgacccgagtcttacctggcatggcgtggatgaggtcgccgcacagaacgaagaatttgggtttggggttcagcttgttgatggcctggacggcttgctcagttagacggatctcctgttcccattcgtcaccgccattgtcacagtccccagtggaccaggccttgatcagcccaaactgtgggtctgcgcccaggatgaagtagaatgggcctttccattcgctttccttttcttaaaaaaagagagagggagaaagaaggagaaatcttgtaaaatctgtcataaaagcaaccagcttcccatgcaaagtggatacactatttttcttaaattaagtaggtcattttaataagctgtggttcaaacataccattttcctgtcatagtctagaggattttgatttatactaattatgcctgggacctggtgatacccaaaggccagaactgtccacgtgggcttctgcagccacaccaccaagctgtttgctgacaagctagacagccaaaaggaagcacgggccacaagagaacccaatgcagaagatattcgtgctccataatcgtctttaaattagaataaaactccccaaattgaatgctgccagaagtattatatttaaattactaggtgaagtgcttacacatcttttctgtgaggcttcgtggcaccatttccaccgtttcgggggatgtgacagaattttaattataaaacttggcgcttggaagctctggctatctggtgggaggtgtggtgccagaaatgaaatctcggaatgagtaagtcaatgtgggagaaaaaaaaaagaaaaaagaaaaatcgatgctaacatttcaaaggcagtaggatgtgggcatccgtgaggtgtgaggctgggggtggggactcttttatgttcttggaaagggatctaggccacctgaaatcattctgcttgctcttccgactgactctcctgggccaaagctttgtgggtcttagggtttctactcttatctgccagaactgccgcgccagtgcctgcttgggcagagctggaatggccattaatgggcacagaagtgctgtgggtttcactttttaaaaaattatttggccacagaatcctttccataatcaaaatcgtacatgacagaccaatgttgaaaaaacattccaagcaaagaagcttgctcttacagaatagcatctggaacttccaatgccagagccagatctggggctggacacggcacagtctgaggacccccgatctacagccccctcatttatcctctgaagaaactgaggcccggagaggcaagagaacttgctaaatggcctgctagcgcttagtggtgggacagagctgctccatcaccttgaggctgttttttttttttttttcataatttaatgtatggccaggtacagtggttcatgcctataatcccaacactttgggaggccaacatggacgaatcacctgaggtcaagggtctgagaccagcctgggcaacatagtgaaaccccatctctatcaaaaatataaaaattagccaggcgtggtggctaattacaggtgggcacctgtaatcccagctacttgggaggctgaggcacaagaatcgcttgaacccggaaggcggaggttgcagtgagccaagatcacgtcactgcactccagcctgggtgacagaatgagactctatctcaataataataataataatttaatggacaatgcatgttaactgaataaatggcatttcctttggaagtcatgatgatgctgtaatttccaaaaagctccttggaatcagttcacgtccatgtgtttgattcatttgtctattgagtatcatactgggagcctttgctttgccaggccctgtgagaggtgctggcaatatgagggtgaccaagacagatgagtccctgctgtcctcgcactcagtgctcgttgggggagatgagcaagtaaacaagcagggaatagaatcagagagtattaatgactatgcagattaagagtgaggcaacggctagtttaaattagacagacagggccaggcgccacgcctgtgattccagcagtttgggaggccaaggcgggcagattacttgaggtcatgaatttgagaacatcctggccaacatggtgaaacctcatctctactaaaaatacaaaaaattagctggatgtggtggtgcatccctatagtctcagctacttgggaggctgaggtgagaggaatactttaacctgggaggcggaaactacagtgagccgaaatcatgccactgcactccagcctgggtgagagattctgtctcaaaactaaataaataaattaaataaataaataaataaataaataagataggaaaggcctctctgaagtggtgacatttaagctgagatctaaatggcaagtaagggccagtgataacctttttaaattccatggccactttcccacccatcacactgagctcactatcaccttagaatggactctggtttcaagcctcctttcccttcttaattcctttttcagagttaaagaaaaaaaaagtgaacaaaaatacctctgcacacgttacagaacaaattgtacatgtacataaacccaacagtcctcaacttacagcacagtgttcaattacaatgggccagaagtcaatctgaacaaaggctgcatgaaaccctggtgtgtgcatctcatggagaaagacagcaatatggcacatccagcagggactgagggagtccactgtcattcactgagcactgactgtgttggcagaaagactctaagatgccccccaaatccctgcctcctgatattcacatccctgtgcaacaccctccctttgagtgtgggctgcaacttgcttctaataaacagaatatgatgatggcagtcccttccaagagtgggctaaaagaagaccatgactttcatctctttctctttctcagagcccttgctctggagattaaaaactgtcatgttgtgaatatccctacagagaggccaatgtgctgaggaacagagggaaacctctggccaaaagcccatgagaaaccaatcctgccaacaaccatgtgagtcagcttggaagaggacactcctctgttgagctttcagatgacaccacagccccaacagataccttgactgaagccttataagactctgtggcagatgaactcaactaagctgtacccagattcctcacaaaatcctgtgacatgatacatatttgctttttaagctgtgaaacttcagggtaatttgttacacagtaacagatccctacaaatgaggcattagggataaatggtcaagaagtagacaacaagatttcctgaagatctgaccattttgtcatgaaaaaaaaaaaaaactgagactctgctttgtgtctttatgttattaatcatttattttacttgcataataaccttttttacaccaatgaatgcttctagctgtgtttctacttttgaggctgtttgcagagccatttaagctggatgaattaatcagaaccagataagggaggtgaacacaggcaccccaaagtagcagcataaatcaaccttctacaacagagtttatgaacagctccctatagcaaacattttaacaaatcgtttcctatgacgaatagtcagaatttcaaaaagtcaatagtccttgaagctattaaaacaaatctttcattattacttgtttacttactaaaaacttagaatctcaattttatgtgacaaagtacaaaataaacagatttgacctaaaataaacgacagctcacatatcagtattcaatctaccttacttatctaatgaggtaatttgtttactcaggaatcttcattctccaaaggaactggatgctcttaaggttcctgctacagaagctggtggtctttggtctcatcgtaatttctttttatcaagactgaattaaagatatttggagcttacaatgcttaattctagaaggaggaatctcttttaaatgtatacctctccatcccttaaaagggcagctttttacattatgaaagtgaattgtgtttttttaatttatttttacagatggggtctggctttgtcaccaaagctagagtacagtggcacagtcatggctccctgcagccttgttctcccatgctcaagcgatcctcctgcctcagcctcccaaagtgctgggattacaggcatgagccaccacacccagacaaacgtgaattctttttttttttttttttttgagacaaagtttccctctgtcacctaggctccagtgcaatgctgcaatctctgcttactgcaatctctgcctcccaagctcaagtgattctcatgcctcagcctcccgagtagctgcgattacaggcatgcagcaccacacctgattaatttttgtagttttagtagagacggggtttcgccatgttggccaggctggtctcaagctcctggcctcaaatgatctgcccgccttggccttggactcccaaagtactgggattataggcatgagccaccacactcagatgaaagtgacctcttaacaatacttgcattaaaattatttcaccaaagcccagagttacccccagggtacagtccccaggcacagtccagcttttctggaaaccctctggaagcactcttttagcaacttgagccatggaagtatggataaactgaggtccactcctgaagcactctgagtatgacagtatttgtcattactggaaaaaaaaaaaaaaccaaaagacactcaggggtccagttttttccccctacctttcctagcttaaatatgagattactcggtcaaacagtacatgcctgacaatgctaattaacgaggagaactagcctggcaatgagcctgatgaagagggacaaggtgagggttacctgacagcagaaagcagcaggttgctcatggcacagagatggcagggctgggccacagccttattcctccaggtgtgacatcagcgtcgcctgggagcacattcacaatgcagaatctctggccccagcccagatccactgggtgaggatctgcattttactgaaccccggggtgacctatgcgcacatccaaatttgggaagcaccagcctacatacaactaaccaaggaactcgagtggcctgcaacttacatgggttggaggagaaacagaagcacagtgactttcgtttccttaaactaacacttcagaggggctttgttcaggttgttagtggtggtatattttttattttgttttggtttggttttgcatacttctctggtcattgttaggtctctgcctatgtacaggtcatggatttggccctaaatatttcttatttctctgtattattcattactatctagtcatcaccctttacattgccttgcaaaactaagtgtcaagattctttgaaaagtaagaagttgggttgggcatggtggctcacacctgtaatcccagcactttgggaggccgaggcgggtggatcacgaggtcaaaagatcaagaccatcctggccaacatggtgaaacctcgtctctactaaaaacacaaaaattagtcaggcatggtggcatgcgcctgtagtcccagctactcaggaggccggagaatctcttgaactgggaggtggaggttgcagtgagccgagatcgtgccactgcactccagcctgggtgacagagagagactccatctcaaaagtaagaagttaatcagggaatccattactaattagtatgttctaatttattactacatgacttcatggaaaaagcacccattaccaagtatgagtatatagcacacatgtatgtgtacacccatacgtacacacacacatacatacacgttttccagtgcacaacagagaagtctgtatttttcttcccaaattgacttaaaaaaattaacccagtcaggggccctaactgatgactatgatgaaaaccaaggtcaaattttgagacaaatatgtgtggaaggaataaaagaaaaaagaattgattaagatctcatttctgacccagatgatatcaaaacaagactataaactttggaaacaactcatacaaagctctggataatgcctatagggtatttagtgttcatacgtggtaaaaacatacatttatttaattaaaacacctatatctgttatgaataagaatatccagaatgaatttttctttcttttttttttttttttttgagatggagtctcactctgtcactcagactgcagtgcggtggcgtggtctcagctcactgcaacctctgcgtctcggttcaagtgattctcccaccttagcctcctgagcagctgggattatacaggcatgtgccaccacacctggctcatttttgtatttttagtagagatggggtttcactatgttggccaggctggttttgaactcctgacctcgtgatctgcccgtctcagcctcccaaagtgctgagattacaggcatgagccaccacacctggccagcgaatttaactttttcaacgttaattttttgacagattcatagagaagttaatttagctgtctactgctgtgtaacaaactaccacaaatgtatcagcttcaaacaacccacatttattatcttatagcctctgtgggagtctggcatggtttagctggtcctctgcaaggtctctcacaagctgcaacagaagtgttggtcaatgctgaggtctcatctgaagactcacatggggcaggatccgtttccaagctcacttacatagtggttagtaggattcagctccttgtaggttgtaggactgatggcttcagttcctcactggctgctgcctggaggatgccttcagttccttgccatatgggcctctccaatatggcagcttgcaatatggagacttgcctcatcgaaccacacaaggcagagggtctgctagcaaatggaagctacaatcttatataacatcatgatggaattaacaccccatcacttttgctgtgttctgctcattacaatcaagttaccagggcagcccaccttaagggcaggggatcacacaaagcatgaacacctggaggtgaaatcactgggctcagctgagagtcagccatggatggtaatataaacctgagggctagtctcacatacttaacttatctcagttaatgtcacatttgtacctgaccttccagtactgcactcaataaggccatttattgtagctcatcctggtgagatcagaaggcttaactcacagaagcccgccttttcctacctaagtactagaaattgtcagtgctggaaggactctcagagttactgtaaccagcctttcattaaaccaagggggagatgctgaggtctgggtagtgagggggaagggagatggggcttaggcatgcctcaagttcaaggtcacacaataaagacccagcaacttctacccaagagctattcagaacctcagtgctgctgggctggatggcctggagtggtgagagccatgatgaagacagaacatgctctgggcttccctcaagttatccacctcaatactgacatcttctctccaaaaagtttccttcaaatggaacgtcttgataaatgggctgtacacaaagacaatgatggcaagacccagagcttttccctggtcggccgtgatgttcagggtccctgccaatagcacagggttgatttgaggcacaggcggggacccagacatctgtctcctgtgagtgctcagtggtgatctcttccagagattacaaactcgacgtctgtggatgaggtctgcttagcagatgtgtgctgttgggcccaggcagcgtttataaacttctgaatttgttgccaacctttttaattcatgagtttcataaatatacctggctttctggattctcttggaaaatctggccacatcagacccaaatgaagcatgctagtgactctctgggtctgtacagtggttgtgccttcacatggggtttgtgctctcaaatttgccacagtccccacctggcccaatttaccacctggctgctgttggcatctgcaatgacaaacccttatctatggtaatctttccattttgcttagaggtgaggaagaggagacccagcaaaggaaaatacattgactgaaatctacaaaggctaaggggcaaaccaggcccccacctttgcaaattctgccacagacatcactcgcccacatttcaggacagctgaaattactatagagaagacatatccaagccaggaatgcctaggtctagccaaacaacaagccaggaaaaaagaaaaataagctaatgagttaccataattttttttaatggggtctcactctgtcacccaggttggagtgcagtggcatgaccttggttcactgcaacttccacttcccgggctcaagtgatcctcccacgtcagcctctggagtcgacgggagcacaggtgcgcgacaccatgcctggttaattttttgtatttttggtagagacggggttttaccatgttgcccaggctggtctagaactcctgagctcgagtgatcagctcaccttgacctcccaaggtgctaggattacagccatgagccactgcatccagcctggttgccataattttctaaatcgaattataaaattaactttgaaacacttttaaatgaaaaattgaccttagaaatcagagtcacctgttgtatagagaataacaagatctggccacttccacatttcggctaacttataaaagactgtcacagaaaccatatttcaaaactgagggataaatacacagtgaattttgggtaatatcaagctaaggacagaaaggcctgtaggttttctttaaacattatcaggtgcaaagcaattgcactcagagaagaatcttaaaaacctggaagaattcacgcaatgctttaccattaatctttcctatgagcctctgtttatgtgccaatatcctgcctgaaagacagatattcaaattgcaattgctctttaccgctgaacttttaaaatcacaaactaaatgttttcttggatttgtctctgctaatacatttcctctctcatttttattatcccttttaggcatatttgtcaatgttaatgaaagctgactttttaatatataccaagaattagaaattttattgattttttcactattaccagttaagcaatgactaactataatgaaggtgcccccaaaagcaaatgaatcactgttttcatcactcaactaggaaaaggcctgggggccagccacgttattaagtaatacctaacattataataatttctgctctcatgatgtgctaaacctgttacttgtatgcaacctcaaataattcacggtagaatacaatgataaatagctttcttaacttgattttcataagaaaagtcacattggccggtcgcggtggctcacgcctgtaatcctagcactttgggaggccgagtggcggggcgggggttggatcatgaggtcaagagatcgagaccatcctggccaacatggtgaaaccccatctctactaaaaatataaaaattagccaggcatggtggcatgcacctgtagtcccagcaactcgggaggctgaggcaggagaattgcttgaaccttggaggcggaggctgcagatcacaccactgcactccagcctggtgatagagcaagactctatctcaaaaaaaaaaaaaaaaaaaaaagagtagaacatagtattagtatgtctgtttttctggacatgtccaagctcccagcttgtcccatcaggatcttaaattcaacacttccacaggcaaatccatcatcttttttttttttttaattttactttaagttctgggatacatgtgcagaacacgcaggtttgttacataggtatacatgtgccatggtggtctgctgccccatcaacccgtcctctaggttttaagccccgcatgcattaggtatttgtcctaatgctctccctccccttgcccccgacctcccaacaggccctggtgtgtgatgttcccctccctgtgtccaagtgttctcattgttcaactcctgcttatgagtgagaacatgcggtgtttggttttctgttcctgtgttagtttgctgagaatgatggcttctagcttcatctgtgtccctgcaaaggacatgagctcattcttttctatggctgcacatctttctttaagactggctccctccctagatcttgctaattttgccaccatcatccctagtcccccagtctacagatcttaagatcatgtgtcatcctgtgcatgtagacagccaagttgcatcattccacgtctacaacatccctgcagcagccccaccttaccgttcccatcaccaactactcttgggccaggtattcatggttcccacctgggagaaggaggctggcaggatggctccctgcagctctccctactccagtccatctcaggcagttgctgccattatgtctcttcccaaccccttaaccagatcatcaaattcctggctacagagccaccatcctgaaagctccagggcaggcccacgtttgcattccctttctggcatatcagcagcttttattattgagtctggcacgtggcaggcatcagtcaatatttggtgaagaaatggatgaagacatcaatggatccccactcatccactcattctagcacttgggcctaaaggggcccaaagttcttccagcggtatctttttttttttttgagatggagtcttgatctgtcccccaggctgaaatgcagtggcacgatcttggctcaaagcaacctccgtcccccaggttcaagcaattctcctgcctcagcctcctgaacaactgagattacaggagtgcgccaccacacccagctaatgttttgtatttttagtagagatgaggtttcaccatgttggccagactggtctcaaactcctgacttcaagtgatccacttgcctcagcctcccaaagtgctgggattacaggcctgaaccgctatgcctggcctcttccagctgtatctcactggtcctgatggaccagtggctgtagtcccatcagaccagggatgattctgacacataacaatgtctacagacattttgaggtatcacactgggaagtgggtggtgctgctggaatccagtggataaaggctggagatgctgctaaacatctcataatgcacaggacaggaacccacaacaaaatccagcccataaacatcaacaatgctggggggttgaaaaaccctgtttaagacataccacaggaatccccccagatagaccactatctgcttctccaacacaccctatacttcctgatatggtttggctgtgtccccacccaaatctcatcttgaattgtagctcccataattcccacatgtcatgggaaggacctggtgggaggtaactgaatcatgggggctggtctttcccatgctgttcgcatgatagtgaataagtctcacgagatctgatggttttataaagcgcagttcccctgcacacgctctcttgcctgccaccatgtaagacatgcctttgctcttcctttgtcttcccccatgattgtgaggcctccccagccatgtgaagtgtcagtccattaaacctctttcctttataaattacccagtcttgggtctgtctttattagcagcatgagaacggattagtacacttcccctcctctttctggtatacgctctccattccaccaactcttcctgctgaaatcccttctacccttccctgccagctcaaatgctccctgccctgtaggcagatgcagcttggcctccttcactcattcaagcaggtatgttctgagcacctgctctatggcactggctgtcagtggttggacattcaacagtgagcaatgctgatggatcctgttccttaaaaccttacacgatagcgggggagatgcacaacaaacaagcaaataactaagttagttacacaagtcaattacacacttcgctctttacaactgcagggtcatcaggctgattgcaagacagagtggccagtgggtggggctgtggagacgcgctccagggagggggcactgcaagtacccagaccctaagtcaccagaaggctggagcgggaggcggggatagaccatgctgacaacagactttgggcctctatctcctgaaacccttaactgagttccagtggagctcagactgaggcctgagtgcccaagttcaactcccatttctaccctttaccagctacgtgacatgatgcaagttcctgaacctctctgggactcagtctccttatctgcacagtaggaataacagctcctacctcaaaagggttgttgagaagaattaatgacttaaaacatgtaaagcatttggactagacacagagcaagtggtcaaaagtgagttactcgtgccatgactaccattcacagtaacccctacccttatcttagcagagacaggctttttaaagactcacctatctcttggttcccacagcacatggtggggctgagaaaacatctgatgagagacacatatatatttacatgctttggtcttaacatcttttcctttatatactgtggatattgctttggttataaagcaggaaagatgggaagcttcacagccgcctgcaggctttctagctaaagagcaaatggcaacaaaatgcaatttttgcagtttctcacaatagcaatctgcatagtgaatcacaatctaaatgtctccagcaatacccttcaactgctctggggactaatcttatttcagcagtttaaaaaaaaaaatcacacaccaaagagtagctaaacaatatttaccactttgggactctttctgacttaacaatcgtaatgtccccactgtgaagctgccagaatggtatgcagcagataagagtgtccttcattagtggctgtttaggggttgggggtctttgggggcagtttcagcacggggtgcagggtttcttcttggattaaggaaaatgttctaaaattgattgtgatggttgtacacctctgtgaatacactaaaagccactgaattgtacacatttacactgttgaatcagaaagaagcccaaagtggtaaatattatttaattaacaattcacatggtgaactgtagggtatgctaacagttgttaaaggaaaaaaaaaaaatagtgtccttcaggaccctgtccctccccccacccccaaaataattaactgtgacagcaatatcctcaagagtctccaaatgacttgtcctaagtacaggttgcatatctcttatctgaaatgcttgggaccagaagagtttcagattccagacttttttcagattttggaacatttgcatatgcaaactggtagtgcattcctaatctgtaaaatctgaaatccgaaatgcttttgagcatgacctttgatcatcaagtcagtgctcaaaaagtttcggtcggatcttagagcattttgcaatagggatgctcaacctgtacaaaggtaaatttacccaacctctcttttcttggcctaaatgcatccaaaaggcagtttttgagacacacaaaagattctgagtcatggcttggctgccacaatggccgtccttccaaaatctttatctgcaactcttcagagaactaagaaagcagatgggctgggacttcgtggccaggcggcttttggcatcactggctttggctgacgccattcgagacaacggttaaagaggggaaaagacatttccagaacctctctcacttttcaagagcagaactccacttggggtttgcctggttttggtggatatttgctgttattttttttcccatttccctaacaagacagcaggcagctgctgtcccaggcagcactctgggaagaactggtagaaggcgccttctctgggcagaagcagctgtgtaggcacatggccaggctaacagaagccccagatgcaaagagaaggtaacccttcccccgggcagatgtgctccatgtgagggcacccacctggtaggcaaaacctctgcctctagatgctctggagtagtgcacacagtgcacagccacctggtgtagtcatgcaacttttttttttttcagagtctcgctctgtggcccagcctggagtacagtggcatgatcttggctcactgcaaactccgcctcccaggcgcatgcagttctcctgcctcagcctccagagtagctaggattacaggtgccagccaccatgctcagctaatcattgtatttttagtacagatggggtttcaccatgttggccaggctggtctcaaactcctgacctcaagcgatccactcgcctcagcctcccaaagtgttaggattacaggcgtgagccactgtacccagccaacaacttctattggtttgatcaacaccttggtctcagctttgtttagtccggagactccatggtacatgagagcagtgggttggacagatacacccaggtgacccaggtggagtgtattcattcatactcatccatttactcaatattaaatggtcactgaggccaggcgtggtggcttaggcctgtaatcccagcacttcaagaggccaaggtgggcagttcacttgaggtcaggaattcaagaccagcctggccaacatggtaaaatcccatctctaccaaaacacaaaaattagccaggtgcagtggcatgcacctgtagtcccagctacttgggagtccgaggcaggagaatcacttgaacccaggaagcagaggttgcagtgagccaagatcacgccactgcactctagcctgggcgatagagcaagactttgtcttaaaaaaaaaaaagccactgagtgtctactactgctagacaccatcctaggtctgggcttcttgctcctcaagaatttatagtgtacaggtagaaaaagacagcaaagtcacaagaagaaacatacaactggccaggcactgtggctcatgcctgtaatcccagcactttgggaggctgaggcaagtggattacctgaggtcaggagttccagaccagcctggccaacacggtgaaaccccatctctactaaaaaatacaaaaattagccaggtgtggttgtgtgcacctgaaatcccagctacttgggagtctgaggcaggagaatcgcttgaatccaggaggcaaagcttgcagtgagccgagatcatgccactgcactccagcctgggcgacagagtgagactctgtctcaaaaaaacaacaaaaaaaactcacaatgagatactacttcacaccgatttggatggttataataaaaaagagtggcaataagaaatgttggcaaggatatggagaaactggaacccatatacactgctggtgggaatgtaaaatggcgcatctgctttggaaaatagtttggtggttcctcaaaatattaaacatagttaccgtatgactcagcaattccaatcctaggtatctacccaaaagatatgagaacaaatacccttaagaagatgtgtctgtgactgttcatagcagctttattcccaatagacaagaggtacccagatgcgtgaaatgtccatcagtgtcaaaaaaaaaatgtccaaatgtttatcaataggtggtcggataaacaaaatgggttatctatacaatggaatatcatttagtaaaaaggaacaaagtattggttcaagctacaaaataagtgagcctcagaaaccttatgctaccacaaagaggccagtcacaaaagaccacatatttttccattaacatgaaatgtccggaaaaggcccatctatggaggtaaattagcagttgcctgtgctgggagtggcaacatgaagagacttgcaagtgggtataaaaccacttttttgggaaggtagagatgtgctaaagttagattgtgactacaccactctaaagttaataaaatcccttgagttgtaaacttaaaatgcatgttatggtacataaattatacctcaagaaagttattaaaaaaatttaggccaggtgcggtggctcatgcctgtaatcccagcacttttggaggctaaggcaggaggattgctcgggtccaagagttcaagactaacctgagtgacacagcgaaactgtctctacaaaaaatataaaaatcagccaggcgtggtagcaccttctctgttcctagctactcaggaggtggaggtgggaggatcgagcatggcttgagcccaggagggggaggctgcagtgggcggagatcatgccactgcactccagcataggtgacagagtaagaccctgtctccaaaaaaaattttaaagcaggcaaggcccagtggctcacacctgtaatcctagcacagggatttccaatcttttggctttcctgggccacaacggaagaactgtcttgggccacacatgaaatacactaacattaatgatagctgatgagcttgaaaaaaaaatggcaaaaaattccgaacttttaagaaagtttaggaatttgtgctgggacacattcaaagccatcctgggccacatgtggccagcagaccatgggttggacaagcttgtcctaacagtttgggaggctgaggtgggaggatagcttcagttcaggagttcaagaccagcctggacaacacagtaagaccttgtctctacaaaaaaatacttaaaaattagccaggcatggtggtgcacgcctgtagtctcagctactcaggaggctgaggtgggaggatcacttaagcaccacaggttgaggctgcaaatcagccatgatcacaccactgtactccagcctgggtgacagagcaagaccacctcaaaagaaataaaatacaataaataaataaataaatttttgaaaatgaaaaaccccgacattcaaaaataaaattaattgtgttttctggaaatgttatagtgcaaactttttacatatgtgtgctggtcactctatcccttgactgatgattacaacaaagagttgagaaagtaatcataagccctatttactcacaggaactctcaaataagaggaccttcaaatatatctcaaataagagataactagtttggcctaaatgtatggcacaatttaaagcatttatttcatcatcatcatcctgttagaatttttaaaaccacaatattttcaactttgttcaaacttggagatacctttccaggtctactatttctagaaaagttcttaggtgagacctgcaagagacagagtgagttatttttttactgacactattctctgccaagggagaagttttccagagagtacaaggaaagattcaggattagcaaattccatcagcttcttaggaatgaaatgtctgggaaaataatctttttaagaataccacccattagtccagttctctgaagggaaaatatcaaactggaaaaacagattcagacctaaaaataattaagtcactttaaaagcatattttatcttgatctctctcccttttaggatttcttcaaaacagaagccataaacttctcaaaagacaattactagaagaaagtagtcctaattaggatatgtgtcaagaaaacctaattatcaatttgcctaattaaaatgaatatctgaacatgccttaggaatgtgagctttctcaggtgagacatgtacaattttttttaatcaacatccgtcaacagagcctagcacattatgttaacagggaacggatgactgaaaccaagtgtcacacataccactactggaaggagttgatgggaatactgttactcacgtaaatcaccggtgggaggaaatgggtcttaaagcaaagcgctctttcatttaattggcaggctacacttggaaaacaaactgctcaatgagctgattctgcagcaaaggtgaagggttcagagctgtgatttttagggactgttgcttgagttaatcaaacccctttgatggtgtgtgttttggcaagagaaggggaaaagtcagttttttttttttttttttttgagacacagtcatcactctgtctcctaggctagagtgcagcgggcaatcttggcttactgcaacctccgcctctcaggttcaagtgattctcctgcctcagcctcccaagtagctgggattacaggtgcctgccaccacacccggctaatttttttaattttagtagagatggggtttcgccatgttggccagactggtcttaaactcctggcctcaagcaatccacctgcctcggcctcccaaagtgcaggaattacaggcgtaagccactgctcccagcctcgaaaagctagttctttaactttctcagtctgcccaaggggcaaatctactggcttcccaaggagtctggagaggcctctgatgcctctaagggcacctctccaagttgccagcgatgctaatagagtcaggaccccggggaattgtcaatgagtgcaatggaagcagcaatggtaggctagggttcagcacctagtaatgtgaacccacaaacctggggttctcagcagaacactctgaggctgggcctctctaggccctccgttaaatgacccatcctgggtgtgtctatgggactgcatggctcacagaggagatcaagtgctggccccacttctagatttactcggggctaagaaaagttcagagtcactctctcctcctatcagcagggtaggtatcttatagatttatcatcaagtctctctccagcatccccattcttatccaggggagctgctctctgatcctctggtcccagtggtggccccctggcagctgcaatggcctaggaagctactatacctcagcactcccaccatctccactgaaagacaccccgtgcccaataggcacctccagctacagcaaataaacacattcaaagtaaacaatgggggccaagtgcggtggctcatgcctgtaaatcccagcactttgggaggccgaggtgcctgaggtcaggagtcccagaccagcctggccaacatggcgaaaccctgtctctactaaaaacacaaaaattagcgggcatggtggtacatgcctgtaatcccagctactcgggaggctgaagcaggagaatcgtttgaacgtgggaggtggaggttgcagtgagtagcatcactgcactgcagtctgggtgacagagctagactctgtctcaaaaaaaaaaaaaaaaaagtaaaccatgggggactacagaaatgcagcctctggacaaatccttgagctccagcttccaactggattgcatcccaagttgctctaaagtagaaatgcttttgttgccattgctgcaatcagaccactcttttcaaaataaaaatctgatcatacatccttgcttcctcacacatccagcttgaaacctcttgatgctattaggacacgacaaaaatccttagttaccaccacctccctctccagcctcagcccacaccatgtcccaacctcatctttctgctccagactcagagacttccttcagccctcatccttccctttcccatcctgccatgtcctaggactctcacacttgctctgcccatggtccacatggtcttccctcccttcgtggcccagttaactcatactcctcttttagcaatcagacgaagcaacacttcctcagggaaaccctgcgtgaatgacctcagagcccaccagtagccaagcattattttttgtgccctagctttgtacctggattattacaagcctctgagagcatgtaacttgaaccactcccccgcccccaacttcctattctccaccatactggacagtgcaataggaatataagaaatatttatttcctttcggtttttttgtttgtttgttttgagctggagtcttgctctgttgtccagggtggagtgcagtggcacattctcggctcactgcaacttctgcttcccaggctcaggcaattctcctgccatagcctcccaagtagctaggactacaggcatgtgccaccacacccagctaattttgtatttttagtacagatggagtttcaccatgttgaccatgctggtctcgaactcctgacctcaggtgatccacccgcctcagtctcccaaagtgctgggattacaggcgtgagccaccgcggccggccctcaacaaatatataggcgtgagccaccgcagccagcccacaacaaatatttcttgaactgaaaaaaaaaataatacagcagagtaacagggaactctcatatactgctggtgggagtataaattggcactaccactttggaaggcagtttgaccacatctagtaatgctggggatgattataccctataacccagaacatagcttgtaggtatatgcctcagagtaactctcccatgtgtccacaaagagatttgtacagaatgttcataacagcactgttaccaagggcaaaaaccagaaacaactaaatggccattgtattagtcaggatccttgcaggaaatagttggcattctcaaattaggatgattttaaaaagggtttaaaaagggattacttggtgggggttgggtggacgaaacctacaagggagtgtggtaacccaaggttagaaaagcagaaccactgccactcccacgcctcaaaggaggaaatggttactcaaatccagaactagagagaatgaggagaaaagctgtcctgagaaaaggagcgaccttgaccttcaggggtggggaggaagacagccaggcgaggcaaccccacagagtaaactgcaagaataaatacagctgccttttgcttctctccctgctctgatttcttctcagggctccccactggctgagcccaaaggaaaaccaaaaggcaaggagcccaccgatgtagctcacggagggcaaacccctggggcatggtggggaagggagaaaggtttggagaggcaaagggaagatattcagcatatacatcaacagaatgtataaggtatataatcatccaatggaatgttgcccagcaagaaaagagcaaaatcttcatgttggacaaaaaagacaaggtccattaaaatacagtcgtcccaggccgggcgcggtggctcaggtctgtaatcccagcactttaggaggctgaggacggcggatcacctgatgttgtgagttcgagaccagcctggccaacatggagaaaccccatctctactaaaaatacaaaattagccgggcgtggtggtgcgtgcctatagttccagctactccagaggctgaggcaggagaatcgcttgaacccgggaggcggaggttacagtgagccaagatcgtgccactgcactccagcctgggcaataaagcaagactccgccttaaatgaataaataaggttttaccatagaattaccggagaaacctactttagataaggtagcaggtaaagtctctgaggaagtgaatgaactttaaaatgaggtgtgacggttgagagagccaggctcaccaaccctgctaaagaagcagaaaacagcaagcgccaagaccctcagggaaagaacggccttggcccttttaaatgcagttcaaacaagggcaacaacaaaacctgttgcagaactgggcaagagagagaatgacaaccctgaaggaagtggacacaagcctgatcatatagggcatttagggtgacttccctgggggtataaagctggtgagagcctgggaggcgatctggctgcaggcagcaaaaagccacagaggggaatcaacaaaccagaaacaaacctccctctttacttagcacctagcatgcgtccaacaccgggttacaaaaatacttttgatctgtttacgcttccaacaaccctatgaggcaggtattatcaaacccatttttaaggcaaagcagataatctaaatccaaaatccaagcacttcactacgactctcgaatgccctccctctctactgctctgatggggcagtgttaccatttcggtgaatgacttaaataaacgtcattatggagtacagaatacataacggtgaacaaccttaataaaaccgacaccctctaacatgcaccgaacgcttatccagtaacacccacaagtattcccgtttcacagatgtggaagctgaggccaagatgctaatgcacagcttggaaaccaggtctcgctgcagagtccaagctgtcattaactatgctttgctaccctcctcttacttcccttctctgggggaagttaggtcaaggccaaggaggctcctagaccagatcgctctctcggcctcgcctctcaactgcgcccctggaatccctaagagcaggctttgatgcagctatggcggctcccaggccccggtgcagccccggatggtgtccgactggcggagcgcacacctgaacaaaaggttcccccggcggaaggttccgcagccccagagtcccctccccgggtgaggggcgggcagtacctgcgggaaacgcggccagggtcctgcccctggctctgtggaaaacaccccccgcctctgcagccgacatggcgagcgagtttctggccttcacttagaacactgcgtgggtggaagccgcgcgacttcacacagaacaaccgctggacctgtcccgctttgggcgacgccctttgatctcggggcgggactggggcgggacggggaggggcccggtggctcggggcgccactagtgctgcctgggcggagcggaggcgccagcggcccctctgggatcgacctgcgcgcctggcgagtggagactgtctagggcacgcgtgggcggggataaggctttggggtcagtccttccctaaaggcagagttactagatttaacaagtaaaaatgcaggactcccggttaaattggaatttcagatttttttttttaaagaatgactgacttggtataaatatgtcctatgcagtatttgggagctacttacgttaaatttttttttcattatctgaaattccaattgaactgggcgtcctaatttttttaaatttttctctttttgcaggtttgaatggaagcgtcctgatttttttttatctgacaactctatcataaagtcagaaggagccactggggtggcttacgcctgtaaccccagctctttgggaggccaaggagggaggatcgcttgagtccaggtgttggagaccagcctgggcaacacggcgagagaccttgccaatacaaaaaaaaaaaaaaaaaagatgaaaaggtggacgtcttggaagactgtctcagcctgaacttcccagtggctgccaccatctttctgttattatctttgcttgctatgcaccaggcagggcgctaagcactttgcacgctgctcacttaatccccactacagccctaggaggtggtgctgttattagctgcatccgtcatttggggaaactgacgctcagagagatgaacgaacttgcacaaggtgacacacatctagagaggtagtaaagctgcgagtaaccaaattagtgtctcttcaactcaagagccattgtagtgaactacttagccagcatttgtcaaacgtgttgaaaatacaaattccagaatggacctattgaatccaaatctctatgaaaatgatctgtgttttgttgttgttgttgttgttttgagacagggtctcactctggttgcctaggctggagtgcagtggcacaatctctgcagtctcgatctcctgggctcaggtgattctcccacctcagcctcctaagtggctggcactattggcgtgcgccaccatgcctggctaatactttgtatttttagtagagacgagtttgactatgttgcccaggctgatctggaactcctgagctcaagcaatccacccacccgggcctcctagagtgctaggattacaggcatgagccacagtgcctggcctgaaaatgatctgtttttaacaagcactgcaggggagctcttatgatcttacaaatttgggaaattcttttctaaactagctgcctacatccaaagcactgtttgagtagctaatatggccataactactgttctctaatccttgacaagagtcacccatgaatcatagtggttaagagtataaatgcctatgagtcctggagtcagtgggcttggattaatcccggttctacccacttactggttgtatgctcttgaaaattgcatagtttctctatgcctcagtttccctatctgtgaaatggaaacaatagtagcatctaggtcatagggttgcagaaaggcttaaatgagttcatgtatcaaagtgcttagaataatagttctaataacaaatggtaggtactcaatgaatattagccattgttattattaatcaatcactataaccctattccctgaacatggcctggcccagaggaggagtcccaagaaatgtgaaggaggccgggcgcaatggttcaggcctgtaatgccagcactttgggaggtggaggtggcggatcatgaggtctacagatcgggaccaccctcgccaacatggtgaaacctcatctcaactaaaaatacaaaaattagctgggtgtggtggtgcacgcctgtagtcccagctactcgggatgctaaggcaggagaatcacttgaacccgagaggcagaggttgcagtgagccgagatcccgccgctgcactccagcctgagcgacagagtgagactgtgtctttaaaaaaaaaaaatgtgaaggggaagctgagcacaatggctcatgcttgtaatcccagcattttgggaggtttaggcaggaggattacttgagcccaggagttcaagaccagcctgagcaacatagtgagaactcatctctattaaaaaattttttttaattaaaagaaatgtgaaggagagaatgaattatagaaacagaccctgcctcttattcactagctttgcagtcatactggccattcagttcattaaacatgcaaattaatttccctctctgcatatgcagttctttctgcttaaaatgcctcttcccagctgggcaccgtggctcatgcctataatcccagcattttgggaggccaaggcaggtggatcacgaggtcaagagatcaagaccatcctggccaacatggtaaaaccctgtctctactaaaaatacaaaaattagccagatgtggtggcgcgtgcctttaatcccagctactcgggaggctgaggcaggagaattgcttgaacccgggaggcggaggttgcagtgagctgagatcgcgccactgcactccagcctggtgaaagagcaagactctgtctgaaaaacgaacaaacaaacaaaaaagtatcttcccctgctgagctaaagcccatttgaacatgaaggcctgcagttaaataacacttctgtggagaggccatgccctacccatttgcacactttgctgatctaaactaggcctccctcattctttgttagagcactatgttcttgtcccttgttgcactttgcacagttgataattatatgttttcaggtgtaattatttatttaatgttgactttcccgactcaactataaggtctattaagttggttacctttttaaaaaatttactgttttggccgggcacagtgtctcacgcctgtaatcccagcactttgggaggccaaggcaggcagatcatttgaggtcaggagatcgagaccagtctggccaacatggtgaaaccccatctgtactgaaaatataaaaattaggtaggcatgggagcacgcctgtaatcccagctacttgggaggctaaggcaggagaatcacttgaacctgggaggcggaggttgcagtgggccaagatcgtgccactgcactctagcctgagtgacgaagtgagactctgtctcaaaaaaaaaattattatttataaagatggtgtctcactgttatccaggctggtcttgaactcctggcctcaagtgatcctcctgcctcagcctcccaaagtgttaggattacaagcatgagccgccacgcccagctgagggcagttaccttgactgtctagctcaccaagcaggatgcctgaggcatagacactaaatgtttgttgcattaataaataaatggattatgaatatctcaacaagataaccatattttgaacctcagcagcaattgggaatagatctataggccaatctggagcaacttcaaaactgtaccagtgcattggatgatagcaatagctgcaattgtgaaaggaaaataaatattgagaccccaaaatcactaagccaaggggaaaagtcaggctgggagctgcttagggcaaacctgcctcccactctattgctgaaacagacagctactaaggctgggtacagtggcttacacctgttatcccagcactttgggaggccgaggcaggaggatcacttgaggtcaggagtttgagaccagcctggccaacatggtgagacatccatctgtactaaaaatacaaaaactagccagttgtagtggtgcatgcctataatcccagctactcgggaggttgaggcaggagaatcgcttcaaaccacaagacggaggttgcagtgagctgagattgtgccactgcgctccagcctgggtgacagaaggaaactgtctcaaaaaaaaaaaaaaaaaaacctactaagataaaaaagctacgtacgtcgctcagaaggaatttccttgtagacaaaggacagacagaactcaaagttatccctctgctcactgagataaatgcatttctgactgcctcctctggaaaagctaatcagaaactggaaagaatgcaacctttttttttttttattcccccgagacagagtcttgctgtgttgcccaggctggagtgcagtggcatgatctctgctcactgcaacctctgcctcccaggttcaagcgattctcctccctcagtctcctaggtagctggggttacaggcatctgccaccacgcccagctaatttttgtatttttagtagagacggggttttgccgtgttggccaggctggtcttgaactcctgacctcaggtgatctgcccgcctcagtctcccaaagtcctgggattacaggcatgagccaccgtgcccagccaccttttgtctcttatctacctgtgacctggaagccccctccccacttcgggttgtctcgcctttccagacggaaccaatgtacatcttacatatattgattgatgtctcatgcctccctagaatgtataaaaccaagctgtgccccgaccaccttggcacgtgtcatcaggacctcccaaggctatgtcatgggtgcacatccttaactttggcaaagtaaacttcctaaattgtctgagaactgtctcagacatttggggttcacactttttttcttttttgagacagagttttgctcttgtcgcccaggctggagtgcagtggtgtgatcttggctcactgcaacctttgcctccggggttcaagtgattctcctgcctaagcctcccaagtagctgggattacaggtgcatgccaccatgctaggctaattttgtagttttagtagagacagagttttaccatgttggtcaggccggtcttcaactgctgacctcaagtggtccacctgcctcggcctcccaaagtgctgggattacaggcgtgagccaccatgcccagcctggtcttgccagaggcatttgaaccagagagactccatcttgaataggggatgggtaaaataaggctgagacctgctgtgctgcattcccaagaggttacgcattctaagtcacaggatggaccttaggaggtcggcataagatacagtcgtaaagaccttgctaggctgggcgcggtgggtcatgcctataatcccagcactttgggaggccaaggcaggcggatcacctgagatcaggagtttgagactagcctggccaacgtggagaaaccccatctctatgaaaaatataaaaattagccaggtgtggtagcaggtgcctgtaatcccagctacttgagaggctgaggcaggagaagcacttgaacccgggaggtggaggttgcagtgagccgagatcatgccactgcactccagcctgggtgacagagcaagactccatctcaaaaaaacaaaacaaaacaaaacaaagaccttgctgataaaacaggttacagtaaagaagccagccaaaatgaagatggcaatgacagcaaacctctggacatcctcgctgctcattatacactaattataatgcattagcatgctaagagataccccacaagcaccgtgacagtttacaaatgtcatggcaacatcaggaagttatcctatatggtctaaaaaggggagctctcatttccaggaattccccacctctttcctggaaaactcatgaataatccaccccttgtttagcatacaatcaagaaataaccataaaaatgtgcaaccagcaaccctcagggctgctctgccgatagagtagccattcttttattcctttactttcttaataaacttgctttcactttactgtatggacttgccccaaattcttccttgtgtgagatccaagaaccctcccttggcgtctggatagagacccctttccagtaacagtcttatggcccccacccaggcactgactttgtgcaaagatgacaacttccccatgatttcatttcttctatttttattttattttattattatttttctgagacggagtttagctccatcacccgggctgtagtgcagcggtgcgatctcggctcactgcaagctctgcctcccgagttcacgccattctcctgcctcagcctcccgagtagctgggactacaggtgcctgccaccacgcctggctaattttttgtatttttagtagagatggggtttcaccatgttagccaggatggtcttgatctcctgacctcatgatctgcctgcctctgcttcccaaagtgctgggattagaggcgtgagccacagcgcctggcctccccatgatttcatttctgacctaaccaatcagcactcccgactcacaggtccactaaccaccaaattatccttaaaaaacctgatccccaaattcacaaggagactgatttgagtaataaaattctggtctccggtacagccagctctgagggaattaaactttctctattgcaattcccctgtcttgataaattggctctgcccaggcagcagacaaggagaacttgttggacagttacatcctctgccctttataattttggctttatcatcactctctacagagaagacttcctcccaatcacttggaagctccaggctcctccttcatgggagcggaatggctacagcagttctagaccacattctcatgagacaccacccagtgaggtgaggaaggaagtgtcttttatttcctctgaatcctccagcaaacatcccctgcatcactgcaatgccagtttaaaaccaaagttagaaggatagatggcatatttaaactggctgcagtcatgaggcccaccctaaagaaggcatggtgtcaatttcaccctagttacatgcctaagagtggggagcacaattctcttaaaatgaaatcttgacgccattgtcctaagaaaggaagaaccaattgttaaaaagagccaataggtaatccattacataacccgtgcaggagtgaatgttgaggtgggggtgggggagtcacaaaggccaatgactaccatccccgctctccaccctttaaaaaaactgccctttttcttccctcccacttcttgtaacagctatacttgtaaaaagccctaatctacgtggtggctcacgcctgtaatcccagcattttgggaggccgaggcaagtggatcacaaggtcaagagattgagaccatcctggccaacatggtgaaaccccatctctactaaaaatacaaaaattatctgggtgtgttggtacgtgcctgtagtcccagacacttgggaggatgaggcaggagaatcacttgaacctgggaggaggaggttgcagtgagctgacattgtgccattgcactccagctcggcaacaaagcgagactctgtcaaaaaaaaaaaaaaaaaaaaaagctctaatctaaatgtgctgttatttagagtcctagatataagattaagaacatcattttctgtactgggctgtagaatagcctcacttcttgaagcaggcagaacaatttgtcctaacactcaaggactctgggctgctgagcttttatagttcttctgtccactttttatagatcttctgtctccttgctcccagcctgtgggcagtcactccttgctttttgttgcatctgtctcttgcaagtcctgtctgtctccttcccttgtttctcatctgccccagtttgtgaagctggatgacaaagcttgttaaaactatgagccaggttggtttatggattggagccagtaggcttggcataagagcgtaaggccgcatttagagagaagcacttgggccttgctttgatgggtattgtcattcctggttaggctgtgtgatggttaattttatgtgtcgacttggctgggccacaatgctcagatatttggtcaaacattattctgaatgttgccattgttaatggtggagggtgtccaggttcttggcatcttgaacaaagaattggacaaaatgcacaaacaaggaaagaatgaagcaacaaaagcagagatttattgaaaatgaaagtacactccacagggtgggagtgggcctgagcatacgggctcaagagcccagttacagaattttctggggtttaaataccttttagaggtttccactgattactttgtgtatgccctatgtaaatgaagaggctaaagtgaagttacaaagttacttacttggcatacaccctatgtaaatgaagaagatgaagtaaagttacagagtcatttactagctgtatggtgtatgccctatgtaaatgaagaggatatttcctgttatagctgaagtgtttccatttgatttagttctaggaagtccttagattccctgcctccaggccctcttctcctgcctcaccatggaaatgtttttttgggtttttttttttttttttttgagatggagtctcgctctgttgcccaggctggcgtgcaatgtcacgatctcagctcactgcaacctccgccctccaggttcaagtgattcttctgcctcagcctcccaagtagctgggattacaggtgcctgccaccacacctggctaatttttgtatttttagtagagatggggtttcaacatgttggccaggcttgtctcgaattcctgacctcaagtgatacgcccaccttggcctcccaaagcgctgggattacaggcgtgagccaccgcacctggcctaggggtgtttacatattacattactacagttacatttggacttggagtgcaacagattgccctccataatgtgggtgggctgcatccagtcagttgaaggtctggatgaacaaaacactgaccttctctaagcaagagaaaattcacccagcagacctctttggacatgaaccacagcatcagctcttcctggtcccagccgtctggaccaccttgcagattttgcacttgccaatctctctctctagacaatctatacacagtcatgcatcacttaacggcaggaataagttctgagaaacatgtcattaggcaatttcatcattgtgtgaatatcatagagtgtgcttacacagacttagatgatcttgcctactatgcacctaggtggtgtggtatagcctatggctcctaggctatgcacctgcacaccatgcttctgtgctgaatactgtaggcaggtgtaacataatgataagtatttgtgtatctaaacacatcaaaacatagaaaaggtaaagtaaaaacacagtgttataatattatgggactaccatcatatgtgaatatatgtgttaggttgttgaccaaaataccatgcagcatgtgactgtatatacagtcttgggaccccaaaatcactaaggcaaagggaaaagtcaggctgggaacagcatcaggcaaaactgcctcccattttattcctaaataagatagctacaaaaataaaaacattacatacctccctcacaatttgcccacaaggaaattccttgtggacaaaggacagatataactcagtcatccctctgctcatatgagataaatgcatatctgactgcttcctctgccgctttcttccttccttccttttttttttttttgttttagatggaatctccctctgttgcccaggctggagtgcaatggcgcaatctcggctcactgcaacctctgcctcccagctcccaggttcaagggattctcctgcctcagcctcccaagtagctgagatcacaggcatgtcccaccacgcctggctaattttgtacttttagtagagacggggtttcaccatgttggtcaggctggttttgaactcctgacctgaagtgatccacccaacttggcttcccaaagtgttgggattacaggtgtgagccaccacgctgggctttttcaagtgattctcctgcctcagcctcccaagtgacaagggggctgggcatggtggt

SEQ ID NO: 446 - DNA, 199434 bp, Homo sapiens
aacttaggcataacataacagaaaagtcttgtgacattagatttggcaatgatttcttgaatacaatgccaaaagcagaggcaacaaaagtaaaaataaattgtacttcatcaaaattaaatacttctgtgcaacacggaacactgtcagcagagtgaaaaagcaacccacaaaatgggagaaaatatttgtaaatcatatgcctgatgagggattaattcacagaatatataaagaattcccataacaaaaaacaaccagattaaaaaatgggcaaaggattttattagacattttgctgaagaagatatacaataagcacataaaaagatgttcagtatcattgatcattagggaaatgcaaatcaaaaccacagtgaaataccacttcacatccattaggatggctactttcaaaatacaaaaggttggcaaggatgtggagaaattggaacccttgtgcactgttggtgagaatgtaaaatggtacagccactgtggaaaacagtacagtggttcctcaaaaatcaaaacatatccttaccatgtgatccagcaattccattttccaggtatatacccaaaataattgaaaacagaaatgcaatgagatatttgtacaccagtgttctagcattattcacaaaactaaaaagacattctactaagtgaagtaaaagaacacaaaatcacatatatcatatgattccacttacatgcagtacctcaaatagtcaaattcatagacacagaaagtggaatggtggtcgccagcatctgggggaagggagaagaaggacttactgtttaacgagtacagaatttcagtttggaaagatgaaaaaaacctggagatggatggtggcaatggttgcacaacaatgtgaatgtttttaatgccatcaaactgtacacttacaaatagttaaaatagtaaaatctgtgttgtatatattttaccacaatagaaatagaaaagaaaatgaattgctttttgacttatgtatccttaaattatattttcttaggttaatcgtcctcgaagagagagagaaacaaaagaaaaatgaaaaaaggaaagaaattttctccacaaagactcagaaaagctacaatcctaagaagtcaaaactataatcggcttgagttgaagaatccaaggatctttacagttttgtgacctgtccaaggttacacagctcaccttttcattttgcactgggcccaagttatgtagccagcctgcttagagatctctacttaccccagttttctgatttataaaacaaaaataataataatattgttaaattaaatgaagcctaaagctgcctccctatgtatttttaatttggcctaaaggtttcttcgtacagagtgaactataacctgactagatgtgtgatctactcttgtgccaatcatcaagttttaaccaatcgaagggagccaactgcttaaaccatgttcaaataaggcaaatgtccagctgtaaccacttcagctgtttctgtgcctcacttctgtcttctacacatcactttcctttttctatccataaatgttttttgatcatgcagcagcatgaagttgatctgaacctactttggtttgggagactgcccaattcgtgaatcaattaaactgttaaatttaatttgtctaaggtttttcttttagcagtaggttccccataggagatttgagaagattaaatagtaaaatagatggaaactgaagagcacatgacaattacttctaaatttacccaacaacaatgtgttgattggctactgtggagcaggcactgttctaagcactggagaaatgctgtggaaagttcctctcatggaccttacacttccgttagggaagattgacagtaacaagataccattacattctatcacatagaatacgtactatgaggagaaaatggaggggtgcaatgcagcagcttaatgaccacatcagcttgagtaatcaggagtgactggtccatgaggtgacacttaaatgataactgatgccaaggaaggaagaatcaatcatgcaacaatcagaaggaagagcattccaggcatagggaacagctagtgaaaatgcccaaaatgagaattaactctgcgtttgaaagacacagaataaaggcagggtgggtctagcagagtagcttataaactgtttcaggatgaagccagagagaagattcaggtttgataaaaccaaaaaccacagacaaggagttggtgcttgattccaagccatgggagagttttaagctggaaacacttggtctgacatgtatctttaaagataattctgatgactgtttgcagaatgaattttaggaggcaaagtggaagcaggcaggtcaagtaggatgctactgcaataatataagcaacagatgatggcttagaccaaggggggaggggcagggatgtagagaagtggttggattcatgataggattctacctattgaaggtaaaatcaataggaatttctgatattggtggtgagaaaaatagatcactcttgagcaattggatggataaatgttcactatgactatgtaaataccaaatcattaatctctgcccactatgaaataacatcctaaccggaaaagtgtcctgggtatggtgagcccccagtacatgttgattgattgaacaactgaatgaatgggggagggaagatgctgaaagggaagttgagcggggagctgaggagaaactttgcctactttacaattttgcttagagccagacctgctgactggtctccataaaaaggaaaaacaaaaatcaccagaaaagaaagtttgctgtgtggaaagatttaaactaacaaaggaaaaggaaagggccatgagggcagggagacacatgtttggacacatcccctgcttggaaggctgactcctgaaaagaccagtatctgatgagtgtgcaggaaaccctattgccctgtcagttcctactaacaaccgggtgcatttatgtctcctctcaaagcatgaagcagaggaaccagagagggtgccagggccaagtaaaggcatggacatatattcattggcccatctggccctctctgcaggatgggaagcattaaacagaggcagcacactggctctgtgtacatcctacctagagacagaaacatttcaactgaaactgacagtctcttgaaacccggtatctgattctcacaataataaccctcctaaaaaattcagtccccaagaaatggcaatggactgaaagagtgcctctctatgaagattaaaactttagaatgttttctaaaaatattttaaaagtttagaagattttctaaaactattctaaacgtttagaagattttctaaaaatcttctaaacgtttagaatatttttgtaatcatgaacagtgctaaacaggtatgtgttagggtaaaccataggaagttgctagggttagtccattttttatctaaaagagtaactatttcatgtggttcaacctgatctctgtctctgcaggctgatgaagtgctttggacaaaataccaccataacaataaatcttaccttgaatatatccccactactccttctatctccaaatcctagaatgtttctatgtgttctttgagaaagtaattttgggggattgaagcaatttctgattgcctgggggagaaaataacaactatattcctcgatgatgtacccagcattcaaaccaaccatcagatgctcaaagcttaaagaaattcagagggggagaaatccccttagcatgggaaggatgaaaagagtattttacaatcctgtaaatgtggaaaggcagagtgaagcttatgttgtccaactcacttgttttatcatacaagctaaggggcttgcacaaggtcagggccaatagttcaaggcagaactggagccagacctatcatgtatattgaactaaccattttctgaatcaacacacaccatgtatggaaaggtaagaggactttacaggtgaaaataatttcatttgtaagatgtagaaaaatgctaaacacaagttacaagaatttgacttcccagatatcaaaataataacccaatagaataagatgtgaaaaaaaaactcaccaagaaacacggagattttagaatggtgcatttagaagaagctactacggcaggactgaatggcaggagcagaaagaactgattttataagcagctcggggaattgaaagaaaaaagcagcatgtttagataaatgcttttttgaggatggtggtattttaccagaattatataatctgcttatttatgcagctgggaaattttcacttccatgagttattctttgaaacatttgtagtgagtgcctactgtatctccagcagtcttccaggtatctggatatatcggttaacagacaaaaatccctgctcttaatgagcatatattctaactggggaggtagacaacaaacaataaacataaaacacaagtgaattgtatggtcacttagaaagtgatatgtaccgagggaaataaaagatcaggatactgggaagctggagccgtgagcaaggagggatgcatgttgaggtttttagtagtgtagtctgggcaggtctctttgagagagtggatttgaataagggcttgaagaaaatgaaggctgtttaggggaagagcgttcgagatcttgacaggtcactaaggcagagatgtggcgggcaggtgtgtgtgttaccacctgctctgtagagctggtgtcatcccagtttctacagcatggccaagtcttttacatataataagaagccttgagtgatccaatgtgtccacgttatgttacgccagagacgacaaatccatataatggaactttgagaatttggttgtggtccaagtatgctgtggttgtgtgaatctcagctgtggcctttatattcactcttcagagcttctgtggccatggccacctctcagtgtaacaacaaagagcccccagctcaggtaagggttttaatgactgaacccaatgaaccacagttaatccattcattagcttaggtatcaaatatcagaatggtggctgccacagcaggcaaagcataagactagagtaagattactcatcatctattactagttcaatcacatactcacttatcgacgctgaataaacggctcaatttctctatgcctcacttttcacatctgccaaatcaagataataccctttgctcagtatatttcacaaaagcatagtaatatttaagtttaatgatataataagtatgaaagtatgctggaagctataatgcacaaggcaatatggcttaattatctctatgccctcagagtacagcataatgaatggcattccataagtgttttttgagtaaataagcagacaagtaaaacttactgtgtgatgacaaccaagaaaaaaagtcatcccatcggacataacctatgtctacacaatcaaaataaagataatatttagcatagctacctttataaatcaagccaaataatatattattctagattttcacttgaaactttttttaagcaggagttatttcaaaacatgatagaaaactatagactactctcagtttagcttgttaagtcctttgccttacccaaccaggaagaagagaaggacaaagaaaaaagaattgcaatattgctcagatgatcagtataaaaaagacatcaaacaaggaagaggaggaggaagataattcctttttaataatttcaatatttggaatataaatagccattaataagatgtaaaggagagataaaaagtgttttggcctctagccaagatgtttcaggtgccaggaattctgcccaatgagtagacaaaaggaatgctcagctgaatctaacaccaagctatttgtagaataaagctggatttcattaaaaatgcctactcagcaagaaatccacagggtgcagcagaaacacctctctctcccactgggagagcatttttttaactactagaaatcataaacgggtattttgaaagcttgttttgttagttctgcttgctccaccttggccagaatcaattttatcaaggtcccccattagtcatggcggggtccatggaggcatttccaaatggttctcactgatttatcctactgaaagtttttagggacttactgttgttatctcttttctaaaattgtcacttcccaaagcaccactttctgttggaaaaattctaggagttgttggatctgttgaaactatgatgcaaattttcaattatctagatagctattcaagaaagatctatacctagctgccgttttgagatctttttcttcttcagttggtcaaaagctgccaaaagaattttttaaaaaaccttttttaaccagaaaattgacctcagatttgcaatttctagtcttttttctcctgcaagtaaaagatacgacgtaaacagctaaacttgttctacttcataacaataaactccaatcccattggccatctcacaaggttcgggaagaccttgttcaaggttcatgaaagaccaaagcaagtcaagtggatgtctcagcatcaacctctggatccacattgcctggattcaaatccttacccaccactccctagctttgtgacctcggacaagttactcatggtctttctgcctcagtcttctcacctgaaaaatggcaataatagtaatacttatgtaattagttactcatcctttctttgtctcagtcttctcatctgcaagttataaataataggaatacttacacattaggcttatggtgaatattcaatgtgttaaaatttaaatgtattaaatcaatatgaagatttggtgacatttatttaaaagattaaataagttatcagttaaagatcagaagagtgctgggcacatggtgaaagctatgtgtgagtctgccatgatgtgatggtgatcatgatgatgatgaaggtggtgactcctctttcttgaatccttctcaaagcacacgtgaaccatgctattacccaaactgatcaatgactaaaaactcagtgacaagcatgacatagagaaaagagcagtgaaacactaacaagtaacagaatcctacagccacagaggatattccacattgttacccaggaactttccaacatttcccaatttttttccttttccaatacaggaaaagtctcttcagattccaatcagaaaattcctcctgtcacccaagaggaaactataacctctcacattgtcgccactgaggacagatcacaggggcaaaggaggtgagtgctaatcaaggatggcatgaagaggaggcagtgagagagcaaacagcagtcctggggagaggacagccgcacgcagtcttatgtgactgtccacagcacaaggaggaaactggagggagcacactgcccatggaatattgctgattaaaaaccacttgaaatgagacagaaattacaacaaccttcaaaaggaatatagacgacaataaagaaagtgacatttcacccaacacagacacatggatcagcaaaactgagacaacccaggacaggggaaaatccagacctacttcagagctacagtgggctcaggatagaggtctgtatagctgctgtctgttgcatattttaactgtagagtaatagttaagggtgactgaatacctattgtgtgctaggtaccagtctaagcactttacttgtcaattgcaggcacattttagggagaggggacagggatttaaaataacatgaagaatccctgtttatagcaatcaaaagagcctagcagaaacaaaattaattaacacacctattcaaacaatttctaaaggatgccatgtgcgttataggcattttttaatgcaactaattgataaactctatgcacaggtctctgtggccactggcaggctaacctccacttctaggaactgaaaaatgaaataatctacctgctaaagtctaacatggcatttcccttagagacactgatagaacacagaatctggaggttgccaatataaatttgcaaaaacagaaagcaacccttagtctaaaaagcttgggaaatgctgccttaagcaaagttgaactgttttttgtttcatttggttgcgttgttttaaaggacttctcagaactttcaatggactaacaaacatggccaatccatgagaaagggacatgagagacaggcgtcccaaattatctggcgagagaattcttccccactacccctacagcattttccataactaaattgtatttaataaaacattatttaggaaatgctagtatgggctcattttattatttcacctggaattgagcctgttccaagccccagatttttatctacatcctttagaaagaaaagaatcagaaagaagcatccaatttatgtccctgttatattttttaaggtaacacagctgctgtaacagataaatatcaaagtctcactggcttcacacaatcataatccatttctcctcaagcaacagtccagcgcaagtgaaatcacccaggaagctttggaaaattctcctgtgcgccactcccaggcattctgatttggttattctggagtggagctaagcattaggccttttttttttttttttgagctccccacccaggtttctgggctggcctctgaggggcctatgttggaaaagtttcctagattatcggtcattataaatgttgtttcaaaagttgaaaggagtcggggggagagagagagagagagagagaaactttgtagagaaataaaggatcatttaaccaaaattagtatctgtaagtgcatgaatctcccatttaatttagtgtcatgagacatgccctggtttgttaataagtccaaaccttatccttcctggtgctgggtctgacacgtttccatcatggtttccaatagaattgagaataccatctattatttatttattcattaaatattgattgtttcagcagcagagggcagtggttgacagtactggctctggagccacatagtttgaatactagatttaccacctattagctgtgtggccttggataaattccttaacctctctgcctcagtttcctcctctgtaaaatgagaagaatcatcctgttttaccaagtactgtgagaattaaacaactaaatccatggagaggcctagaatagtgactagcatgtagtaagttttcaaaaagtgatggctactatccttaactgttttcattattttgaagtgcaggtctctgctctaggaatcaaggggtacagagaagatgaggctatattcttctgtcctcaaggcattcatagctgggcatgggagacagacagatagatgtgacctcggctttcatggctttatgtgcaaaattgtgggagcatcttcagggtcctgtggaggggcagcacaggaaggcttcctggaaggggtggctttagatctggaacttaaagggtaagattgaacctacaggctcagtcacttgttactgaagtggcatggaaaagaagaaagaatgagtcaaaaacccacctgtcagcatctgcaaggagactttttttgcagtagaggttatccagggtgaagccaccacctcctgcaaggtttctgcaacattcattccatacctgggaccgtgctcacttatgggcactcccccaaccccgctcgacagcaagcttggacctttgcattggcaccaaaaggcctgcagtgttccatggcgtggttgtggaaacattgacagggccgcagggcagcagtaggcaggactagaggagggggcagagtagaggagaggcaggaccgttctgagagcttcgcaggcacaaaaatcccgggccaagcctctgcctcagcccctgcaggatatcctgtcattcagcaggatatatagaccatttacagtggccaatttcaccaagactcctggatttgccatttttcctttctgaaggcaggtctcacctatctcctggttcgatctaggaaaaaggaaaggaagggatttaaaagtaaacagtgaaatgagaaagaattcactgggagtttatcaaactaagttaaaatagctaagtcagcctgacaggtgcttggcacagagaaggagcaaatatttcctcatgatgctacaacatttagtaattttttgtcttggattggttgtacaaaatttctgctccccagctgaaaccacagggcaggtaagaggagacttacatatttttttcatttgttaattgtcatgatatgttcaaaagcttgtcgttttcctctgttgttatgggtaaagggtgaaatctggactttataaaatacagagaatgtttttggagactaagtcctaattgtgatgcaccatctttccgaaggtgtgctaacccacttgttgctcttcctgtactgaagcgccccgctgctgttgggacctctaatcttagtgctaacgatcctctttccagtgcagctgttggcgtcttgtttttcatttgttctagtagtctcattactgtgaatatctaccatcccatcttcctgactagaaaataactatggctgtggagagatggtctggggaattccagggtggatatctcactaaggaacacaagtatcagaaatatttccaaaatcatcaggccttcaccctttcatctcttctgccttccacagagctgtagtaaaagttcccagggaggtcttaccagtagcccctatgaagtacatcagcacaccgaaccctcaagcaagctcaccgaggtgtcatcacagagtgaggccagctgtcagtgagacaccatgtgatttctgatccatcaagaatgaatcttaaccatgattctgcacctgtgccaggcaaatttttatcaacaccaattttattacagttggctgcatgctctgataatgttttcatgaaaatatgggaagatggcctaatggctaagtgctccagctttgaaatttggtaggggtgagtttgaactgtggatctcatttttctgtttaacaaataggtctgaggatcagtcatgatcgtccacagctgtttgaccctgagcacgttttttaatctcttcaagcttcagtctcgcccctgacagtgctccacaaatggtagtaattatcatcaccatcatcatcttcttaatcaccatcatcatcatcatcattatcaccaagtgtttgcattcacacagaaatcagaccttaactaatttaaataagctgaatttacttttcagagaggacaactttgtcaatactgtatgagacagacaatgagccttttcatttgaaaagggcaatttgaaggtcaagatgtttcttaagaagagggttttaaatctagcccacaaagaaagaaaagacaaagtactgtaaccccacatacttatccaaatgtgaaaccctcatgtaaagaaaagcttgctttcaaaaaaaatgtgaaggtgtcctgacaattaaaggaggttaattcaaactctatctaagtgtagcttttgttattactcaataaagaaccttctagtgctattttggttcatgatgatcaccaaatgaaaactcctggtaaaaatagaaatttcagttttctatactccactcaggtgcaggaaagagaaagggctaatcaaggaatcacaagaccagtaactcacagggtgaccttgggcaagtcactgcaacacccctcacctcagttttcttccagctaaaatgaggatgatgatacctgccctacttatcttcagagcagtgaagatcaaataagataatacctttgaatggatgcataaccaataatcgttctgaagatgtaaagtttctttttatgcaggctttatatatttcaatgaacttagaagcagtggtgacatttccaccacgaccaacctattattaggcccgtggatgagctgtgggataatacagaagcatgagacacaatcctgcccaagaagaagcctacctctttctgctctgtcctatggcctagagcaaacctgttcaaaaagcagggcctcaaaatgtgttggtaatgtcttttttgattggcaggtcctttctgccttcccaggaaatgcctggattagactccttgccctggaaaggtcaaggtttggggttcaagagatcctaccccttctctctactaactgctctatgctcagttttacctcagcatgttggcacagcatatttctaagagtttagcaaataagaatcaggtgtcttttaatggagtgcaaaaaccaacaaaatgtgctccactgggccagccacaggaagagtagaagttgagaaaaggaagaaaaatgaatgtggttttgtgaaagaggtggtgtgaaacagggtcttgaaggatatggttcagcagcccagtgagaacatggcagttaggagaggaaacaggcacaaaggtgagtgaagagttacagcagccagcattcaccacctgtgatacttcagacatttttgccaggaaatttgcacctgcttaagtgaccgtcatcatttaaaggtctcaataacctcaagagtggttattaatatctcctctttataggtgatggcaaagggtaagcaattcattcaagattgtacacttagcaagatatagagtttgactccaaacttaggtcttttgatccccaagtttagtctctctttgttgtacaaagctgctccatcttaagcttgatgaggaaatgaagaaaagttgaggaaagggaggcatctctcggggaggatcagcctcggcattatgagcaacaggggatcctaaagagtgccaaattgggtctggatcattcaatttagtagttacatatccaccaccttatgttgctaaataactgtttctagcacatctgatttccccaattcatttgtttaatcaacaaatattcactgagcactgctatgcatcagatactattttagggcttaggtacaacagtggacaaaacagagaaagatccctgctctctggaagcctacttttcagttggattgtaatctaaagattgcaaatatctctgaaatagtaactgtatcctccacggcactggcacagtgctggctccagagcagacattcctgtggaatcaatgatgaaagaacatccttgagatctgctgatctatgaccaattgaccttgaataacctgctttacaaatttttcacttgagagtgtattctgccatatatttcaggttccccacttggataaatgtgggtaataacattatcttaccttgctagatttcagactctatctcaggtatggcaaatgtatggtacaaacagtggctcttatttcacctacagccatggcagacattgcttattaatctcaatactctttccagataagattgaaaggagcaaaccagtcattaccaatcaaccttatcaccatccctgacgttccattgagatgattggagacattccagtggagaagattggccatgctagatgttttgcaagactctgataacaggaattaatgttcttttttttaatatttacacaggcaagaagatgtgataggaagtctcttcttacaattaggaccgagtgccgatcctgcgctctcaaccttggagtcaagtgcccggatggttacaccatgattaccagtggctctgtaggggttcgagattgcaggtactcatgagaaaataaacgtgatggaactatgaatccaacttgaagctccctgtctcaaaaactgcaaagcatttccatgacttttctcttgctctaagacaataagcccaaacttaggtaactcacaatttatgaacttaagtctaaaatatataaaatatatattgttggccaggtgtggtggttcatgcctgtaatcccagcactctgggaggccgagatgggagtatcacttgagatcaggagttcgagaccaacctgtccaacatggtgaaaactcatctctactaaaaatacaaaaattagccaggcctggtggcacctgcctgtaatcccagctactcaggagcttgaggcacgagaatcgcttgaacccaggaggaggaagttgcagtgagccgagatcaagccactgcactccagcctgggtgacagagtgaaactatatctcaaaaaataaaatatatattgttattcattcacattttaatacaaaattgacttattttgtattgcacataaacattctcttttcattttgcctgtattttgaaaatctgggttttatttaatttggaaagaattctagtcttgaatgtgttaaaagccttgagtgtgatagtcatctcttcagctatggaccttgatactaattagaagtcgaagaagggggaaagatgaattgcagcatggttgcattttatgtaaactttgcattcttgaagacctcttgggattcaaaactctgataactcaaggctaattctggcaaaggatgacaagtggttctgctcactagctaatgggtgcagccatggggctcaactgcaaatgcaatttgtatttgcgcagcctgtttctttagaaattagatagtactcaatgagtttgcttttaattccggatggaaggatttttttttttattttgcatgaaatgaaatcttaacactattatatcacactattttaaattcacatttgcttaatgtgaccacactatattctaaaatcaaaatcatcattttaaataaaagtttcccagcattaactaacctagaattagcaagcagtgggtatcatcagatgggataacttttacctgttcctccttttggaggttagattctaatacgatgattgaagttcgtatgatacgtgattaatgtctctgcataatcaggacttgtaacaccttgattgcttctgattctttctgaaaaaagaaaagaaaaaaaaattagcaagcatatgcagcagttaacactcaattgccaaagctgaaaacttttttgtactggctacttttttgttcattgccaaggtggacacttggttatgttccaatacacaaacacacaagcacacacacacatacacacacacacaggataaaacttttgcattcagaaatgttttagatttaatgactttggtctatcattcatctatgctggaacaaactcaagattggttcttttgttttatgttctttcgttctgtttgaaaatcactttattgagatattactgacatacaaaaacctggacattcttgatgtacacaacttgatgagtttgaagataagtacaatccatgaaaccaacaccacaatcagtgtcataaacatactcatcatcttcaaaagttttctcccccctcttttttgtgataagaacgcttaacataagatctcctgtctttgcaatgtttaagcatatattatgttattgtttaggcactaaatctctagaatgttttcatctttcataaccaaaactttgtaccctgcaaacaataccttcccattttctcatccttccaacccttaacaaccaccattccactctatttatattcctcatataagtgggatcatatagtatctgttcttctgtgtctagcttatctcacttagcatgatatcctctaggttcatccatgttgtcgcaagttacaagatttccttcttgttgagggctgagtaatatttcagtgtatgtatataccacattttctttatccattcatccattgatggatgtttatgttgcttccatgtcttggctattgtgaataatgctgcagtgaacatgagagtgaagagatctctttaagatcctaatttcaatttttttggatatataaccagaagtaggattaatggatcatatggtagttttatttttaatttttgaaggacctccatacttttttctacagcagttataccaatttacattctcaccaacagtgtacagttgttcccttttctccacatccttgccaatacttgttgccttttgtttcatgctttttataataaccatcgtaatagttgtgaggacgtatcccattgtggttttgatttgcctttccctggtgtttagtgatgttgagcacctttttatacacctattggccacttgtattctttcaaaattagttcctgaagggatatttggtcctgcccttggactctccttctgcccaccttcgtgaagaagtgtccctgccagtattctcaaccattcaaaaaaagtcaactctatccccaacttgactgttcgtaaagtatgtgactgtgctattaatcagctgtatttcaaggatgggtttgagaggacaaccttgaattcatcatcatgttattcttaacagcagcccagttgaaagaaatggaaagaaacaacatttatgaaggattgtctctagatacactaagtctaatcctagaataagccatgcctgcagagatccctttaaatagacaatagtgtttaacctccatagaattgttattccagaactatatctcagctggcactagaaactcttctaaggaactcatcattttatctcctacaaggatattgtgggaaatgttccttgctgcattatactgcctttgccacaggcatttctacatctgcaatatctccaataaatatgctaagcctgagcaatgggtttgctttaaatccacacatactgtgcattttgtaactcatgatctctcccttcctgcattgactgctaggatactcagtgataagttttaggtatacttctagcatgtgcctaagccttaatatttatttcatctactaacttcacttctgatatcactttagatatttcccccgtatgttcattgttctctgattttttcatccagttcttacaattaaaaataatcataattaagttttatgctacctagaaagccaaatgtgttccatctagatatttttaactgtagataaatattaagacctaaattgaaagctaaggcaattctaccacctagagtaactgcattgctcttatcgtgggttaatgtcctctctttaccctccaaggtacacctttgaggtcagaacatactctctgtctctccccggatgccgccatatttgtaggaaggactatctccaacctcggtgttgtcctggccgctggggcccagactgtataggtaagtggcacaatgcttggactttgagacttgcttcttggtatctcatttggtagaaaattgagatgaaggaagcccaataaaaagaagaatgttaacatccgtttgtagaaatttctgtgttagtctatatgtagaaaatctttcttgccctgttagctttcacaaagcaatctgctttactgctgatagagatctctctttaaaagaattcccttataagccagaaaaagggacaattgaaaggatacccatttttattttaaaagatatttgcaaaagaaaggaagtcaaaacctgggctattaggacccccaaatacaattttctttaagaagaaattttgttacaatgtctcaaagactgtagttattgtttggcaaccaaaataataattaaatattctaaaaatttgtcttaggatggaatatcaaactttcaagtggtagatttaagacacatcagggtaaagaaactgtgtaaagttaattgtgtagagatgcaaatacacatatacataaaaattaattctgaccaggttttactgtaagcaaaactactagcaaagtctgaatcaatggtatagttagatttctgcaatcaagcatagcatttgatagctgaaattgaacttttatccttagtatagatactaacactcaaatagtgactgagtcatttctacctgtggaaattatgtaaagtcttctttttttggtaggaaaaaatcaggtattttaatttatgaatttgcaattcattccccatcttcttagatgtaatgaaaacatctccttaggatccacataaaaggagagattggttctcttttgctttgtttttttttctgattaaagtaatacaagcaaattatatacacttgtaaagtttacaaaggtataaagaaagaaaaaatatcaatttgtattctgtcgcatataggaaaccttaaatattttggcatgtttcagtcttgggtttttttccatataacttgtaaatagttgaatccatactgtatgtataatgtcttttgggttttttgtttgtttatttgtgtttttaactaacgattaaatgaataaatgcttgtatttactcaatattgctgacattaggtaccagagaggtactcagcttatattaccagatgtaatttttaaaacaaatctttgagttagacatttttatccccattttgcctatgagaaatcagattttaaaattatattttgccagtttcctttggactggtaagtgataaagcaaattcaagttcaaagttgcctggcaccaaagcctacctctttctgctctgtcctactgtccagagcaaacctgttcaaaaagcagggcctcaaaatgtgttggtaatgtcttttttgattggcaggtcctttctgccttcccaggaaatgcctggattagactccttgccctggaaaggtcaaggtttggggttcaagagatcctgccgcttctgtctactagctgctctatgctcagttttacctcagcatgttggcacagcatgtttctaagagtttagcaaataagaatcaggtgtcttttaaagcaattaactctgttaatcaaattcagtgtcttttaaagcaattaactccgacttccagattttaagaacattttttgtgccaaatgtggtcatgatcatgtctagttctcatagacattttgatacaatagaaagaacttttagatttgcttttctctttctaacccacaaaaacaaatctgatgctaagttactaatcagaaacattgaagacaaggaacggctttgtcaaagatgcagtacaaaagtcagcatgtccgacatatgaatgtcagaaaacagccaggagggcaaaagaacactgggccagcagctagaacttcatcccaccatttactggttggggcaagtgactttctgcctactccttattctcctcatctgtcaaatgggggctaaaagtcctactttacaaaactgtagttgagattttaaaacactaacctaggtgataagacttggcaaagtctatgacaaaaagaaggaattttgtaagtgtttaatgaataaatgaatgggtgactcaaagtcaaaatagacctctgataatgaaagatgaataaaatgacactcctctgaacccttttttaacagtgggtaactcttaaagcatgagcaggcaaaaaggattcaagatcttttagcaggtttatgccatcacactgtgctatgtgcagaccaatgaggcaaggtccacatctacaaccaaaagagtccaaaaaggtagctgggcatggtggcatgtgcctctaatcccagctacttgggagactgaggctggagaataacttgggaggcagaggttgcaatgagccaagatcatgccactgcactccagcctgggtaatagagtgagaccctatctcaaaaaaaaaaaaaaaaaaaaaaaaaagagtccaaaagggctctttgaatgttcaaacatttccttcaaacaggcctcaaagccagggaagcaaaacatgaaaactgaggcctggacattatttctactgtcctttcactggggcaaaacggtactcctctttatcttcatcttccaaacacactagatgtctcgaaaggcttccttcctttggctagggaaaaagataaaacctctacttggcagtatattttacctctcacattttgtggtgatgacaagcaaaaccttgactatcactttacatttccgtaaggataaggccatttcagagctgctgacgtgggtctatccttctttctgaggaagcacattcccaagctccagaatggccttgtttccaaagcaaatggaacatccacttcctttttaatgcattgacaaatacattcatatgtaacacttctgggttatttcaaaaattaatatatctcactcaaattgggaaatcaccctatggtcaacgctgaaaacttggagaaggtaaagaagcgcaatgaaaaaaattactatcatcttctaaaattaagaataaagcatgaattctcacttggggaaaaaaataatattatcttgacataaggaaggtatttctacctgaatgtaacctgcttctccctaattaaaatttatactactttatcaaatgtgcacatggagatctttcctcattagcacaaaaatacatttctactttgaaacttaatcatgtctgaacagccgatattctatttgggatgaaatcgattttttaatttgaacatcttacttttttttttattctgccatgaacgttaatggatttgtgtaacaactcaaagtaatggaaaatgaacatgtgcaaaggagttacacccaaactcagttgtagacaaaacaatctgattatttcaaaaagaaatagtcttgatttttcttttttaggtcaatgtcatcaaattatctaaatttattttttatatcatgttatttgcatttccaggcctctttttctttctcactgcatttttcttgccattcactacccaggttacaaataatagaccacaaggatttgaaaccatccttttaggcatttccttttttgctctgagtgacaaataatgcggagttcacttaaagaacatatttcacttcagtttcccaggcagacaaatccaacaagagctataaatggaatattgggacatattttctgcctagcactgttcaccaagcttttaaacaaaggtggtgacatggaataggcacctctagagtttcttaggagataaagttacagagaagtccctggtctcttgtggggcaggaagtgtattatcttcctttaaagaaatagaccagctgatttgctgacagcttataatggtaaagcctcctgcattaggaaagtcaggatgcaagagaccaccagagtagtggtgacccaaggaaatgtgataatgacctagaatagtcttatcagcttcttgagcatcacaatgcattggaaacctgcccttatagcaaattatataatatgtctttcaagcatcattgctaagaatgtcaattttaccatagttttctctaatgggggcctgagatgatagaagatgatatgaaaagcaggaaataaattacactttttcgttaaaaattttgtttaaaaaccaaatgagctgttttcataaattgttaaaacaatctatccaggccataaaatgaggattcctcatacccccacattcctgctaccttttctcccaagttccttccagcgttggccagctcataaaaaatcaagcatttattaagcacctactatatgctgcgtacaatcagatatatgatagaccccattcccaatcacatgtatgataagtccctatccccaaggagctcacagactaatgagggaaattgacatgggagcagaggagtaaaaacaattgtacctgtgagcccaggtgaggacactgggactttgaggagttttgcagcctgcccaaagagaaccagctaacaagtgtggagccacacaccaggaaacagggactgtctcactgcagaccccagttctagttcattactctctcctgctttccaaaatacctggaatattgggacatattttctgcctagcactgtgcaccaagcttttaaacaaaggtggtgacatggaataggcacctctagagtttcttaggagataaagttacagagaagtccctggtctcttgtggggcaggaagtgtattatcttcctttaaagaaacagaccagctgatttgctgacagcttataatggtaaagcctcctgcattaggaaagtcaggatgcccaaagcccacccctggaattcttgcttccaccattagctgggtgcctgctctgcctggggttggttccatgacacctgagctcccttctgagaggcagcatggttttacagtaagattgcagactccagagtcagatttcctggcttccattcccagctttattctatttcagttctgagacttactccctctgcagggttgccagatttagcaaataataatacagggcacccagttctatttgaatttcagataactaactaatctgcaaacaatattagggatgtacttatgctaaaacaatattcattgcctatctgaaatttaaatctaactgggtatcctgtattttacctggtaaccctattctttggtactatcttcctcatgatgctaacacacccaccttccaaagactgcactgaggtgagctagtatgtggaaagcacttaagatgtgcctggtggatggtaagcctccagaacatgttggttagcatttctgtcttttgtgtttctcagatcaccagtgggcctctttatttcagggagtgtttactgacttgattttatattctaaagtgctgacctgttatactctgccttcaggcttaaggactcaaattcttaagttaggcctgattgcaatgccagttccaactcttaacgaccatgtaatcttgggcaaattacctcgcttcagtattcttacctataatctgagtgatgaagataataataccttcctcatttagatgtgaaaatgagaacctacatgaaaagtggttggcaatagtacatgctcaataaattctctcattaagctgataactaatttcctacatagtttcagcactttggtaaggacatttctgtacatctcatttctttgtgtagcttatggtcccatatgtgtattgtttttctcatgattgtctgcctttctatgggtggacccaatgggtcacactgatgtctcaggccacagcaaaggcctgtgcttgaggagtgtaaagaaggtgatctcttagtcagctacagtttgctacaacaaaatactatagactgagtggctgaaacaacagatgtttgttgaatgagagaaagagagacagagggcactctagtgctccggttttccttatttttataaggatactgatcccatcacagagactccaccctgatggtttcatctgaacctaaacacctcccaaaggccccacctgcaaacactatctcattggaggtcaggggcttcaacatatgaatttagggagacacaaacattcaggccataacaataagtattcaccttggcctttcgtccattgggtcacaagccactaggcaagagggctgggccagggtgaagcacctcctatagagaaaacctcacatccattgcagaatatttgatgttgtggctcaagaaagcccccaggagatagcatatccagccagcatatgccttcaccctttgcacagctacaggcagacacctgaagaactgtggaactcctgaccacagcaagagacaggcacattccttcctgtcctggctaaattttatttcactttcttgtgaaaatatgaagagaaattattgccagctttgaagataatagtaagcattcaacaaatgttgaatgaatcaattaaatgaatgtaaaatctatgcaaaatattataagtagtccatacagagaaacaaaattacaagccagagctgaatgggaatccttatctctgagcctagtggctgtgaccttgttaccaaaccttgctaggcttcagtttcctcttagataacaacttcataaggctattgtgaggattaaatactgagatagtgcacgtaatgtgcttggcatgctacccagggtctacattgctaaaataacagcaacaacaataaagcaagggcagcacaaaagaggaaaaaaaaaagggggagtcaagaaacctttaaaggggctgggcgaggtggcttgcgccagtaatcccagcactttgggaggccaaggagggcagatatcttgaggtcaggagtttgagatcagcctggccaacatggtaaaatttcagatctacaaaaaatacaaaaattagcagggcatggtcgtgggtgcctgtaatccaagctactcgggaggctgaggcacaagaattgcttaaacccgggaggcggaagttgcagtgacccaagatcgcgtcaatgcactccagcctgagtgacagagcgagactccatgtcaaaaagaaaagaaaaagaaacccttaaagaccaagctctggcttctggaatgtgctcagcaatgctttgctagatggctatttgaacctgaagaaatgcctcctgaacatttattttcttgcaactatattaaaacattcaaattgaaagatttctcgattgaaagtaggaaattatataacttaccttgtgtttaaaaatagacatttatgaatctagtgtctgaatttgttttcctttccagtgagaataaactatagaaaaggatgtttctaaggtctaaatagaaatggaatttaatcaatcattttttggatattaattgccttttccacaccagtctttgagacacatgatcagtgctaatagattttttaaaatttattatcatgatttgcatacagtaaaactcaaccttttaagtatacagctattcaagctttgacaaacctgaagagttgtgtggcaaccgccacaattaagatagggaacagttgcatatccccccaaattctgtgttgtcaagccctccttcaactcccaatccctggaaaatactaacctgttttctgtgtctataattttgcctttatgtcatataattggaatcatacagtatgtaaccagtatgtacctttttaagtcttgtttctttcccttggcataatgaatccgagatgcatccatgtcattacctgtatcagtagtttctttcctttataatcctttgcagtactccattctgtggctagacacagtttgtttagctattcactaactgaaagacatctgggtttgtttccagtttggggcaattaagaataaagccaccacggacaatcacacacaggttttggggtgaatgtaagttttcacttcattttggtaaatacctgggagcgggtgtcctggattgtagagtaaaaatatgttcaactttattagaaactgccaaactgttttccaaagtatctatattatttttcatttctatcaacaatgtatgaggagtccagttgtttggcatccttgctagcaattgctataatcagattttttatagccactctaatggatgtgtagtggacttgcattttaacccattttaatttgcattttttcatgcgcttatttgctatttatatattttttgggttgtttgttttcttattattgagttttgagagttctttaaatatttaagatattagatgtgtgctttgtaaatacttcttcccagtctgtgtcttgtctttccagtctcgtaacattgccttttgaagagaaaacattcttaattttgatgaggttcaaatgtatcatgcttttatagatactgcttcttgtatcatatctagaaatctttgaccaacctcatatcacaaagatttttttctatattttcttctcaaagctttgtagttggctttacattcaggtctatcatccattccaagttaattcttttttttgtttttgttttgttttgttttgtttgagatggagtctcgctctgttgcccaggctggagtgcagtggcgcgatctcggctcactgcaagctctgcctcccgggttcacaccattctcctgtctcagcctcccgagtagctgggactacaggcacccgcaaccacgcctggctaattttttgtatttttagtagagacggggtttcatcatgttagccaggatggtctcgatctcctgacctcgtgatctgcccacctcagcctcccaaagtgctgggattacaggcgtgagccaccgcaccggcctattccaagttaattcttgtatattgtttgaagtatggatcaagattcatttctttgcatatagataatttcaaaaactccagcaacatttcttgaaaagatgatcctctcctcataaaattgcctttggaccatcgtagaaaattaattgattgtctatgtacaggtctatttctggaccctctattctgttccactgatgtatatgtctatccttccatgaataccacactgtcttgattactatggtgttacagtaagccttaaaatgaagtagtgtaagtcctccaacttgacctttttcaaaattattttgcttattctagtacctttgcttttccattcaagtttaggatcaatttgtcaatttctaacaacaaaataagtcctcctaagattttaattcgaattccattaaatcaatagatgcatttagggagaactgacatctaaaaatattgcttcctcctgtgcataacgaccccgtagctctccatttacttaggacttcttttattttgtttatcactgttgtataaatttcagcttacaaattttgcagaattcttatcagattcacacctaagttcttcatggcttttggttctacttctaacagttttttgaaatttcaatccctaattgttcattgctagtttatggaaatagaattgattttgtatattgacctcatatcctgagaaattactaaattgatgtgttctaataactttctggagatactttggaattttctccatagacaataatgttgtctgtgaatagacaactttatttatttatttctaatctgcattcattttatgtcattttttaaccttactgctcttaccatgatgtatttatcagttttgtatattgctaggttcagttggctataatgttgtttaaaaattttgtgtctgtactcattggggatgttggtgtatagttttcttttcttgttatgtatttggttttggaatcgggataataatgctccctatattgagtaaactgaggtatattccctcttcgattacctggaagagtttttgtaaaactgatataacttcttccttacatgtgagatagtattcaccaacaaagccatttggcatggaattttctttgtgtaaaggattttaaccttaaattcaatttcttggatataagaacattcaggttatctatttcctttgagtgagctttcctagttttttactttcaatacatttgtccattttatctacattctcaaatttattggcataaacttgttcataatattcatttattatccctttaatgtctacaagatttgtagtgatgtcccctctctcatttctgtgattggtaattttcatcttctcttttttttcttattagtctggctataagttcatccatttcattcaccagcttttggtttcatttatttactctattgcttttctaatttttatttcattagccactgcactttatacctcctatcttctgcttgcttgggtttcatgtgctattatttttctaacttctttaccttaagttgtaagtttgagtcattatttaaaaactttcttcttttctcatatagtatttatttagtgcaataaatttccttgtaagcactgctttaagtgcatctcataaatgttgaaatgttgtgtttcaattttattcagttcaaagtaatttttaatttccatcttgatttattctttgaaatcggttacttttatgtataatattttacttccaaatagaataatttttcacatatattcctgctattgtttccaaatatgtttcttttattcagtgaatgcaaattaagatatcaaatttgtgaggttaagctaataccatgcttagaaggaaatttatcatttaattctattgtggtcagaacacatacattatttgaatccatttaaatttattgacttgttttatgacctacaatatctcctgtctttgcaactgtttcatgtgctcttgaaaaataggtgtattctgccacctttagatgccgtattctgtaaatgtcagttaggtcaaattgattaataatgccattcaagtcttttctatacttaataattgtttatttttatttttataagaaatatgattcaatatccttaataattttaagactacttgttctattgattattgagagagaggtactgaaatctctactctaactgtatatttacctatttctccttgcagttcaatgagttttcgtttcatgtactttgaaaatctcttattaggtcaatacatatttatgatttatgttctgttgatgaattgattccattaacattatgaaatgaacttctttatacctggtaaaaatatgttaatttgaaatctacttcatctaatattaatatgagctacttcagctttcttttgactaatgttagtgtgcttttttctctcctttacctttaacataattgtatatttaaaatatacaattttgtaggcagcatatagttagggtctcttgtaggcaacatatagttagttattgccctttcaactaatatgacagcccatgtcttttaattaaggttgtttaaaccatttatatttaatgcgttaggtttacatccatcatcttgctatttattttgtttgttctatctgttctttgttccttttgccctctttgtttgccttcttttgtattaattaattcttttttaggatcctcttttgtctcctttgttggcttattagctacaccctttgtttttggcaattttttaaatgtttgctttaaggtttatggaataaatctttaacttaatacagtctacatttaactgatattacaccactctatgcacaagaatcttataacaatatacttctatttctacactcctatccttggtgctattattgttatgtatattacttctatatatattagaagccccacattatattgttaccaatttttccttaaacaatgaaccatactttaaatgatttaaaatattggaaaaatatattttacatttaaccacataatgacgatgtccagcattcttcattcttttatgtggatacagatttgtatctggtattttttttcttcctgaccaattttctttaacacttcttgtagtgcaggatatctagtgattaattcttctacctttcgtatgtctgaaaaagtccttatcttgcctttgtttttgaaagatattgttgtatatagaattttaagttgacaatttttttggttttggtaatttaaagatgtttccctgtcttttcagttatattgtttctaataagatctgctggccaggcatggtggctcatacctgtaatcccagcactttgggaggatgagacaggtggatcacgaggtcaggagatcaagaccatcctggctaacatggtgaaaccctgtctctactaagaatacaaaaaattggctgggcgtggtggcacacacctgtagtcccagctacttgggtggctgaggcagcagaattgcttgaactcgggaggtggagggtgccgtgagctgagcttatgcgactgcactccagcctgggcaacagagcaagactctgtctcaaaaacaaaacaaaaaacaaaaacaaaaacgaaaaaaaagatctgttgtcattgttatctttgttcctctcagcataataaatcctttttccctttggctgcttttaatttactttttatcactggttctaaggaattttattatagtgtgtagttttcttcatactatttgtgctaggtattctttgagctcttggatctatgggtttatacttttcatcaaatttggaaattttggccacatttttttttcaaatacattttctcccttcctccttttcagagactccagttatacatatattaaaatgtttgaagttgtcccacaactcactgatggtctgctcattatctttcagtcttttttctctccatgcttcattttggttttttgttcttttttctgtttttttttaattatactttaagttttagggtacatgtgcgcaacgtgcaggtttgttacatatgtatacgtgtgccatgttggtgtgttgcacccattaactcgtcatttacattaggtatatctcctaatgctatccctccctcctccccccaccccacaacaggccccagtgtgtgatgttccccttcctgtgtccaagtgttctcattgtttaattcacacctatgagtgagaacatgtggtgtttggttttttgtccttgtgatagtttgctgagagtgatggtttccagcttcatccatgtccctacaaaggacatgaactcatccttttttatcgctgcatagtattccatggtatatatgtgccacattttcttaatccagtctatcattgatggacatttgggttggttctaagtctttgctattgtgaatagtgccgcaataaacatacgtgtgcatgtgtctttatagcagcatgatttataatcctttggggatatacctagtaatgggatggctgggtcaaatggtatttctagttctagatccctgaggaatcgccacactgacttccacaatggttgaactagtttacagtcccaccaactgtgtaaaaatgttcctatttctccacatcctctccagcacctgttgtttcctgactttttaatgatcgccattctaactggtgtgagatggtatctcgttgtggttttgatttgcatttctctgatggccagtgatgatgagcagtgatgatgagcagagcctcgctctgtcgcccaggctggagtgcagtggtgcaatcttggctcactgcaagctccgcctcatgggttcacgccattctcctgcctcagcctcctgagtagctaggactacaggtgcctgcctccaagcctagctaattttttttttgtattttgagtggagacagggtttcaccgtgttagccaggatggtctcaatctcctgacctcgtgatccgcccgcctccgcctcccaaagtgctgggattacaggcatgagccaccgcgcccagcctatgataagcattttttcatgtgtcttttggctgcataaatgtcttcttttgaggagtgtctgttcatatcctttgtccacttgttgatggggttgttttgttcttgtaaatttgtttgagttctttgtagattctggatattagccctttgtcagataagtagattgcaaaaatgttctcccattctgtaggttgcctattcactctgacggtagtttcttttgctgtgcagaagctctttagtttaattagatcccatttgtcaattttggcttttgttgccattgcttttggtgttttagacatgaagtactttcccatgcctatgtcctgaatggtattgcctaggttttcttctagggtttttatggttttaggtctaacatttaagtttttaatccatcttgaattaatttttctacaaggtgtaaggaagagatccagtttcagctttctacatacggctagccagttttcccagcaccatttattaaataggaaatcctttccccatttcctgctttcgtcagatttgtcaaagatcagatagttgtagatgtgtggcattatttctgagggctctgttctgttccaatggtctatatcgctgttttggtaccagtaccatgctgttttggttactgtagccttgtagtatagtttgaagtcaggtagtgtgatgcctccggctttgttcttttggcttaggattgtcttggcaatgcgggctcttttttggttccatatgaactttaaagtagttttttccaattctgtgaagaaagtcattggtagcttgatggggatggcattgaatctataaattaccttgggcagtatatccattttcatgatattgattcttcctacccatgagcatggaatgttcttccatttgttcgtatcctcttttatttcattgagcagtggtttgtagttctccttgaagaggtccttcacatcccttgtaagttggattgctaggtattttattctctttgaagcaattgtgaatgggagttcactcatgatttggctctctgtttgtctgttattggagtataagaatgcttgtgatttttgcacattgattttgtatcctgagactttgctgaagttgcttatcagcttaaggagattttgggctgagatgatggggttttctagatatacaatcatgtcatctgcaaacagggacaatttgacttcctcttttcctaattgaataccctttatttccttctcctgcctgattgccctggccagaacttccaacactatgttgaataggagtggtgagagaggacatccctgtcttgtgccagttttcaaagggaatgcttccagtttttgcccattcagtatgatattggctgtgggtttgtcataaatagctcttattattttgagatacgtcccatcaatacctaatttattaagagtttttgcatgaagggctgttgaattttctcaaaggccttttctgcatctattgtgataatcatgcggtttttgtcattggttctgtttatatgctggattatgattattgatttgcgtatgttgaaccagccttgcatcccagggatgaagcccacttgataatgctgggtaagctttttgatgtgttgctggattcggttttccagtattttattgaggatttttgcatcgatgttcatcagggatattggtctaaaattatcttttttggttgtgtctctgccaggctttggtatcaggatgatgctggcctcataaaatgagttagggaggattccctctttttctattgattggaatagtttcagaaggaatggtaccaactcctcctcgtacctctggtagacttcggctgtgaatccgtctggtcatggacttgttttggttggtaagctattaattattgcctcaatttcagagcctgttattggtctattcaaagattcaacttcttcctggtatagtcttgggagggtgtatgtgtcgaggaatttatccatttcttctagattttctagtttatttgcgtggaggtgtttataatattatctgatggtagtttgtatttctgtgggatcggtggtgatatcgcctttatcattttttattgcatctatttgattcttctctcttttcttctttattaatcttgctagcggtctatcaattttgttgatcttttcaaaaaaccagctcctggattcattaattttttgaagggttttttatgtctctatctccctcagttctgctctgatcttagttatttcttgccttctgctagcttttgaatgtgtttgctcttgcttttctagttcttttcattgtgttgttagggtgtcaattttagatctttcctgctttctcttgttggcatttagtgctataaatttccctctacacactgctttaaatgtgtcccagagattctggtatgttgtgtctttgttctcattggtttcaaagaacatctttatttctgccttcatttcattatgtacccagtagtcattcaggagcaggttgttcagtttctatgtagtggagcggttttgagtgagtttcttaatcccgagttctagtttgattgcactgtggtctgagagacagtttgttataatttctgttcttttacatttgctgaggagtgctttacttccaactatgtggtcaattttggaataagtgcggtgtggtgctgagaagaatgtatattctgttgatttggggtggagagttctgtagatgtctattaggtccgcatggtgcagagctgagttcaattcctggatatccttgttaactttctgtctcgttgatctgtctaatgttgacagtggggtgttaaagtctcccattattattgtgtgggagtctgagtctctttgtaggtctctaaggacttggtttatgaatctgggtgctcctgtattgggtgcatatatatttaggatagttagctcttcttgttaaattgatccctttaccattatgtaatggccttctttgtctcttttgatctttgttggtttaaagtctgttttatcagagactaggattgcaacccctgcctttttttgttttccatttgcttggtagatcttcctccatccctttattttgaggctttgtgtgtctctgcatgtgagatgggtttcctgagtacagcacactgatgggtcttgactctttatgcaatttgccagtgtgtcttttaattggagcatttagcccatttacatttaaggttaatattgttatgtgtgaatttgatcctgtcattatgatgttagctggttattttgctcgttagttgatgcagtttcttcctagcctcgatggtctttacgatttggcatgtttttgcagtggctggtaccggttgttcctttccatgtttagtgcttccttcaggagctcttgtaaggcaggcctggtggtgacaaaatctctcagcatttgcttgtctgtaaaggattttatttctccttcacttatgaagcttagtatggctggctatgaaattctgggttgaaaattcttttctttaagaatgttgaatattgtcccccactctcttctggcttgtagagtttctgctgagatatccactgttagtctgatgggcttctctttgtgtaacccgacctttctctctggctgcccttaacattttttccttcatttcaactttggtgaatctgacaattatgtgtcttggagttgctcttcttgaggagtatctttgtggcattctctgtatttcctgaatttgaatgttggcctgccttgctagattagggaagttctcctggataatatcctgcagagtgttttccaacttagttccattctccccatcactttcaggtacaccaatcagacgtagatttggtcttttcacatagtcccatatttcttggaggctttgttcatttctttttattcttttttctctaaacttctcttctcacttcatttcattcatttgatcttccaatcactgataccctttcttccagttgatcaaattggctactgaagcttgtgcatgcatcacgtagttcttgtgccatagttttcagctccgtcaggtcctttaaggacttctctgcattggttattctagttagccattcatctagtcttttttcaaggtgtttaacttctttgccatgggttcaaacttcctcctttagctcggagaagtttgatcatctgaagtcttcttctctcaactcgtcaaagtcattctccatccggctttgttccattgctggtgaggagctgcattcctttggagggggagaggtgctctgatttttagaattttcagtttttctgctctgtttttttccccatctctgtggttttatctacctttggtctttgatgaaggtgacgtacagatggggttttggtgtggatgtcctttctgtttgttagttttccttctaagaatcaggaccctcagctgcaggtctgttggagtttgctggaggtccactccagatcctgtttgcctgggcatcagcagcagaggctgcagaacagcaaatattggtgaacagcaaatgttgctgcctgattgttcctctagaagttttgtctcagagggctacccggccgtgtgaggtgtcagtctgcccctactgggtggtgcctcccagttaggctacttgggggtcagggacccacttgaggaggcagtctgtccgttctcagatctcaagctgcgtgctgggagaatcactactgtcttccaagctgtcagacagggacatttaagtctgcagaggtttctgctgccttttgtttggctatgccctgcccacagaggtggagtatacagaggtaggcaggcctccttgagctgcagtgggctccacccagttcgagcttcccggccactttgtttacctgctgaagcctcaggaatggcgggagcctctcccccagcctcgctgccgccttgcagtttgatctcagactgctgtgctagcaatgagtgaggctccgtggacgtaggaccctccaagccacgtgcgggatataatctcctggtgtgccgtttgctaagaccactggaaaagcgcagtatcagggtgggggtgacccgattttcaaggttccatctgttacccctttccttggctaggaaagggaattccctgaccccttgcacttcccgggcgaggcaatgcctcgccctgcttcagctcacactaggtgcactgcacccactgtcctgcacccactgtctgacaatccccagtgagacaaacctggtacctcagttggaaatgcagaaatcatccgtcttctgcgtcgctcatgctgagagctgtagactggagctgttcctattcggccatcttggaaccctctcctcttcattttgtatagttaatactgcttgtctttaagttcactaatcttttatttctcagtctttaaactgctgttaattctatatcttgtatttttattttgaacattgtattttcattggtagaagttcaatttggttttgtttatatctttcttcttttttaacttgcttatttctctaccttcttgaatacatagagtacagttataataactatttctaaatctttgtctactaataatatcatatatgtgatctctgggttggtttcaattaactggtgttttccctcagtatttatgcctagtaagttttattgaattcagacattgcaaatattactttgttgggtgcttcttattcttgtactttaaaaaattcttgaacttttttctgtgtccattttgaggtgtaccctgtgttagagatttgttgccattgacagagggctgaaggcatagagtggagctctttgagaattttaagaagaaataatatgaattttagcacctggtggataagtttacagaattttctttcattgcaacatacctggtggtacaatttaggagctaagtttcctgctgacctctagccactggaggctatacctttttaccaaaataacctaactgctgattagtcaaagtggctttaagtcagtgtacaaaatctccctatgaacagcactggccttccaccagctgcccagtgctacaggtttttctaggcaactagaaaacaacttctgttgtttctaggcaagtcttgttccagttaagtgttcaggaactttcttcttgctaagttcatccacatcagaacctttctgaagcaccagaaacattgcctagtgtccagctgatacaccacacaaccatcccatgcaaaggcacatcaactcataggcattgcttcccagcagcctcctaggcataaaaaccttcacttcctctctgtttaggacattctacataaatttgtcgagcacacccagtggttctcaaatattaatgtgtagtggaattacctgccatgcctattaaaatgttctttcctgagtcttacaccagggaatccctatttggtaggtgttaagtgtcaggttttgcataaaattgtagcaggttcttattgcccaaggggatgaaattggactgaaattcagcccattctcagcttgccaaaccgtacactctagtgtgggcctggtataccaagaggaaggggcaccttcaatttattttagtttcatctgctttctaagcctagtgtctgtggggatatatccacaagagcagtgagggtagggatgatttttctaatttgcacaaaggctgtctatgccctggcatattagtccagggcttccaaaagggagatgtcagacagggctagagatacaagagattacttagaggaaacaggtgtgatgaaaaaaatgagaagaaagccaggagaagcagagggagacaccaatgcaggtctgacccttgtgaacaagagagggagtcaaggaaagttggatggaaaagctttagactatatgtaggtctgagaaaaattggtaaagctgatggggagtcctctagccaaaatcacccacagaggaagcctgcatcttaaaggagtgggcctgccctggcatctctaccatgctcagtcatggactagaaggagtcatgagaagtgtagtctcatgaaaaaatagtagatttcaaggtaattatgcttctgaagttggagatctaagaggtgcttgttaatggctcgcatactgtattagtccattctcacactgctatgaagaaatacccaagcctgggtaatttataaaggaaagaggtttaattggctcacagttctgcattgctggggaggccacagaaacttacagtcatggtggaaggcaaaggagaagcaggcacctcttcacagggtggcagaacagagtaagtgcaagcaggggaaatgccagacacttataaagccatcagatctcgtgagactcattcactatcacaagaacagcacgggggaaactgccccatgatccaattacctccacagggtctagcccttgacacatggggattataattcaagatgagattttaggtggggacacagccaaactatatcatatacctaatgaggagggccttggaaatctgcctttgtaaaagttccccactcccaagggattccaaacaccttgtccagtgaatcacccttagaggaacacctgcctaaattttttaaaagaaaggtatattaactgtccctaaggaagaagaatgtccagacttcctaaacacaaggtcacactcttgggagcttggattggggaagctctccaattcctctctgatcagtgtagcccagagcatggttatattctcaacaaatgactctgccccatgttctgccacatgtgttataacaggaatgagctgagtggaacaggcaccaagatgatggaagtcaaatctgcctcagaggcagggtcagggaaagggtctttgaaggtgggaaaagcacaagtaaggaatggagagaaaggcctgtctagaagagcagggaatagtctgtttggctgcatggaaagagtgcaagatggggagataagttggttccatgcttggaggaacagattcagtggaatgtgagtttgggagactgggatttaggcatcattgcctgaaaatgtaaaaatacctgggaggacatttctgcaaggtggcactgattgctgagtctcaggcttcaggaggccctgtgttgttctgagcaagcccagaaggcaaactgggtgtcacccagagagctccttgtacacccatttctggggagaggtacagggaacaagagagggaaatagttggggagctgtcactaccttcctagctctgcacagggctggccctggctcccaaaacaccatctcagctcaagaggggcctcctataaaaagcaaatagaagaactatttgatggtgaacgatttatgaagatgctctcttagcacactttgctcaacaatatgagtgaactcaaatggctgagttggttttcagattggctcccaagtgtttacctggtccctgcttgattcagctctctcccttcctctacatcctcacctcctgctgctcatccttagacaaagaccaaaatctttaacaaggccctttcttcatgatctagcttttgccatctgttgagatcagatctaaaccaactgggccattcagaactagattatttttggtaaatattggtaagtaacatcaagtagatgaagtgatgagagctctagatctcttcccctgacaacccttatcccagtccatcaatcagtattaccggagtgtctgttaaatccacaactctctccgcactagactggtaggatcatggaaataagaaccaagtctgtatgctcactggtaaatatcaaagatcttagatggtcggattcaaacaagtacgagtaatttatttcctgagtgttttaactgttacaataccaatctgaaaaaacaaaacctaaagaagatccactctgaataatagcaactatcattcgttaagcacctaatatttccaatccctactacaacctacctagaagacagtatggtccccacatacacctgaactgaatctcagagtcaggcattgactttgccaaaagcaaagggttataagcaaagagtttagctgggatttgaacccagaacattctgactgcaatgtcccagctcctcccatgacacaatcgcatcgcatttcatgccactactagcctagttggtgagagcaacccaaaccaatgtcttgcttttcgaatacttatgaatattagctacccatcagtatttctcccccttcccttgccccacaaacatgcctgttacctgagctgttgtcctggggtgcatacctgcctgataatggtggatgttagtgataaatggtgcagtagattctggagcatctttccaggttttgagcctggctctgccactgctgtggaaataccacagatcaaaatgggcaatttagactgtgtcgtttactaatattctggatgcaggaaggaaatggaaggagccccagagaaaaccatctacagatggatatgactcccacctccatagtacctgcatgttatgaatgttcttctaaagaactagcctagtaacttaatggagcccccagggtctctttcagagagctgcatttcttagtgcttagaagtctctttcttcaagaactgctgctatggtctgaatgtttgtgtctccccaaaattcatatgttcatacctaatccccaatgtgattgtattaaaaggtaaaagtctttgggaggtgattaggtcctaagaacagggcccttatggatgggattagtgccctcataaaagagaccccagagagctccctcaccccttccaccaagtgaagatacagtgagaagtcaccatctatgaaccagaaaacaggccctcaccagacacagaatctgccagaacctcgatattggacttcccagactacaggactgtgagaaataaacttctgttgtttataagccacccagtctaagacattttgttatagcagcctgaattgactaagacaactgcatttttattttccacggatgctgatttcacatgccacagggaagatgtatggcagaatgagctgtggcacaggaaagcttatggcaaaggtcttatgtgatggggatgagagggaagggacagcaggaaggtggtcacttcagtagaggaaagctaagtgtgtctatcattaccccttgccagctgggtgactttggccaagtcacttaaccactctgtgcctgtttcctcatctagaaagtatggctaaaaataagatttaacttcagaggattgctgtgagttgtaaacaaatgcatcctttattattattgatatggcttggctctgtgtccccacccagtctcaccttaaattgtaataattctcacgtgtcatgggagggacccagggggaggtaattgaatcatgggggcgggcctttcccatgctgttctcatgattgtgaataagtctcacgacatctgatggttttataaagaggaattcccctgcacatgccctcttgcctgctgccgtgtaagacgtcactttgctctttctttgtcttctgccataattttgaggcctccccagccatgtggaacagtgagtccattaaatctctttcctttttaaattacccggtctcaggcatgtctttattagcagcatgagaatggactaatacaattatctagaacttcccgtcttgtgggaggcacttaccttgctaacttaaatgggggaacatttcatcttgcctcattcacacagacacatttcatggtcattgcatggtttctgcttggtgcttgcaggtccagatttctaatttaaacagtcagagctcatccatattggcaataaacccaggtcaactcagcactcaaagtgtagaacaacagcaagtataaaaagaaatagaatttcttttcatcctcatcacaatagtaccttaaacttctgtcacttgccataatttttaattctctatttgattgtgggcattgtaatttctggctttctagctaaatgtccccctgccccaccatgaaatataatgcttggcacatattaggatattccctgaatgtttagtgaatgtcctctaataaatgtccataaaagctacaattcagatctagaatatcacagaagtacaaaaatttatgcacattaggaatcagcttccgaataaaatctaaattcctttgcttaccatactaggcacttcattaattggccccaactgtcccattttacctcatcagcaacgccccccgcccccgccaccccacaactctcacacccagctcccaagtccccagccccataaaactctgtcattcccagaacaggtcatgcccttttacaattccaagaccttgtacttgctattgcctcttcctgaaatatcctttccttttaagcatagccaattcctactgcaccttcaaaagccccatttaaataactcctcctcagggatgtctctcgggctccctaaggcagcatcaatacctcccttctctggactccctcaataccctgtctagcacacctatgaagaggcctggccttagtcaagccaagggctgagcttaaagtcctagctttacaacttacaaactgtgagaccttgggtgagtatatgcaacctctctgaaactgtcttttcatctgctaaccagcaccaatagcaaccacccctgaaggttgcaataggagtgatctaatttgatcattgtgaagtgtatagcaaactctcaagaaatggtagatagtgtgatactttctaatacagcacatgaccacattgcaattcacctgtgtttactcctgccttttctgtaaaaccctagatgacaccaacaggttctgcaattatttcttatccctggcaactagcacacttagtaggtgtttaagcgcatccttgcagaatgcttgtgtgcagtcacgaatgaatacatctgagctgtttgattccctagagtgcccaggtggagcggggtcaccctgcaatggcagaggcagttgtgctgaaggcatggaaggaaatggaacctgctcctgccaagtaagttcaaaaatgtgttcttcctttcctggtttctgctccccatcttcttacctgttgatcctccttaaacacacacacacacacacacacacacacacgtgcacacacacatatacagcgaagttcttaagcagtgaaggtattaattttttaaaaatgtgcaatttgcaacaaaatgaccatttatagcctgggggcctttaggagagtcaattaactgctcagtcttaagcatatccacttgtaaaaatgggtttgaggctgggagcagtggcttacgcctggaatcccagcactttaggaggccgagtgggggaggatcacgaggtcaggagatcgagaccatcctagccagcatggtgaaaccccgtctccactaaaaatacaaaaattagctgggtgtggtggtgggcgcctatagtcccagctactcaggaggctgaggcaggagaattgcttgaacccaggaggcagaggttgcagtgagctgagattgtgccattgcactccagtctgggtgacaagagcaagactctgtccacccccacccaaaaaaaaaagtttgaaacagtatctatgtaataacatttgttgaaaaagtaaaatgaggccatatatgtgaaaatactttatgacactatataggactatagaaattgctgtcattgttaatattaataatcactattagcagacaaaccttatggtgctatcctctgcatcctttgtgaaccgttaggcttaccggttcaagattttcttttaccagttgaagaatttcttcgttatctcatgaaagtgactttttgcacatttcaagccctgggggatttaaatacaaggaaatccttctgaaaaggattgagctcaactgtcttcagaaatgcaaaactgaggttgggcaggtggctcacgcctgtaatcccagtactttgggaggccaaggtgagcagatcacttgaggccaggagttcgagaccaacctggccaacatggtgaaacctgtctctactaaaaatacaaaaattatccgggtgtggtggtgtgcacctgtaatcccagctactcgggaggctgaagcaggagaacctgggaggcggaggtttcagtgagccgagatcgtgccactgcacttcagcctgggtgacggagcgagactcagtctcaaaacaaaaatgcaaaactgaaagcattttcctttcccccttgggcaaagttgggatatggctgctagcacttgctatctatttatatctttggactgacaaagcagctttctcctgcagagcttcagacccttagtacaaaatgacatggggattaatgcatgcaatgataacacaaataaacagaaagaagaagctccaggataggcacagagggaaaatatatttgaaaaacaaatgctgagttggaaatccaaggccttccttggtaccatgggtcaccttgggtctaatgtcaaccacctggggtgttttgcaggaagggtttggtggaacagcctgtgaaacctgtgctgacgacaacttatttggacccagctgttcatcaggtatgtctgatttttgtgtaatcaccacatttgtaagggttgacagtccatgagaaagattgctccttgaggagaaaacactgaatagttatgtgtgataaaaaagaaatttcagcagaattaaatttaaaggagtttaatcgggcaatgaacaattcatgaatcaggcagtttctggaatcacagcagattcacagagactcagtgaagccatgtgatgaaagaagatttatagacaaaaaaagggaaatgacatacagcaatcggaagtgaggtacagaatggctggattggttacagcttggcatttgccttatttgaacacggtttgaacactcagcagtatatgaatgatccaagtatggctgctgggattggccaaaactcagctattgttacaggtgcatactcctaagttaggttttcaatctcatctacctattaagctaggttgcaattcatccacaaggactcaaatatggaagtacagagtccttatcaagtcatgattagttcactttaacatgtgtaaccaagtctacatagagaaaacaaaacaacaaagctgttaaatgcagtcattgaaaacagagacagtgtttcctgaggttctcagccctggcatgtgcagtcagctactccccggaaatgcttccacccatctttatgattccctctccccaggctctaggattccaccactgcctgttctttgcctgcccagcttttctctgggctctttctggatcctggtctcagcatagatccataggcttccaattaaaccgtgggccccacctaattctaatggttcccttccttttgggagttcacaaataattccctaaggtggtcagtgattgttgctccaaattaaagaaacaaatttgagactggcttgttcactctcttatttttggctgcccccagaagtagactctgagatagagatttgagtaacaagtagttagtttatttgaatggtgatcccaggaaacacgaggatgtgaggaagtaatatggggaaaataaacaggatgttattaagccaggtgccactgtgaaccactggagcctgatgccccagggagctctgggggtcggtgcagaacacacagctcagtcatctcacctgaggggaaaggagccatagtgtggtgggcagaataacggctccctgaagatgtccacatccacatccaaatccctagcacctgggaatatggtaccttacatggcaaagagaagttaaggtagcaaatagaattaaggttgctaatcagctgaccttaggataagagattatcctgggttatctgggaaggcccagtgttaatcacaggggtccttaaggatggagaagggaggcagaagaggagtgtcagagttacgaaatatgagaaagactcgatccgccaatttctggctttgaagaaggaagagccatgagccaaggaatgtgggtggcctctcgaggctggaaaaggcaaggaaacatgttctccccagagtctccaaaaaggagcacaacactgccaacaccttgattttagcacagtgattttggatttctgaacttcagaaatgtaagacaataactttgtgtggttttaagacactaggtgtgtggcaatgagttacagcagcaacagggaattaatatacatagtcaagtggggagagtttttcactccctgccacttagagtgtttatagggagcacccaggccaagcgctcgtcctaaggttcacacaaaaccctcaggctaagagctgtggatcctggaagttagctggaatgctcacaatcgcagtcagtaaggtctaaagaatgtgggcatggtagaaacagtgtctgctagatccacgtctcccaaaaaggaatatattgggtagctttttgccaacaccacttgggccctgactttcgtggaaaaattaaactcagtggaaaactgcttcgattcaaatatttttggcaagaaaacctatgcacacacaacacatcccacccccataagtttgcaaactctgtaataagttttatctgcaattgcagaggcattgccttgttctaatccataaggtcctcttaggcaggtgctgtggtatctttatctccagtaccttctacgtgctgcctgcctggtagacactcactacactgtttttggatgaatacatgagtgagtgagtatatgactaggtgaatcaatgaatgaattatctagcttgctccagtgatgttctcctgacccagaagcatggttttagaacccaggctttagactcagacaaggtttcagctctaggcctgctaatcatggagacataggtaagtttatgaagcatgctatctgtgacttcatctgtaaagatagaaataatattgcctcctttagagaggatttaatgggataagtgcataataaatgttatgattattattccctagcatcccctaatcataggtgtttcttcacccactgtcccatagagattatttcataagactgttagcaaaagcaaatttaaaacagatattggagctgggctcagtggctcacgcctgtaatcccaacactttgggaggctaaagctggatccgttgaggtcaggagtttgagaccagcctggccaacatggtgaaaccccatctctactaaaaatacaaaaattagccgtgtgtggtggtgcgcacctgaaatcccagctacttgggaggctgaggcaagagaatcacttgaatctaggagtctgaggttgcagtgagccgagatcgtgccaccactgcactccagcctgggtgacagagcaagactccatctcaaaaaaaaaaaaaaaaaaaaaggatattggtgtcccgtgtgtttttaaagttaaacattacattaaaggacagcaactaaaatgtaatcagtcaactatatagaaatagcatgtctcctcccaaatttacccttccctgccatttaagaatttaaatcacataggctaaataaatattgaaatgggaaggagtaaataaagcatccagcgttgcttagttcccaagaaagcctagtaattgtctggagatgacaaattaggaagaagacccatgttatctccaagacactggtgttggttactgatgagcacagatgcgcagggaaattcccaacatttccaaataaaggaagtatcctcccttcacacttagtgttgtggagaaagggcaagtgaaagggagaatgatggtctcaacacctaaattttttttttatactttaagttttagggtacacgtgcacaacgtgcagcttagttacatatgtgtacatgtgcaatgttggtgtgctgcccccagtaacttgtcatttaacattaggtatatctcctaaagctatccctcctccttccccccacccacaacaggccccagtgtgtgatgttccccttcctgtgtccatgtgttctcattgttcagttcctacctatgagtgagaacatgcggtgtttggttttttgtccctgcgatagtttgctgagaatgatggtttccagcttcatccatgtccctacaaaggacatgaactcatcatttttatggctgcatagtattccatggtatatatgtgccacattttcttaatccagtctatcattgttggacatttgggttggttccgagtctttgctatcgtgaatagtgccgcaataaacatgtgtgtgcatgtgtctttatagcagcatgatttataatcctctgggtatatacccagtaatgggatggctgggtcaaatggtatttccagttctagatccctgaggaatcgccacactgacttccacaatggttgaactagtttacagtcccaccaacagtgtaaaagtgttcctatttctccacatcctctccagcacctgttgtttcctgactttttaatgatcgccattctaactggacaatacctaaatttttaaataagaaaactggaaacttaaactgagacccaagagaaaaacctccaagctctggattccaatagaactttctgtgatgatagaaatattgtctgtttgcactgtcccatacagtagccactagccacatatgactattgagcacctgaaatggggctagtgcaactgaggagttaaaattcaaatttcacttaatatcatttaattcaaatttaaatagccacatgtggctcgtggctaccaaattagacatcatagttctaggacgtaacaattaagagaacaggctttaaactcagcctgaccatagtttgaaacagaccctaattgctgtgttaccgagggcaagctatttaaattccctaaacctttctcatctataaaacaggaataataacatctatttcttgggattgacaacacagcaaagctcttagtattatgtcacaagcactcaatcaatggaagtattaagtgaggacaaaagtaatccaacagcaagcaagtcacggatgaatgaatggatgaatgaatgactcagcgatgcctggtcatttcccactgacaaggactatggagactgcaaaccttttcatccaggcatctactgggtgccagtgttgtgtcatccaatgagatgttggtcccgggaggtggccattctgcctgtaagtaggacagctctattaggtgcagtttatttttaacactggctgtaatcttctgtgggggcactctcctaccagactgcttgttggtttagagataatttcgagctgcaccagccaaagattttcatctctgtggccagtgccccagcctgctcagtgcctccttcccagctagccagattgcaaagcccgttttctctaacatgatccccaaatcaatcacacaaccatgtactgttaagaagagtcactagtatttgctgggcacctgctgtgtgtcagaccatgtgcagagggatttctttggatcctcactatgactctccaaaggaggtgggggttctccttttacggatgaagaagcagagagggttgctcaaggccatgcagctattatgggggcagaggcaggatttgaccccacatatgtgactccagagcctgggcccctaagcactgccccagtctgcctctggtgagtgtccatcatacattacacaccagacaggtgaagtggatcctaagagtgatgagattaggtgcccagtcccaaggagctggaaatgtgggtgacaactgtgatgatgcagagtgcacagcccagaccagatcctatgggagcacaggagagggagcagcttactctgctatggggcatgtcacaggagcataccatccctctgaccagcacggccatggctttcaccactttaaagtcacgccacccaagttttatgtgtctctagagatttgctgagactggttagcaagtaccaagggctctttcaatgatgatctgggaaaccctctgccacttacgtctccttcccaagggcatgttcctggcagcagctggcagcctgcaatgcagtgtcagaggcttccaaaagctgccagtgccaggcagtcaatccagtatagaggctgtagtggaagatagcatgaagggagaggctcatgccagggccatgggccaataccacacagccaggagggcaatcttagtgacaaggacaacacttgtaatttgcatctgagttgggagcaggagccctctgtgcccctcaccttcctccactgggtgcatgacaacaattagggcaggaatcatcactgtatctcctagagcctggcttcccactacactgtgagctcctggactttagatattatcaattactgacatgttgtatacctagtgcctaatacagtgcctgctactaggtaggagctgggtaaatatttttgaattgaattgaatcttctccactgagcccatagtacactccctcctcaccccacttatctccataaccaacttgactgctctccagaacttgtttattccaaaaatccacagccataggtagatatcaaagtgcttggctaaaatagaaacaatgtcaattgagttttgaagagaggatgacactgcaaatccaatttaattcttcagttatttgagggactacttgagctagttatctcccattttttcatgtgtgatacactggtagtaatgatacctacctcaaaggatgtggtaaattagataatgcatgacaacacacttggcaaaatgcctgatagatagtaagcactcaataaagagaagtgtggggccttgggtgcaaaatttaaggaggcatcaaaaaaactcagtaatcaagaccaataactgcactgatttcctagggcagctgcaacaaagtactgcacactgggtggcttaaaacaacagcaacttattgtcccagttctggaagcgagaagtcaaatatcaaggtgttggcagggccatgctccttttgaagcttctagaagaaggtccttccttgcttctttcatcctctggtagccccagctgtttttggttgtgacagtatcactccaatctcggcctccctcttcacatgcctcttcacctaatgtctgtggcatctccccttcttatgaggacaccagtcaaattgaattatgggctcaccttactccagtatgacctcatcttaactcattacatctgcaatgaccctatttcccaataggggcattctgaagtactggggatgaggactccaccatattattttgggagacaaaactcaacccatgacaataatactttaaaaattattgaacaaaacatcaaaatgctaaataacagcaggatgcagctctgcacttgcacaaccctgtttcactctcctcaccctaatcctggccctgccagacaatgtctttatctaaaatttagttgtgtagttgttggtattgttacagggcaccgtaaaagatgtggggaaatacagaggtggggaggtcattccaagcagttccaatctaataggggagaaaaaatacacagattgagaaagaaaacagcagccctgacagctgtcccctggctgctggcctagttgctaccagagaggctgtggtgttctgctgctgagcataaacgatgtcacagaatatcaccatcagaaaaaagactcaccatatccatggaggaaaagacaaaaactaagccagggaataatcatgtctgaacagagactcaacaacaatggacaaccatgagaattacccagcaactgcctctcctggctgatataagagcctactgctacttctcccagaatggctcacccttgcttctgacttggtttgaccattggtgctctcctggtggtcttcagctgtcaggcattaacaaacctctagttgtcgtagggtgcaatagtggacacggaacaaagaaagtgctgctggagccagaggagcacagattgtttggagaccactgagatggcaacacagaagtgggggctttggctggccttgaaggattccagttagcacacaaaagggagcacagcagaggaaaagcctggaggtgtgaacgtgcaagatgcatttcctgctgcttccacctggcatggtcttccctgggccaaccccactttatcttttcctggccagctcccattggttggtcatgtcatagcatttatcccagtgcattgtgattggctgttttcttctgccattagattttgatctctttgatggcagagactttgtcctgtttatttttgggcattaatctctagtgcagtactctgaacataatatgtattccataagtgttttgaaggaaggaagatgaatagtgaatgaatcatcccacatgctaagaatctaagatgtataaaataaagtggtgaaagatgaaaatgaaattttatcaaggttagagtcaggttggagtggccattgtttaccaaactgagaaatctaaattttatttggttggtaattgagagtcattgagatattttggggaaggtcaccctgatgcctttgctaatcaaatgaaatgaatgaaatggagaggcaagaaactggaaatagcaagacgaggtatcatgctactgcaatagtccaggcaaaacatgataaaggcctcaacaagaatggcaccagtggagatgaagagcagaagatcaaggtgggagacagagacagagaaaacaaaggatttgatggcttattagatgtttggaatactttaaactttattcatccttgctttgctggtatttctggttaagtttttaagcaggtgcatcttcttaattatgtttcatttgagctaacattaagttggcttacgtgcaccgaagacacgtgtagtaggcagaaaaatgagcccccaaaatgtcctaatccctggaacctatgaatatgttaggttatatggcaaaggagaattaaggttgcaggtagaattaaggttgctaactggctggcttaagatagggagagtatcctggattatccaggtgagtccaatgtaatcacaagagttgttataagtggatgagaaagacagaagagagaaccatagaaatggtagcatgagaaggatttggcctgccattgttagccctgaagatggagaaagggtttcatgagcccaggaataaagatgggctctagaagctagaaaagacaaaagaaaagattctccactaaagcctccagaggaatagcagcccaactgaaacatcaattttagctcaatgagtacattttggacttctcacctccagaattataagataaatttgtgttgttttaagccactaagtttgtggaacttgttatgacagtgatagaaaactaatacaacatgctgcagacagggctggccataggatgacaatggcctagcctgatagtaaatcttgctacaaaccaaccacaaactaaagagttgaccattcacattcatttcaaatgcccttcatttatcatccctgaaatgatctgtcactgggctaaaacatcaagctagaaaatatggcatggttattctagaccctttggaatattttcctttttttatccttgcatcaccccatcaataggtaggacttatttatatagatatctgctaccaacagtgactgagttagtagtagcttttctcttttaaacgtaacaggtgtatataagacactaaattaattctcttgttgaggtatccaaagatgaagtaaatagtttgagagcagggaaaagaactccaatgcacatgatatgcctcatatgctttatatacattatgttacttgactctatagaaatcccaggaagtaggcattcctatccatatgttaaacttaaaaaaaaaaaaacctggtgctgataaaagagagaggagccaaagttcaaacaacatgcagagtctcagcaaagatgatctaaaaacactagctttccagaatgtttagcaacagtctatgtcaggtaataaaaatcccccactttctgtctccagtgtgcaactgtgtgcatggggtgtgcaacagtggactagatggcgatggaacctgtgagtgctactctgcgtacactggccccaagtgtgacaagcgtaagtactgctagttcccttaatgccacaccagatcaaacaggcacaaatgtatgcatttcaattttgtatctgttactggttctctgcaggggcaaggtactaccaaaagttttctggaaagaaactagaaattaaaaagagaatatagaagagaaaaggaaagaagaggagggaaagggaggaggaggaagagagagaacagaagcaatgtggtgtcaaggctatagctgtgttttaggaaggttgaactggaggccaggtgaagggtagaatggagagagggacaccgggactgggaagccaacacaacccatctcaacaagtgagtcacctagtaaaggagatacagcatcttctcaattatgagcctcaaaggcggaacacattaacagccctaaggaagaggaaagggtgcttcaccaacgctgagtgattcaccaaaggccacacaactaggagagctgggactcaagtcatttgaatccatgggaaattctgaaaacaatctattatactgggtccaatcaagagctggaaaccaaggggtgatttaaacaagggaagtttaatagggataattagtacgctatgataggagagcagctgtaaaaatgcaaacacaactctagagaggatggagcataacaaaggaaggagaaatttggaatggggtggccgtccccaaggctggatttaaaccttgttggagagggtgtggtgggtggccgagaagtttgctgttttatccaggccagcactggaccacagtcacctagcaggcatggggcaaccctccagggccttggggagctgaggctggtgggtgaggcacaggaaatcaggggcctctcaggcaaaatcctggaatacacaatgtctatgtcgagagggctgtgggaaggtagtcgctaggtccaggccaaggatgcaaggtcagccactgaggaactctgggtgcaccgctggggcagagcatccctgaacagaccctgcagcagcagcaaaggaacacgcagcagcagcagcacactgcaccctggaggcagaaagaggagttcccgcctcccaccgtgtcccgccagcgccctctactggcaaaacttaacatcgacctgtgaaggagaaactcacaggatggcagagccggggagctgagatgttaagaaatcgaccattctgcctctgccactagcctcatttaacttatcctcgggactttagtctcctgtaaaatgaaagggttgggtgagattgaaagtcagcaaatgcaaactcattttattggaagcggttgagatgccgtgagcggtggtagtaacaggatgaataaactcagcctctgccttcttcctgtagctgggacagccatgaaagcctccagtccaaatgcaaaggcaagtgggtaggacaggccttctgtggtcctcagtcagcctccttccttggccactcctgccagtgtgcagtggactcctgggcagaggccttctcagtaaggcaggagacccagtccagaagccagcctaagggaaaaccctaatagatatgcttccaagtaaaaaaataataataattctgtccagccaaatgacaagagactaggacaaaaatatttaaaattcacatggcagatacatttttataacaaaaaattggattcatgtaaagtccaaaatctaaatttcagaataagaaatgaaaacaggccgggcctggtggttcatgcctgtaattccagcactttgggaggccgaggcgggtggatcacctgaggtcaggagttcaagaccagcctggccaacatggtgaaaccctgtctctacaaaaatacaaaaatcatccaggcatgatggcgggcgcctgtaatcccagctactcaggaggctgacccgggagaatcgctcgaacccgggaggtggaggttgtggtgagccgagatcacaccattgcactccagcctgggtgacagactgagactccgtctcaaaaagaagaaatgaaaaccagcaataaacatgaaaaaggtgctaagtccactaatcgttacatacatacttattaaaattcagtcatatttggagtcctggaggtttattttcatttgtttttttatttttgcccactatgttacaaattttacccatctgtgggtatgagaaaaatgacagtaagaatgtggattcctacaacctacgggagaaatttatttactaaatttgaaggtatgcttatagtatgcttctgtgtccccaattctaagaatttaccccgggagaggagaggaattagacaaaggtaagcatatatgatcaaataaatttatggaaatgctatttgtaggaggataacaagctgaaaacaacttgaattcccaccagtaggaaattggttgaataagttgtggtacatcctatactagttaggataatgctagttgctataaaaaataaacacaaaacttcagtggcttaacactatggttttaaaattgtgcgccaaggtgtcccaaggtactacaatcaaatttactggctactattggtattttaaatttctgagggaaacacagagatacatctgtcagataccacatgaactgctagcttgagttggttcacaatttcaacatgaggtcgcactaattccttgcagtgacatcatatctttgcaaaggtacattttcagtgattgctatgataaaaggcaagtaccgtgtgaaaatcaatgtgactgaaatgagggtgccagtctacaatctgtatcaaactttaaagtttgagaagttgtgcagtgtccaacacactcacatatcttatacgtaggtcaatgtggttacttaagaatagacatttttctattaagcatgtcactttttcaaatggctgctaagtgattctaacaactaaataaatgaatcttttcggtgtttcttttgatgtcgggataccatgaaaaaattattgggaacctctggcttgacactaaagaagtgtagttctcactcatgtaacagtccaatgtgggtgttcctggctggcgccagcttccccctacatggtgattagggatccagatctttccatcttgtgactctgtcattctctagtacctcagagttctctgcttcctgccatcacagatgggaaagagaagatggagaggcacctgcttatgaaagtccaggaaaaatatataaaacctctactcaatattccatcagagtgaactagtcacgtgatctttcctggacgtaaagtggggtggaaaatgtaatcctgaaggagcagccactttctgccaaaacttcgggtttatggaaggggtgggggaatagtctctgtgaactattttactcaactagccactgttgggagacaattctccatgcatctctcacatgtgtgcacatcttgagagcaatacactgactgctctttgttccagatcatctgttcaaggatgtttgtatactgaacagacttggaaaacatagtatctccctcaggagcaaagggcaggcatgctcactgccagtgcctctcagctccaaagccaccctttttgcctgctcgtgataatggagctgggctttataaatgattctccttcactagctagcaaaacgtgaagccttatcaatgaagagtgccagaaggactgtagaggaggaagccggggctctctccctgtttctggtttgactcactcaccaggctcccgaaaaacagcttttctctgtttcttagccccacatggtttctccagtgccgggttcctgcagagctcagctccctccagcatttggccactgcacactgtccagtgcttgactcaggaagtggcagcacagccaggagccccagactgcgcaggcccatgcctcagcccaggggaaggctgttcggtactcctctcctcagccccatgcacagcaaggcccctgaagagctggtcatctggagagctggacacatcccctgaatcccacacagctggtctggagctgcccaggcctgaaccacacacagaggtgcactgcatgacagagaggtggcttcttagctgctgctgccagcagcgcccactggctaacagattcctttggcacctagtgagttccaaggcttgtgacctccccatgcatgacctcccagccaccccagagagcagatttccagcaaatattgtcaaggcatctctgcaactttgctatccagtgactaacgccatgctttttccagtggtattcagatctcagcctggagggaagaaggttatacgttgggtacttgtctcagccctagtacagtagttgctctttatagacctgctatttctttattctttttttaattttattattattatactttaagttttagggtacatgtgcacaacgtgcaggtttgttacatctgtatacatgtgccatgttggtgtgctgcacccattaactcgtcatttagcattaggtgtatctcctaatgctatccatcccccctccccccaccccacaacagtccccggtgtgtgatgttccccttcctgtgtccatgcgttctcattgttcaattcccacctatgagtgagaacatgcggtgtttggtttctttattctttagaattattttattttaaactctcactagctgatttttcatgattttaattgttcataatcctttatagtacaactttccctgttcaaataattatgtggtttctgtctcctgcttgtccctaaataatacattgcccattttttaaaaaaaataggtaccctaagatcagggctcacctcctataatgaaacccactgcatgtacatgtctcagtctagtcctctttgaattgccccatgggaattgaggtttggaaaaactggtgccaaaatgctgataccctggctgctgcccctgctgtaagtattaagctgtacttcactctaacccagaagttttgtatcttctaccagcatccatgaaactttattagcccaacttgttcactttgcaagttggctgatgtcagactcttcatagcttttgacagccatctacgtcacacctaccttttgaaatactatgcagttactagagatcaaggcagatccttaaagactttcataatatatcgttaaattaaaaattacattgctaaatattttaacaggattctattttgttacaaaatcagacaaataaatgttataaattaatatattttattgattgatgatatcggtaaatttgggagactaagaagaagacaattttaacttaacgtgttctgtattttttaaattattacaatgagtttgtattgctttttaataaaagggaatactgcagtttgggggtcttaagaactggttattctactaatgcaagtacttcaacaattttcctatgcagccatccctgaatgtgcagccttgctctgcccagaaaattccagatgttcgccttccactgaagatgaaaacaaactggaatgcaaatgccttcccaattaccgaggcgatggcaaatactgcgaccgtgagtagaatttagattctgctagtttattcattgagatgtttaggttatttaacaggaaaaaaaaatctcacaacctccttaacacaatgaccatttctatttctcgctgtgtagttgagtgaaacgtatataaaaggtgccaagcaaaatgctcaataaatggcagcttctccttctcttatgaaagcacatatagagatttttatgtttccatatcaccttaatcaatgttagaacatttaatgcttcttattttatctttttgattttattcactttataaaaagctgtattatgtatcagttaaaaacatggactctcaagccagaccgtctgggttcagtcccagatctgccttctactgactacatgacctttaacctgccgtgtctcagtttttctgtctatgaaatggggataataatggtacctactttcagggattattgtaaagattaaatgagttaatacatagcaaattcttagagcagggcttagtacatattataaattctgtaagtgttaatgttttctttcatgctgttttatatttaactacacacacaaaatggcctactaatatatcaacacaatatctgtacaatttctgatggccatacataaatctgtctggttcagggggaaatgaaaggaaatgtttgtctttgaaaactgtgagttgcctttgaggttttgatccactgttgctcacggttcagttttccttctccatccccgttaactaactgcctctcattttgctgttgcctctcaagccatcaatccatgtttacgaaaaatctgccaccctcatgctcattgtacgtacctgggaccaaatcggcacagttgtacatgccaagaaggctaccgtggggatggccaagtgtgcttgcctgtggacccctgccaaattaactttggaaactgccctacaaagtctacagtgtgcaaatatgatgggcctggacaggtgagcaaatgatgcagggaactgatgtatctagaagtttgacaagccactatgtgtcacaggtatcatttgtcttctatgccatcccaattctccctttcaatgttccgcttggtcttcccctccagacagtcctccatgtgctcagagcctgaaatcagtgcctgctcacccagtctatcctttaaactcacactttcccagctccccatccaaacttaattgtcttacgttctctcctgtcacagtcctatatggtgtttggcaaaatatacacataattcaaaattagattaacaaattaactgttgaacatatgattgacttttaccagcaatcctccattctgcaatggctttctaatttaaaaggtgctcttagaaccaaaaataccctgttccaaacgaatgaaacagataaaatgtcaggcagcactgatagattatagggagcagtgggaatattctggggagagacactgtccctctaaatgacatcaggaccttgactgataaaaaatctggtcaggagaccctcactgaggaatccagtggaaagagccttggccctaatagcacattcgtccattgagtatttatttagtggatgccttctgtgtccataactgcacatcaagccttcagtgaaggaaatgtgtccatacagaagggtattgctgcacaggtaggaggaagggctcagtgcctgacccaaacagccatgcagtctaatcacctggatgctagctgatgggaatattcctagaattccctgcagagaatccacccaaccttgcctccaaagagaaaggatatattatgcaacatttttctgctatcgatttctggggaaggattgcagaaaaattcaaggggctaaattcccatctgcaaaatgagggtctttatgggaaaattaatgttatgccatgaatgtcaagacctcgcatgtgagataaaagatatgctttatctctgaaaatgggttccaagacagattttcaagtcttagaaattctccattgttcacacagaagcagcacgtgcatgattccaaagcagggtttctctacctcagcatttttcacattttgggctggataattctttgtgggaaggggctttcttgtgcattgtgaggtgtttaacagcattcttgacctctggtagcaccgcctcctcccatcatggcactcaaaaatgtttccaggctgggcatggtggctcattcctgtaatcccaacactccgggaggctgaggcagatggattgcttcagtccaggagttcaagaccaacctgggcaacatagcgaaacctcgtctctactaaaaatacaaaaaattagctgggcatgatggtccacacctgtaatcccagctgtccggaagactgaggtgggagaatcacatgagcctgggaagtaaaggctgcaatgagccaaaattgcatcactacactctagcctgggcaaccagagtaagaccctgtctcaaaaaaaaaaaaaaaaaaaaaacacttgtttccagatattgtccagtgtgtcctagattgagactcctggttggaaaccattattctaaagcaataatacctcccatttggacatcaatttctgctcacctatagacaatctaaaactgggacttatggagctagggaggtcaagggttaggaaacaagaaaattgaagctaaactttataagcaaggagtataagctttccagcaggtgacatgtgtaaacatgatttctacttttagatactttgacaaatttttagtttaagtccacacttcagacatactctgagtgagtttttatggaagaataaaaatacaaattaaagaagaatgccagctgaagtaactaactaggatcctatttgtttttctcttcctgtctactgaagtctcactgcgagtgtaaggagcattaccagaatttcgtacctggagtggggtgcagtatgactgatatatgtaaatcagataacccgtgtcataggaatgcaaattgcaccaccgtcgcaccaggccgaactgagtaagtcttttcaattcctccaccaacatttccaagtggtgaaaatggtgtccagtcattgctgtaagtttcttgaaggggaggaaatgtgtcttattcagccttgcatccacccccaccccacatagtaggagcaaggattgtagtaggtactcaataaatctttaattaattaaacactcaacaattatttcctttatatgaccattagaatactctggaatattgttgtggcctgataacttgatatgaagtggtcagaatgtgggagaaggaagccactgcgactggggaaacaaatggttgttgagattacagggttatgacctctaatgtacatgcctgtttcctcactcatgacatattgcttgttagaggtgcaaaacaagactagggaaagtgaataagcactagtggtgtttcctggactctagatttcaaaagaaggggtttactgtgaataaaaacatttgtgtgaaagtttctgaggcaaaggcagctcacatgatagaaagaagatggtatttggactaaagatctaggtttaagtctcagcactgatacctaccagatgcatgaccaaggaaagtggcaccatatctctggcctcagttgctccatgtgtaaaaggagcacaatgatttatacttcataaggttgttgtgatgattacatgagagaatgtttctagaaactatgacaccagtgtaatgtgttttcattagtgactgacctgaagctagaacccaagtctttgactcgcagactgaggtttctatctctgttccattttcaattctcgctaccatcagcatctgagaaagactcatagtgccattgtgagctcaaaaccacaatcaacatcgaaccatagcatgataaaacagtttctgtgattccagagcccccttcatcttttgggaagttcacgccttttataactgggtggtcagtgtgtagatttgccccaacaggttgtattatcatcatgtcctatctggacaaataaatagatctgtacttattgtacatggagtggaaagagctgggatatcagaacacttaggttcaaatcccaagtctgccccttaccttaccctctctgaactgatgtttcttcaaccataaaagggagagaactatacctcccaccagggctgtgctgaaagttaaacaggattacattcgtcaatctctgagaagaagatggcacctagaaatccttcaatacatgtgaatgcacacacaaatacaccacagccatgcatataggcacagaggcacccaacacacatatgcatccaggcacaccctcccctcaaacatatattctggcaatactgagaaccaaacaagctggtgtatgcatgttttaccaccctctgagaaagtctaaatagaataccttaagcgaactctttccttgtgtttgagaagataaaatctaaaaatgaaatgagaatatcagaataatataagctgcttccaaatttgtgtttagaatgtcagataacctaacattgtgatgttaggggtacatgtatcacccacaaaccttcccacacctcaaattgactgtcttcagccaaaaaaaggcctaagtaaaaaagctagctaagttatattgataaaatatgaagtcatcagtcctcaggtaatttagttcatctgggataaaaatttatttcatttatgccttctcaatatggcaagtagcttatgcagaatcttcaaaatcagactgcatttgtcacagaagaccacctgatcgagaagggtgggttgaaacatgaactctaccactccccctggggtgaccttaggcaagactaaacttttctaaaccacagttccctcacctgtcaagtaggtctagagaccaggaatctctgcctgtggagagctaatgagttcatgtatataatatgcttttaaacgctaagctccattttgattcttactgagaacaaataactttatgctttgcctttttacttttacttattaatagatgtaggaagtaagggacagtagaagagatgagcatttctctctcatttaactaaactcagctgaaaaatagccaggacacggctgagtgggcctattgtaataagcacagtttacattccagttgtgcaaaagtacaaacaacagtgaagtgtagggactcttggaatgctagtgacattgatgatattcagtgtttatataagatctgtacaggttgggatatcctcagtgtaaacagtcttcccaagagtcctttccaaggcaacatggtacagtggcaagagacattctcagatggatctagttttaaatcccagctcagccactgccagatgtgtttccagcagtttgacccttagacctgggcaacaggagcccctcccctgggcactgcatgttagaagctcccattctggccctctgctggctactccagggcaaggaatctgaacgtccaaaggggcatgctccccaagagcctgggccccccactagaccacactcggggtactcagaagcctgcaatttcctgcccaaacagctccaaaccagcttccagggcctgagaccattcccagggtatggaggatatggccaaaagtggctgttcatagcaggtgcagataagccagcattatctccaccatacttgtgaatatacccttgcctcaggttctgctgaactacttattatttgtcttggtctgtttgggttgctataataaagtaccataaactgagtggcttataaacaacaggaatttatttctcacagttctggaggctgggaagtccaaaatcaaggtaccagtagtttcaggatctggtgaagcctgattcataggtggtgacttcttactgtgtcctcccaaggtggataggggtagggagctctctgggacctcttttctaagggcactcattccattcatgaggcctttactttcttgatttaattattatacctcccaaaggccatgcttcctaataataccatcacactgtgggttaggatttcaacatatgaattttgaggtgaacacaaacatccagtccatcgcactgttcttcaaacatgccatggtgctccccactcctggcccttgcacgtgctcttccttccacttaggatgccatctccgtgctccacccacctcctgtgagtcagcctaacaccctgctccttcaatggccagcctaagtatctccacctctaggatgcctccctgtcctcccagtgctctctgatgcccctccctctgggctcccagagcaccctggaatgtgtctatgagagaatttagggtccagaactgtgataaggatgtagcacagtggcagtgagcataggcgctgccagttacaggctgtgtgatcttgagtgagatacttaacttctctgtgcttcagtttccttatctaaaatggggctaataacaggacctaccttatagggttgttgcattagaaaagataccacactgaagcccttataagactatgtagcataagagctattaataaatgctggctattagccgccccgaccgggagggaggtgggggggtcagccccccacccggccagccgccccgtccgggaggtgaggggcgcctctgcccggccgcccctactgggaagtgaggagcccctctgcccggccagccgccccgtccgggaggtgaggggcgcctctgcctggccgcccctactgggaagtgaggagcccctctgcccagccaccaccccgtctgggaggtgtacccaacagctcattgagaacgggccatgatgacagtggcggttttgtggaatagaaaggggggaaaggtggggaaaggattgagaaatcggatggttgccatgtctgtgtagaaagaggtagacacgggagacttttcattttgttctgtactaagaaaaattcttctgccttgtgatcctgttgatcggtgaccctacccccaaccctgtgctctctgaaacatgtgctgtgtccactcagggttaaatggattaagggtggtgcaagatgtgctttgttaaacagatgcttgaaggcagcatgctagttaagagtcatcaccactccctaatctcaagtacccagggacacaaacactgcggaaggccgcagggtcctctgcataggaaaaccagagacctttgttcacttgtttatctgctgaccctccctccactattgtcctatgaccctgccaaatccccctctgtgagaaacacccaagaatgatcaataaaaataaataaataaataaataaataaataaataaataaataaaaataaaataaatgctggctattattataacttatctcaatccccaactagaatataaggtccatgtcttactcatctttgctgcagcaatgcctgtcaccaattaacacagtgaaatgataggtacaaaaaatataaacagatagaatgaataagacctagcatttgataacacaacagggtgactacagtcaacaacaatttatcgtacatttttaaataactgaaagagtataattgggttgtttgtagcacaaaggataaatgcttgaaatgagagctatcccatttgccttgatatgattattatgcattgcatgtctgtaacaaaatagctcgtgtatcccataaatgtatacacctactatgtacccacaaatgttaaacataaaaataaaataagaaataaaaaacagtgaaatgagtgagaatttggaggaacaaatgaaacaatgaagaaatgaaatgaaccagtgaagaaataaaggaagcaactgtactaagactttgagacaccctatatactaactaaatctcaaccagcattaagtgtaattaattttaacccataactgtaaaatgcaaatggcttctgggtgtttttaaagccttaagacagcaagagacatttactcctaataaaaagaaaacaatttcctaaagaggtgatgttgtgaatgttccatggctcaactgagaacagttaagtcagaaactggtctcataacgtctcagactttggactgagatttgaaataaaaatttaaaatagtgatgtctcatgcattccattagcactgaggccataaaaatatgattctcctgcaatccttaggaaagaaaggccaagtcacttgacacaaaacagaccattggccacctaacaactcaagaaacttttacagagaaacatactcagtggtttgtaaaggttacatgtcttgctgttaacagttgtcttcaaatgaaggaatgtaacttatagtaggattaatttttaagaatgactgttgtcttatgtcacttcccagagttaccagtctcctcctttccatcattaaattagcgtagcacagtgcttgcagaggaggttgacatttaagtaggaaactattatttgattgtattaaattgtttcatgattagatctactttactaattccttataaaaaggtttctcagcctcagctctactgacatttttggccagacagttctttgttgtgaggggctgggctgtgtaagtagatccccatctcggttgtagcaaccaaggatgtctctagacattgccaaatggcttctgggcggggctggggagggggggcaaaattgcctctggttgagagccaattcttcataaaaaccccaaaggcttcatcagtaaatgatcccccaagtgtttgtccagctagaaaactcataggcagccgagcacggtggctcacacctgtaatcccagcactttgggaggccaaaactccagctactcaggaggctgaggcaggagaatcacttggatccaggaggcagaggttgcagtgagctgagatcacgccattgcactccagcctgggcaacaagagggaaaactccagaaagaaaagaaaagagaaagaaagaactcatatgcaaccttctagaattaaatattactttctcctagaagctgtcccctatttctccaggtaaaatcagttacttccttctccatgccctatagcatcctattcaatcttctatcatggcacttacaatgaaacttcatttatctctctacgggctgtcctggtatatcccagcacctctaggtcactgttgtcattatagtcaccttcctcatcatgtcagccttgtccttgtcgttatcatctgccaagcattgagctttttctatatgtctgtcacagtgctatttttctttccttatctctctatcaactatcctaaaggtattattaaacccattttatagaagaggaaactgggactcaaggaggtcaagtggccttaccatgttgctataattattttgttttcaggtccatccttagcatgtaagactcaagaagggcaaagtgtctcttattatcatctttgtagctctcttacctagaaggttcctagaattaagaaggtacttaaataatcagtaaataatcagttaaacaatcaggcactgccctaagtgctaggatataatgaggaattattatagttgggatccatcttctaggacagtataccatctagcagaagagacaatgtctccagaggtagttctggtggatagggttgtgatagaggtatcgatgggatgtgctggaagtgctcaacacaactggggagaggtcacaccagagtgataaggtgaggatgggaaagcattcctggtgggacaaacaggctgagaaaggcataacagcctaaaaaaagaagtagtttagcgctgctggaattttcagtggacagcaaaaagaagacagagcaggattctcctgtgtacactttctcatgtggataaaaggagtcagtgagggttttaagcacacaggtgccagaattttaaagcgcagtcaggagactgcatgaaaaacagatttcagggtagaacatatgggcaaaaagaccaggttgaggctgtgcaacaatccaggcagagggtggtaggattctgaaggtctgcagcaaacttgttgaacatgtaatctatttgccatggaaatatatttagaaacacacgtggattaaccataaaaaaaaaagagtgcatagtctttctttagaatgctttcctcaatgtgagtcacagctgtggtgtggtgtgagcactgcaaaactgtgatgtagtcacagcacatcttttgttccctgcatctctcctctctggaatgttcttcccttacttcgctttggttcctggctcatctccaagatgcttgtgaaagtcatcttcctcatcaccttgtcaatttcagccagctgtcaactcctctatactgcatagttgtggtctgctatagccagagcttatggactcacaagagctgagttttaaagtttcagaaatttcacaagagggttagcatcatcttattagtttgaaattggtcaagattggcatattaaccatggaaattggcaaatgctacaaagtagggcttccccctcccccagagagttggttgttaaacatttatcagcataccactgatagtacatttttaactctacttctgtcttatgaaactattgtacaaaatctctgtgattttcattgtttacatatttatttcatagtttgtatatttattttcattgtttatatacttcattgtttgctatttatttaattcaattactacttattgtacaactattgagcacctattatggacctaccctgtgctggattctggagttcacaacagtgaacaaatacacacatagcccttaccctcactcttttctcaaatgttatagggaagcagatattaatcaaataatcacacaagtcagggtgaaattgcactatgatcgctgctatggagaagaggtatgtggtttcatgagagtatatataatggagacacagtgagggagtggagaaagagacaggcaatcaaggaagcctttctgaaagaagtggcaattgagcagagctctcagctaggaaggagcaggggtgggggaagcattctaagtagatcaataatgctgaatctttgctgtcctgcaggctgaattcagtagcttattctgattcagtcatgcagtggagccctagggtccacatttattatattaaatatgttatattaaatatattaagcactccaagtgattctgatgtgcatggtttcttgatcacactttgagaaatactgagacaaagagcatacaaagatatctagtgttgacagatacatttaatttattaggcatccatttcttgaggagctactagatgtcagataccacactaggaatgctctcttgtccctattcaaccctgggcatcctttgctccatctgttcaatgaggggattggactgtatgatcaaaatactcaatggctctaaaaccctgaggatgtcttttccccctctctgtagatgcatttgccagaaaggttacgtgggtgatggcttaacgtgttatggaaacattatggagcgactcagagaattaaatactgaacccagaggaaaatggcaaggaaggctgacctctttcatctcactcctaggtacgcagctatgggtacagatttccacacaaaagtcctctttcaggaaagggcatctgcaagatacaatgattcagaaagggacaggcgagccttgtctattagaatcagcctttttggaggggtcatgcaggtgagagggaaagggcaggcagctgtttcaaagaagacaagcaaagagatagtgccaagagatctagcaatgcaagaattagcaggcagagagctgaggacagggtttgggggtcgccatagaccaacagagctgcagtaacagtaagaacaggacagctactgatgtgaggatacaaactgtccccctcgtccttgaccttctagatccttcaggtatgaacaaagcttggcaggtaaaactgggaatagagagggtgactgagaccccagggcagcatccttgttcctcagtggaggggctgtttgaattttggaatagtcttggttgtatgcaaccatcttagcacccttggtcccccagtcactaattgcctacagtgacacattcacctccagccccccaggcaaggtgagagcctaaaacaccctcatgtatttgcaaatgacttctaagggccattactccacactctctagagaatgaaatattataactgatcacagcattggacacaacttccaataaaacacaaatccagccgttctgaaaaaagtaaaacacagacttggccaatcaacagaaactttaaaaatatcagcttttatgttggaatttaccagttgccaaaaatgatctcccagcaagaacatagataaaccagtgtaattgatgggtcaatgctgtgttctctgcataaatcttaaggttaaatatcccatttaatgtctcctgcataaacatcccatttttcccaaggcatcccatagggcatcaagtattagtggcatcccttgggctcaggggcaatctaccagtttcctcacagccttactctaagaactcttagaataccaaatgggaccagacaggggggaggtagtgttttttgcagaccaggccctccaacatttccctagacagagtcctgttgacctttcaccttccccatgacaaagtccttatacactgcctctgggtgtgagaacacagagcctgtcctgtcgtcccagcttccccaggtgatggaagcaggattacctacatactttgctgggcccactggaaagtgaaaatgtaggattctttgttcaaaatttattaagcatttcaacatggcaactgcagagcattaaaccaatcatcggggctcttctgagctggccctggataaaaacaagggctgcctctttgctcaccgagacagtgacaactcaaagttaagcgcaggatcagggaccctggggttgtggtaggattttgtcatgcctgaactgctcagccagggtatctttgaagctgaggctgtctgcaggaaaactctcacggcattatgtggaatgtattgaggccatggctttagggtgccttacattcttagagagattcccagttgacacagggcctacacatgcccattagaatagagaagggcataaatggaccggtcgtgacccaagacctgttgcctgattttactcctcctgtaccactgactcatttggcgttttctttctttgtgttatttcgactcctaagacaaagcttatgcctggccactgagtaagctgggacccttcacggtgctgttacctacagacaagggactgaaaggattcaatgtgagtatttaaaatgaccctacaccaaggggctaatatgaaaagccttagtagggagtaccttcttttatttaaagtgggaaatccccattaaaattaaacctactgatgataaggatggtgattttttgataaacttcttttagtgatatataacatccttacagaaagtatacaaattgtaagtgtacaactcagtgaattttcccaacgtgaacctacttgtgtaaacaccaagtccattgccagcaacctagaaggccccctggtccccctttccaatcattaccctctacaggtaaccactgagtgttcttaacatatatccaggtgataaagaagatttgcttaaagcaaaactgctcacttcccacaggaagaattaaattaatgtattagctagatatgtgggttttttaaatcattataaatggtacaagcgataaggaaaaaataagaagaaaattttagtcttcagtgtgagcagctgttgtttgagataatgtcatccagtgggaatgaaacttgtagtgcctggtggaggcgtcctatcgagatggcatcactaatatagttatatttggtctaatgtaaataatggacttatcgatttgtatacaacttattatcttcactggcctccattttaatcattgtgtaggaactggtattctatatatctttctccctcccacctttaccatctaacatgtgtttttatttttcctgatcttgatttttttttttttttttgagacggagccttgctctgtcacccaagctggagtgcagtggcgcaatctcggctcactgcaacctctgccttccgggttcaagctattctcctgcttcagcctcccaagtagctgggactacaggcacatgctaccatgcccagctaatgttgatatttttagtagagaaggggtttcatcatgttgaccaggatggtctccatctcctgacctcgtgatctgcctgcctcagcctcccaaagtgctgagattataggcgtgagccactgcacctggcccagatcttgatttttattgtgtgttcttgtcatctgtcttaaatgctctgtgaaacagatcagccagaaataaataaacatttaagtaaatggattaacaaatacacataaaatgatggaagccaataaaagattgaaatctgggaagtgggaaaaaataaaaatgaaaaaataaaattgagttatcttaatccaagatattttgtggtaataatttttgttgcaatgaatcaaaacccagtaagttgccggctctctaaccctcatataccaccacgattaacctgtctgatattcatctctctattgttcaccttcagagatgtcctcataccactcctgttggaaagaaccagcaaacattgtatgcctctaggctaggcactttgcacgtggtctctcatttaacacatagtttacacagagttaatataagcatctgttcagtgttgactacgtagtaatgacaaaagtagatttgatcccatggatttcaaaaatcttaacttttctattcaaaagtacaatcagcttacttgctttacctactctttccatgaaacttcaaattttattcccatctgctttccatgttcaagatagattccttgttccttgttcctcctggggccattgcgatgctgtgctttccccatgtcagtttcaatgctaaagcaacctcccctggtttgagagtagattgtgcattgcctccaactctccaggtttctactccctggaaggcctggcccaggttgattgcactgatggtaatgtatagcaagtataattgtcagtgctttcatgcatttgtatttgcaaaagcccaaacccaagttagggtgccctggctttgatgtctttgataataagtaaggcacagcatgtgttacaaaactcattttcttcttcaaataatagtaaaattggctcttctctcttaggtaaatgagcttttggtggataataaagctgctcaatactttgtgaaactccacataattgctggtcagatgaacatcgaatatatgaataacacagacatgttctacaccttgactggaaagtcgggggaaatcttcaacagcgataaggtaagggttcctctgattttcactcccagaactaaattatccaccaagccaatgcccatatccttctctctctttttgtttggggtttgtgaaaaattacaaggaaattctttcctcatgtattatttgtcaaacaccttatataggaagaaacagacagcaacaccagggaaggccatggaggaagggtggagtgttatgcaaatggggttacaaagtgtttgactttggtctggtctgatttagttttcaaggcaactgtcattcaactgccagcaggaaggagaaactttgctataaacctgtttcctgaaagcatcagcacaaagccagatcagcattcctcttatagaaggaaatagattgtatttgttttagattgctggagttgatccatcttctccaacctaacattcctctctcccaatgccattagttctgtttgttttttatataaacccatcctcccccaccccacccccacttcttaactctttctgtgattttattgagctggggagcaggtgattagtcaacaaaatgtgcatgtatataggcataggacctatactattacattttactgaacatcgatagttaatagatccttgagtgcttgttctaagcaaagtatggggataaatctttatctttgttacataaggctcacaataaccctgtaaaggagggacttcataatccctgttgctccagtaagaaagaagagaggccacacagtaagtgccagagccaggattcaaatgtggctccaaagtccacattcttaaccaatctgctgcagtgcatgtgtgaagatggatgatgcatggatggatggatggatggatggatacatggataggtcactggatggatggatggatacatggataggtcactggatggatggatggatggatggatggatggatggatacatggataggtcactggatggatggatggatggatagatacatggataggtcactggatggatggatagatggatggatggatggatggatggatggatggatgaatggatggatggatggacggatggatggatggatacatggataggtcactgaacagatggatgggtagatacatggataggtcaccggatgggtggatggatggatggatggatggatggatggatggatggagagatgcatggaggatgcatggataggtggatggatggatggacggatggagagatgcatggaggatgcatggataggtggatggatggatggatggatggatgggtgaatggatggatggttggagagatggatggaggatgcatgcatggatggatgaatgacagataggaagatgtggcttgctttctcacaaggatatgcatgtatttacctgttcattcattcaaccaatatttactaagtctgtcacttattaggagttatatgggaggaagaaggaattagcttcagttatttattccacaaataattttattgtgtgctttctctgtgcaagacactaaagtgagtgatgaatttatagtaaattaaatagttttgtccttatgaagcttgcagtctgctggagaagagcttgataataccttgcccaggtttagcatatatagttgtcagtgctttcacacatcatatcatttgatcttaatgaaaaccctgtgaggttaacaaagcagacactttcatccccactttagattaagtgacttatccaaaatcacattgccaataaatatcaaagcccaaggactcaagacttctgactctactccagtgcttgctccttccaggacaccatagtaatcttattttatctttctttggtgttttaggacaatcaaataaagcttaaactccatggaggcaaaaagaaggtaaaaattatacaaggggacatcattgcttccaatgggcttctgcacatccttgacagagccatggacaagttagaacccacatttgagagcaacaatgaggtgagtattcagataaaagtcacatcaggccaggtccatcttcctttgttccctggagagtcacatccagagcatgccagcactctgtgcttgtgcttcgtttgtgctaggatcccgagcagagagaagaagaggtggtttgtctgtttccaatagaaacctgggaatctctgcagaaagaaagcaagacgtacagtaacatatgtgggaaagatctggatttttttttacctcttttattactgcatcaggcaactcagtccatgaccaatcatcatgaaaatattttatagagggcagttattgctgcaataaaacttattacttctgacctagatgatgagggccaaaggatacttcagaacatgcagatctgaactactgtttcaacgacagcgaacatttatataatgcattgcagttgaccaggttcatttatataaatccatactgacacataaactctgtcatcagtctttaaatgttagaatttgtatttcctaaatcacaatattttatttcctgatttttaagcaaaatgtctctttttagcaaaccataatgacaatgctacaaccaaggtacagcaagttcagatctttgttagaggtaagcacttttcataattttctgaaaaatatttatgtcaagacttttgtaaaattagcaggggtgtcaattataaatttctggcgaattatgttaaatatttgtccaaggtaggctgcagatacaaaatttcatttcccaaatgcaggaaaccaatttgggacatgccttagatgaggatggagttggtggaccatacaccatttttgttccaaataatgaagcattgaataacatgaaggacggcactctcgattacctcctttctccagaggtaccgtattctgcttgctctgatggcatcgtgtcagcagcactgcctcagtctgtgtctaaacaggtttttcctaaactagagatagtaaataagttgtacatgtatcaccacctaccctccaacaaccaaggcaggcatcactaatcaatcacaacattctggaactaagcctggatgtggcttcagtctcttcgatagaatttcaagttgccatgatcaattagacttgatacaggaaatgaaatgtatttgcaatcccaggcctaaatggttggtttgatttgtcttgactcttctaatatttctcactagtaaaatcaacacttcaagttccctacaactctaaaatcacctagagaatgaagcctaaactaggccattcagggccaggtctaggctaaactttaaaaagaatacgtgttatttttagatgcttcagcctttcctttcctttctattgctttcatctttctccaccatgggctttcagttctctcacattctcctctaaaagggcaattattgacttcttcatatcggggtgtcaatgactgaaaccatttaaagtgtttcctttcccagaaataatagccttaacttgaagaggacagcctattgtggaattttgttcgttagaatgtcaaatagtggaattacatgaaaggtcacatgctttctttcagtgccctgaaactatgccaccatcttggtaatggggagagatgacctatgacttcataaagatcagtgttgattatatagaatgtggagagaaggaggaaaggatgtcccagtcttttagggtagtgattcccaaagtgtagtgtagacagaaaccatccatggagcttgctaactaggcagattccaaagccctacctcaagcattctggtttagtggtgctgggatgaggcccagaaatagacacgctggtaaccaccaactttctaattcagatagccccagcccacactgttttgggaatgctgaaagttgttgcctgttaggtttaggaattcacatagatatatatccctttttagaatgctttcaggtatctataaggatatcttgctgtcaaaaaacttaggattttttttttttttttttttgagacggagtctcgctctgtcgcccaggccggactgcggactgcagtggcgcaatctcggctcactgcaagctccgcttcccgggttcacgccattctcctgcctcagcctcccgagtagctgggactacaggcgcccgccaccgagcccggctaattttttgtatttttagtagagacggggtttcaccttgttagccaggatggtctcgatctcctgacctcatgatccacccgcctcggcctcccaaagtgctgggattacaggcgtgagccaccgcgcccggccaggatttttttaaaacttaacaaggagataaatcaaaagtaatctcttacattgcaaacagatgttcaacatatgaaaagattagttataagtttccatagaaaaagtcagatttcccagggtcttccaaaatagaatgatatttcaaaatatgattcacacccaaattttatgaaacctagctattgcagaaaactgctagacctctctttagaactcacattcatacttaaagtgagctaaaaaaaaaaaaaaaaaaaaggtaatgttgttcccctaagaaattattaaaatcctgagattatgtggcctccctgagtacatagcttctaatttgatgcacattttaataataataataataaaggagttctatgacacacttaaaattaaaataaaaccttttaactagaataggaaaaaatcaacctcattgcttagttctgtcagccacctttgttccaaacattcttctctttctcctcccttgtaactccttccagtggtatctggaaatgactcatttaagctctccagagtagattgtgtacatctcttctgagctctgttcaatgagatgacatttatagcttgaaataagcctttggtaagaatacttacaccacaaaaatggttaatgcacgccactgctcctggctctcaatcttgtttctctccaagacgtatctttctgcctgcaaagaacatgaaacttcaggtctctttgttctgagttaaaaactgcttttccatttcaatttctaggtgagaagtacaatcatttctgcttctttctcaggtacagaggggttaatttttctcaacctataggaagctccttctgtctccatccatcttaacggctttatcttcaaggaagagtgcaggaaattccccatcggctatgccaatgaaatggaaaataaacagtcctctttagaagaagggcttctaattctgactttggaatgccatgtcttcttcccagtgtatctttctacttctctctgaggcaaaatttcagtctggaaaccctcccattcctgcagagaccacagcttctgattacaagccccagttcaaggtttcatcactgaaccagacagaaataaaagcaaagagagcaagacacctgcccttgccaattcacagacaccctgcaagtaaagtggggaaagggacgtgaatttatacagttcaaggtcaaattatctctttctgcctctggcaccaaagaacttgagtttggttttgtttgattttgtttttacctgaaacagcaggaaggaagtgagtgccctcataaaagaaagaatgtgtcgcaccaaaaggctcttcaacaacgacagctcctggaaacctaccctgttcgagccacactggagtgaattcgaactgggcaatggctccaatagatctcagccagataagacacaggcacacacagtaacgggagtgatgcggatcaatttctttgtccctctcattcttctgcttcttgtcaaaaggatacaataattaattcctgaggctttgaaagtggattatctcattgctaaatgctttcctatagaagcatcagaagactggaaggaatccataccagtccccttattttgcaggtgaaactgagactcatgggttaagtgacttgcagaaggttacacacaagcagaaccaggactagatctcatgttcctgaaggccagctcagtgctcctcccaggacccctacccatgccctttaatttactggcacaaatgtttatggaaaacttattttatgccccacactgcacttgctggggacatggtgatgggtggttagcaaaccagacagacccagcccctgccttccaggagtttgcagtccagtttggtggacgcagtcaagtttgggggatgtttcccaacagtccccactttgtctgactccttcaaccactggagcatcagagcatgtaataacattgcttctgcctgtaagtctccatttctgaataccatgcagtaactgagacgtaagttgaagatgtaagttgagatgtaaaggctaggtgacttgctcaaggtcacatagtaacagaaccagggctgcagaaagcatcacttccagggctggctaactggtggtcaatttcaacatttttattgacaaccctgccctgcacataatgctattggctaatagatatggtggccacataacttatcatccatgccaggtcacttctgaaagtgaatggaggtgccaggacaataggcatagaccaggattgtaccagacaagccaggataggtggtcctgctactaacaggtaactcccttggcacagtgaccaaggccaaatgcagagaggaggctgggtgaggaaactcaggttcagcagggctttctcttagcctgggacttcacgctgttgcaacctgttcttagaacattcaacctcttggcagttattaggatcttgatttgtgatccttcacttttccaagccagagtgactgtggctgtgctacttaaatagcagaacttgagggctgtgaagcttgtaactcccatctctgacttagctggcagattgcagataaattacagcagaccactgtggtcactgccttcttctcacaaagagtgtggtccctgtgttcctcaactctgcagcctctctccagggcaccctataggggctgctcatcctgtctatggtctcctttgtggggctaggaccctcttttctccactgctgcttcagttttatgaagcttgagaaaccttggaaagggctttgaaggagagggacaaacttctcatggaaggaagaggtgatcgctatccctatgactctataatcctaaatgacctgtatgtggtctgacaaacagacgtttatttatggagcaaatggaacagaataataaatcaagactgtcttagaaaatccagaatatagccttagacattctgagaagtgatggagcagagtaactgagagcctgggctaattcttaggctcatatcctgagttagttttttgaccttggacatgtctttgaatgtcggtattaccacacataaaatgggtcaataggagtccccacctcacacggctgttgggaggattaaatgagacgtgcatattatgctttcaaaacagcctcttccacagagtgggaatttggtgaacgttagctatttggaggtggggtttctctcaccctggatttcccaatagattatgggtcatttttcttgattgtctaacgtcatttgaagaggattccacaagagtggaagtgttgcattttcttctttgactaaagaagtatttggttcctttgcagggatctcggaagcttctggaactcgtcagataccacattgtcccatttacccaggttggccccacttttcctgctgctactttctctctgcttccaagatagctaacttagtcttgaattccaatattttgacgctagaaaatgtcctttatctgtagctctgaataaaccctcagccatgaacaatgagtccattatcagagcgatcttcaaagccacaaaaactcttgagatcaaaactccctttacttatttcactttgaaacctattttttctagtgaggactttaagaactcagggccctgcgtgtggtcccaaatatctctgccttttgttctcttcttattgcagcttgaagtggccactctcatctccacccctcacatcaggagcatggccaaccagctcatacagttcaacaccaccgacaatgtaagtgaaaactcaaccaccaccagcatcacttgaacacatctttgctcgataatgattattcatcaggttatcctgcctctatgctaactcatgggcttaaaatctttatgattatttcattcatttgctcacttctctcagcagatatgtgctgagcaactacatgcgtgagagtctgcactagatgccgagaataaaggagtgaaaaagatagacttctatcccagcagggaagacagactttaaataactcactgggcaatgagttaattatttaattacaatggtaatgagtgtccccaagaggaaattcagggggctgtgagagcacagaacaggaggagtctgagagcatcttcaggccaggaggtcctcattgaggaggtgatgctttggccatgctatgaataaagtgaaattggacagggatcagtagaaaagagttccagacaaaaaaaaaaaaaaaaaaaagagagagagcatgtgcaaagaccctgaggtcaggggaacacaattcatttttaaaactccaaagaaggctgcattattcatctaactccctggggttgcaatatgaacaaacatccagcagcacagggttgatatagaatcactgttgatggtgatgattatctcattctttcaacaaatatctattgagttcctactgtgcatcaggcactgttgtaggtcctgaagacagaccaatgaacaaacagacaaaagtccctggttgtatggaaatttcattctagtaaataggggatagaaaataagttaaatgcataaaatatatcatctattagacagcagcaagtgctaaggagaaaaacagcaaagcaaggaagggggacagaaggtggggatggagctgacatcttagataaatactcaagaagccctcatggggaagaaacatctgaacaaaacctgaacctgaaggaattaggggaacaaacagtgtgaatatccgggggacattccagagggaacagcaagggtgaaaagcacagagcagaaaggagcatgctgggctgtgtgaggaacagcaaggccagtgtggctagagcagagagagcaaaagggagaagagtaggaaaggaggctgggcaagagagagaggaggagagtgggggtcaggtcatgcatggcctaagaagtcagggtaaggatgcaggctcttacttggaatgagaggagaagcagttggaggattttgaactgaggaatgacatgatcgggcatacattttgagaggctggtgaggagatttgattgcaataatctggagaatactgatggtaactcagaccagggtggtagcagggacatggtgaggaatggctgaattttgaatgtatctggttggtgcaaaagtaactgcagtcttgcaatttttaaaaaattgcaaaaactgtgattatttttgcaccaacctaatattctgaaagtagatacagcagaatttgctgatgagttaaatgggggtgaagacagaggaagccaggataactcatggagcttgacttgagcaaccagaagaatgaagctgtcattaatactgcagggggtgggtggcaggtttatgaggaaagtggagatcagaaatctttgctaattggttcattttctgctccctccactaaaacataagcaagaactcatctatttgttcacagatgtatacccagctccaaaggcagagcataagtgaggtcaataaatgtattcaaatgaatggatccctatttcaccagagagaggtcaaagaatttgcgcaaggtctcacagcaagtatattgcagagcttgaataattataatttgtacttagccctgcacctgcaagaaccatttctacaagggcatccttgcctggtgttagtcaagaattcactgaacagattcaatctttccctgtcagccaaacccttataatagcaacctaccctccaatgaaaagttaagtgatgttgaggactttttagcaaagttgccaccattcagtctgcctgaggatcactggcagtcctgcagtacagaatagtacagaattagagatgtcattttttctttccagggacagattctggcaaatgatgtggcaatggaagaaattgagatcactgccaaaaatggccgaatttacacactgacaggagttctcattcctccctccattgtcccgattctgccccatcgatgtgatgaaacaaagagagagatgaaactggtaagaaaactaggaaaataagtaagggccccaaacagcccctcagagcagagagcatcccactcctcacaattctgagaaaggtgtcaaagaaagttggacttccagaaccttgtccccaaagggcttccgtcttcatgaagatgcaggtggatctgaagtcccacctcataaactgtgaaccacagttccttggggaatttccgcaatgatagatgctgcccaggaatattggctcctcagagctgccatgatgaattaccacaaactgggaggcttgccacaacagtaatttattctctcacaattctggaggtcagaagtctgaaatcaagatagcagagccatgctccctctgaaggctctagggaagaatgtttctttccttgcctccttctggattctgggggctccaacaattcttggcattccgtggcttgtagctgcaggggtctcactgtgttgcccagtctggaaatgacaggtgcacaccaccacacctggctaatttttttttctagttttttattgtagagatggggtttcaccatcttgcccaagctggtctcaaactcctggacttaagcgatcctctcatctcggcctcccaaagtgctgggattacaggcctgagccactgtgtcctacccacctctcctctttttataaggacatcgatcattatatttaaggcccacactaattcagcagggcctcatgttagcttaacgaattacatctgcaaagaccttatttcccaacaagatcacattctgaggttccaggggacacaagtttttggaaagatattatttacccactataccagagctctgggatccaatcagggttttccaacccaacccctgggatttaggatcagtctcctgcctcttccttcccctgtccctgtcatctgggaccacttgctccaggctcacagctttactgtaagagggacttaaaatagaatttcttctcaggtagctgctctagcctagccaatcaaccgtctttctgcagtacttttcaaaaaaccaaactttctgtttccctatgagcttctgtaccctctagcctttcctatttccatagcaactttttggctcagccagttttgttttgttttgtttttgtttgtttgttttgttttattttgttttgagacagagtctcgctctgttgcccaggctggagtgcagtggcaggatctctgctcactgcaagctctgcctcccgggttcatgccattctcctgcctcagcctcccgagtagctgggactacaggtgccctccaccacgcccggctaatttttttgtatttttagtagagacggggtttcactgtgttcaccaggatggtctcaatctcctgacctcgtgatctgcccgcctcggcctcccaaagtggtgggattacaggcgtgagccaccgcccctggccagttcagccggttttaatcaaagcacctgaaattccaatactgctgtacatgcactatttcggttcccatggaaaacataaccccaagttttaacaataataggtctgggtctttcttttcaggatgcttcaataatacattagtgattgctctgacaatatccttggaacatgagcattaaacaaggaaaaatggtctcattttatttattgttttgttttactgattcctcttcttgttatgaaggctggaaatagctggccaagcacctggcacaggattgtggctgattcttttaattctagatattttaattgatgtaatgactctgatatgatttaggccacagaggacggagctgatcctctgtgccagtcagatgccatctggagaatttgattccatgctgagaaccccttttttaagagaggcagaaacatggtcactttcctagccagtccccagcagtgatttatgtttggttcattctgtagaaacaaggattgggcaggtgcatcacctgttcgatttcagattattcaaaagcttattctccacctccctaaagaacagaatcaagatgtgggtttgagctacaacccaaagaattttggttacataaggaaaagaacttcctaatagctgccttagaatgaactcttcctttactagtttctctaggtttaaagtcaaatctatttgctctacatggtttagaatggtttttgagtgggttcatcaaaagtccaaatgcattctctggaaagtatttaggactagcaaagagtagaagcagctggtaccctctggaagtctcagtgtttaccaggctgaatctatagctgcctttggccatgtatgtttggattttagaggtttaataacaacactgtactagttatggtctctgcaagaaacagaatccatctgagatgatccaaacgaagagattctgatgaaggagctactgcagaggtgtggacagggctaaggaaacgaataagttttgctggagctttgagggagaagcaggaaaccactgcaactagggaccaaagagcccagggacaggacatagagttacctgaacccagtgagagcaggaagcgtggaagaggtgacctccttcaggagccgtagggatggtaccaaagcagagagggagcagggatgaaatccttgaccttgttgtcctcctacccaccaaaatcctgctagtgactggacgttggccaacaccaatcagaagctggcaagggagcttgagaacatccttcacggtctaccttctggggcacagagccagatggagaaggtcagagaggatctggagaaattggaggcacactcccaattccatcaccctgaaccagtagaggagaatccaggagactgaaaggcagagattcagtgttcggctatattgctgctaagctaattggaggacatggccttaagtctgtaaccaaagctaatacttcatccctagcacaggtcaataactgcaatgtcccctcaggggcaggtgcctccctgcatgcagagaattgatcagaagctgggagcccgtggacaggctggctctgaaagaagtaaaaaagggggctgctctgagcaggctcagttttctctcctaaactcctcccaccagcccccacccccagcgctgacttcactccttctcccacggtggagtcggtgtggggagggggtgggtagagaggccaggatcatggctcagtggggtttccttcacagggagggaagcatgaaaccagccacaggaccatcgccactgctccctctcatagggacacctgcactgacctcctgtctctccctccagggcacttgtgtgagctgttctctggtgtactggagcagatgtcctgctaactctgagcccacagtgagtgtgacagcttcatgaaagcacagatcacccaagcagccccactggtgtggtttctcaacctatctaccttccttctttagaagatattaattgcagctggggtaatataagatgggctcgtagcctactatatgggggatggtagaaagcgatcccacagacctgtgtttgaatccttgttcattgaccctagagaagtcgtttaacccttttactgtttcttcatctgtaaatgataataacaaaaagattcacatagataaaaattgaagcacaatatctaaatcaagaaggcactcagttcccatctactttttcccttttgggactgtaatattatagatgtccacttttgggtggtactggcatattgtgcagaactgtctgtaaacaagtcctaatatttgttcttcccaagcactcttctgcagagacatacaagaaaataatactgggactatcaaaagcttccaagtttaattgaattctgtacacatttattgaggattgagcatatatcagacatagtgcttgcttccagaggcatgaggatgaataagaaatcatttcattttgcttttatctgagaagctccatctaaaaaggaaaacagttgtgcaatgatctatcattcatatgccaaggactctattggtggtaaaaagcaaagtgttctaaggcaaaaatgatgatagaaatttttgcctataagtttatcataagaaagaacttaccaatgagaagtggcattaaacactagaatagatcattaggtaaggttatgagctctttaatgtgattctattgtgaagtatttagtaaagcaaaacattaaaattaaatagatgcaggtgttcagatatttattttgcttaacaaaggcattacccctgagtccttcaggatgctgtcaagcagggaatgtgagagggaggagaagaggaaattgtgttggctggtgtcacagtgattgctgtgtgccagacattgttctaaatgctttatgcagcagccccacgaggtgggtatattatcaccataaccaatgtatgattagggcactaaggcaaggaaacgtaaaccaccttgtacaaggtcacacagctgatgtggcagaaccatgatttgttctacatgtttaatcaccattctatgattgtctcagcccagggaaagagaaggaagagggaaaagaaagggaaattagacacatgggtaggagccaaaagaagccctcaaatcacccatcccgggaatcctgtgacccacacctggttaattatcctgagattcccaaaaggactgtagtgctccttcctcagtgacctcagaattccttcatatagctaatattttaggattttatagcctaggaaagtctcattgccctcttcttgagcaacagcctaagatgaagggataagcttgacatcaacaattatctaaaacaaaatttgaaccagagactaaattctcgtgacaaaacttgaaatcagcattattgtctcatcaatattttcttgatattttataaattaggcagctgaggcccacagaggctacatgactgtgatcctaaagtctgtacgtgataagacccattctctagaccttatacttactatcagtgtttcttggaaaaaatgatttaacctgtctgggcctgtttccttatctataaaaaatggcatgagaaacatccacatagaattgaagattgatgaactcatctgtgcaatgtgtctggcccataaaatgttctcagtaaacatgagttctagataattatgagtgggcattgttggttagaatggaaggatgcatataaatctgccccactcctaagagaaaaactcagactatcacaattttgtttggcaaacctttcaatgaagtgtagatagaccctttgggggctccaaaatgtctctgtaggagatcttagggatggctatagatcggaaggggagactagaccgtatccagaatgaacagaaaatattttctgcttagagacatctgctgtggcatggaagagggaataaagatctgtgggccatggatgatgcaaactctggcctgtattccaccaacaagggaacaggcctaaaaaagggtgtccaagctctgatgtagacccaggtctgctagtgtggtccagcactctctcctgacgtcagtggtgaaatggaagtacaatggcaagtgtctgcagagggtgtgcagtgcctggaggacctaaacatgctgactgccatgctttccctccttggctttctccaggcactcttcacacacagatgtgtctacagtggcaggtttgggagcctgaagagcggctgtgcccggtactgcaatgccactgtgaaggtgaggagcgcgtggccgaggcccagtctaggccagtagggccaggcagctccagggccatgctcttgggtcctagggtccacgtggtcacaggtggcccgtgcttgctgttgtcttcctgcagaggaatcaaaggtagattcttcatatggtggccagactctgtcctttcctgcatcacagcctcccatggttccctaccctcttaacacagatcacactcttaacacttccccacatggcccaccctctgcctgtggctctgacctgcctgtcacccccattcctacctcagagcatgcacacttgccattccctccctctgaatgctcttccagatttccctgaggctaactcatcttcagtgtctccattaaccagcactgtcaccaccaatctgcagtggcctccctagtacccacctgacttctggccctacctgccaccactggatgataatactttgttttcccagcactcaccgttctctgaaatgatcttgttttactgtttttaaaattcatacattgactcttccccaacttagaacgttggctccacaagcatgagccttcctctgtctgttcgcacagtgttagagccagtccagcacccaggggaggggctcagtagagttgtggtgaccagatgactgagcactagccatgccatcaactgccaaagaaaagggcaacctcataaggagaggcgaatatggcttagtataataatggaaattaaaatgcatcccctttgaggaattggtgctctacttgggggttcaaaggggaacacgcattttgtttttcagattccaaagtgctgcaaaggcttctatggacctgactgcaaccagtgtccaggaggcttctcaaatccatgctcaggaaatggacaggtgaatactgaagactggccttccataagtcaaatcaaacaataatttttagaacttctaaaccaaaatgtgatataatgccagctactcttcccaggaagcaaaagaaatgaccccttactaaaagaacagcaggtgtctgcagtagaaggatctgggtctgggatgggggatgggagagagagattccggtaatgttgcctctagtctgcttctctattgcgggctgcaggacgttgggtaactcaagaaggatctctgggcctcacgttcctcctgtgggagatatcagggttgacctgcattgatcttcaagactccttccagaactaagattttatgatagttaaaaaatagctctgcctcctgattgcttttttgaacctatgagcaaaacctagtgaaatgtaacagccgaaacttaactcatctagcttggaggcaaaagtagctgtggttcatacagggaaattatacatctgtgcatttaataagcccgcctctaaaacgtggctttttcaaggggaaagtatcagccatgagtggggacaccatgtggacaaggagaatagggagaggccagtacaaatgactgcggccaggggttagaaagggcccacacccaacactgatgtcaatcagcacacatatgaccttgccagggctagagaggtgggaggcaaatatgtttaccactgaagagagaaaacactgcagtttggagtcacagagctgagcaggtgagactgtaaagggaggctagtcactcattctggaggcccctgtcttatcacttatcccttaagcattgttgaaaggttcccagttcagcattgtgatgcccccttgagtgacttcccttaaagttctaaatcctggcttgggattcccaagctcggcactgctttagcagcctccctgatatcacatgactccactttccacgaggagtcccagagggtcatgtcaagtgggatttaatctgaattcaaagaagtcaggccatgaaatgaaaacacctgagaactatgtgtcctaatggcccatgggccctgcctttgctcccagtgtgcagatagcctcggcggcaacgggacatgcatttgtgaggagggcttccaaggctcccagtgtcagttctgctctgatcccaataaatacggacctcggtgtaacaaaagtaagtggcacttccagagcttccttccactcctaagcaaggttccctctcgtgctgcagcagggtgctggtgcagggctggtgtctcaggacccctttgcttgggttacaccatcatcacagagcattcattaagctttggttctcaaactggagcgtgtgtcagagggctgatccctgagccccacctgcagagtttctgattcactaggccccaatgggtcttcagaatttgcatttctaacaagttccgagggggcactaacactgctggtctgggaagcacactttgaagaccactctccaaaagtttctccacattcttgaagtgatagtgggctctatatcaggaaacagattcaggccagacacagtggctcacacctgtaatcccagcactttgggaggctgaggtgggtggatcacttgaggtcaggagtttgagaccagcctgaccaacatagcaaaaccccatctctactaaaaatacaaaaattagcagggtgtggtggcaggtgcctgtaatcccagctactctggaggctgaggtaggagaatggttgaactcaggaggcagaggttgcagtaagctgagattgagccactgcactccagcctgggtgacagtgagattccatctgaaaaaaaaaagaatcagattcactccctacctttcaggcagacctcttccatcagctcctttatttgcaaggcctgtggccttgggcaagttactctacttctctaggcctcagtttcttcatctgtaaaatggggatgatgaaaatagcaagtgtcttttaaagttagtacaacttataaatggaaaccgcttgccttagaaccatgcctagtacaaaacatgtgccacaaatattattatctcactatttttatctattgttgttgctgttagtctaagtacagtgacataaatatcaagaagcttgtagaacatgtagaaagttccaccacaataggcattgaaaaaaataaagttatgcaacctcagaaaatgcattccctcattctgttctttaaaatgacatcctgtatatatttaaataagcatatgtatatttttgacatatatttctaagctaacagctcgttgtggagtcagaccatcctgaagtccccacactccagcctaccaaccgtctgatctcagaaaacggctatttcttcacctataaaatgaagataatagtggtacctacattatagtttgctgacaggattaaattagaccataatttcgggcttttggcacagagcttgcactgagcaagtcatcaataagcaaagccgctcctcttactgtcgctactaactccacacatttcctatgaaacacacaacccttccgctctcctaccttatttgatcttcacaaataactctcaggatggatgggaaagcagagcacatcagggtcgaggctactgaaccctttccaatgttctttttgccaaattagattttcatattagaggaagaaaaaaatcagggtttatcccaaggcctgacaatgttggcatttgtctgaggccagccgggcaggacaccaaggctgggatggggcggtggccttccagctgtcacacctctcaatccagggctacggctgtgcacagtctcatacaggggtctcgtaccttgcaaattaaatgctgacttccctaaaattgtataacaattcttttttgctttaagtctggctgtgattttccaggcccgctcacttgtgttgttctctttcctggatgatggctccaagcacccacacgaattcctctcccatgagtcccttctggggtgaaactccagattcctttatttctgatcattttccaagcccccccagtccttgccaggtgcctttgaaaatctccatgtccttctttccactttcacatgcataggaacctgagtctgatgaggtggcccgtgttacaatttttaaatacctacaattgaaagcaaattcagcagctaaggtttaaaatgataacggtgatatggaaatgccagttcatataatgatctacggtgtttacacagtcacgaacggaaatggactttgaatcctggtttaagtttctgcctgggaatttagcagcaagttgggcaacttgcttcctctctctgggcctcagcttcctcatctgaaaaatgggggatataaaagtacctaccttctgggcctggtgactattaatgagatggtgcatgtggaaggctgacctagtgccttgaatgaagtcagtgcccaaatatcgcctattggttatcattggtttgatgtgatagagtgaaaaacaaacatattagctacttatcaggagtcctgccagcatgggagatcacttctatttattccagaatatcttcatgaaaggtgagaaatttccaggctaaactctccaaccaggaagtagttgaaaatggagttccttggcctctttcaaagcgtcacatcctcttccccacaccccacacacatatagataaaaaggagttcttttttctttttttttttatttgttttgtttttgagacagggtctcactctgttgaccaggctggagtacagaggtgcagtcatagctcactatagcttcaacctcctgggctcaagtgatcctcccacctctcggcctctgcagtaactgggaccacaagcacacaccatcatgcccggctaatttttgtgttttttgtagagacagggtttcaccatgttgcccaggcttgtctcaaactcctgggctcaagcaatcctcccacgtcagcttcccggtgtgctgggattacaggcatgagccaccatgctcagccttaaaggagttctgagaccaagttcttcccctcctgggtgggacaagcaagctctccagggctgtcccaggcactctgagaacacttgagactccaagaaatagcagcctaagtcttctcccggctcagccccgattctgctttgacaagagtgagtggggggtgagaagaggtggtccctgtcctccagggtgctctgcctcagtgcttggcttgtccccaaggcctggacggatgtccctcctcctcctctttcagaatgcctgtgcgttcacggaacatgcaataacaggatagacagcgatggggcctgcctcactggcacatgcagagacggctctgccgggagactctgtgataagcagacctcagcctgtgggccctacgtgcagttctgtcacatccacgccacctgtgaatacagcaatgggacagccaggtaggtctgtgagggaatggcccttaatgacgctgagtcattaagtgtaaggggatggcacttaatgacgctgtgttacctgtagacggagccaacccatatctgaactctgaactgaggcctgttatctccagctgacagtgtggtgtttgtgaaaagaacctcagtctgagctgggtttcaattgcagcactccctgctttgaaacttaccaggtgtgtgactgtgggcaagttacttaacctctctgaacctcactttcctcaacagtacagtgaggatgatgatacctaccaagcagggcagttgtggagattagcagaactcaatgcagaatcacctagcaccggggctagcacatcaaagatgttccattatggaaaagataattattatcaccacatatgaaagaaatgaagatttgtccaccaactttctaacctttgaagacacctttactttttaaggctgttaataattgctcccctgttaaaggcatcttgcaggaaattgggtctttaatcagtaggttgccatttgtttccttaatactgtctagcattctgcagtgggtttgagggggaaaatgccagaggaaatttacctctctggaaatacctagctccaaggcagtaaccacctaaattatcctgggaaatgcagaggatgtctggaattcttggtcctctccttgcactgcttttcttaatttttgtttacatagttatttgttttggtctgcctctcccactagactataggctatatgagacaagagactgtctcttttccacagttgtacaatagaaatgccttttcctaaggagttaggatctatatcggtgcataaggcaaaactacatgtaatcaacattaccgctgaaacctatgaaatcatccacagaggactgtcggcatgggtctgtatgaactatattgtcttaggtaaatcaaacattattggaacagatcaacctatttcttcatttggacactagataatgtattttgttcctgtaggaagcttgatacatgaaatatatatttttttaatttttgtaaggcatgtatgactgaatttgcagtaagacctgggggtacaatgtccccagcatctatcataggccactcaacaaatattggttgaatagatgaatgaatgggccacctttaatagtaaaagtgtcatcacggaacattttgagaggagcgtctggaaaggtaatgggtcaagaaaccaagtcagctcacagaagaggcacttgaaaatgtggtgttgggggaaaaaacctctgaggggccagagaatgggagaggataagtctcacctgattgtcattttcaaatattttaagagctgttgcatagaagacagagtagaactcttctttgctgaaccagaggtaataattagtattgagcaggaagagttataaaaaggcaggttctggtaaaataagagcagagacactgtcaggtgttgagatttatgatctgcaagcgctctgctaaacgctcagtgtgcatttgctcatttaaccttcagccttatatgggaggtattaggcccattttcctcatgagaaataagatctctcagttgttaagggactcgtgcagtgtcacacaactgctaagaagtgggcaggcttcatttccacccaggtgtatctgattacagatcccagaagtaccccgaccacatttgagcgctggcttcctccacaggagcaaaggatggagccatttggccaggaactggctcatctctagctggctggctctcttctgggtcgttggtgcttattctggggctgatattgcacactctcctttgcagttgtatttgcaaagcaggatatgaaggagatggaactctgtgttctgagatggacccttgcacaggactaactccaggaggctgtagccgcaatgtgagtactggtcttcatttccaccctgcctggtttctttttttttttttttttttttgagacagagtctcgctctgtcgcccaggctggagtgcaatggcacaatcttggctcactgcaacatccgcctcccggattcaagcgattctcctgcctcagcctcccgagtagctgggattacaggcacgtgccaccaccccggctaatttttgtatttttagtagacagggtttcaccatgttggtcaggctggtctgaaactcctgacctcgtgatctgcccaccttggcctcccaaagtgctaggactacaggcctaagccaccgcgcccagccctgcctggtttcttgttggcttttttcagttgattgtttgggtttttttaggaaatcctgaggaaagacattccataggtcaatgtctgatcacttttcatatgcatgaagcatttgtgtttaaaccttgaatttttattttaacacagggtctcactctgttacccaggctggagcacagtggtgaaatcatagctcactgcagcctcaaactcctgggctcaagtgatcattttacttgattaggaaactgggatctaggggagtcaagtgaccaagttctgttgttggtaggggtgtatccagaacctaccattgctttcactaattcccttcaatgatcgccatccccacctgaccctagtcaccttcattccttacctatggtttagtaactggtttctttgcttcctcttatctacccacagtgcattgtccactcacagccagagtggcttgaagtgaatcagatcatgtttttcaggtttaagccccttcagtaatttcctctggctctgaggataaaatctagatgaaaccacctgaccccagcctacagattcctttgattccctttgagtgagccccatcccaaccccatccccctcagcctcagctccgtatcttgtatccctctctccttctcattctgtcctccagcctcctggtgaggctcctcctgagaggcccgggagctagtatagtggagtttgggttgccacattatacaggcccgggttcatgtctttttatagctgcatgaccttgggcaacacctgtttccttagctgtaaaatagagataataacaatactttcctcaagatgatggtttacacctgcaaaacaatataaacagtccctggcttaataactaacacagtgatgtcagtggccatgagctggccagttccaagcaattttgttctttaaatgacctaatcttttcatgaatctcaatgtaaattaagcatttccacctcactcaatgcaaatctgtgtttctggaacatatgtctggaaattctctcttatttttggaatcatgtggctggactgaggattcagaggctttgctttttcttttcctcctgcaggcagaatgcatcaaaactggcacgggcacccacacctgcgtgtgtcagcagggttggacagggaatgggagagactgctcggagatcaacaactgcctgctgcccagtgcaggcggctgccacgacaacgcatcctgtttgtatgtgggtcccgggcaggtaggttggatgtcatgagagcaaagagaaagcaggaatcctgcagtgactttgctttcccctcaggacacagaagtactttggctagaacttactgcagcttttttcagtcattcgtggcagtgaacatgggttcattgccacaacaaacctatgatgtattattatcccatcttatagaaaaggaaattgaggcaatgagaagctatttgcataaatcacatagaaaataaataatagtgcaagatttgcatccagtctgactccagggccgccctcttagtcaccaccctggatcaaccttatatttctatagctctgcagtgtattgatcactttcactcactgtcatttaatggaggacaacgcagagaaggctactgcttaaaaattaaggagctccaggggagggactaccaactacactaggattgtggcaatggaaaaagagacaactgataaggctcccttcccccatccatccccacctgcttccacctctttccacaggtaggaccaacaggtgtgtttataatacaaggctaaggaggtcagaacacacggaagatgggaaccaggattttaaatcaacccccttatcttttgaatcttgatacagtttctcacttttatgttttaggctgaacttttttaaagacctacaaattattttctgctctttgagaaatatatttcttcccatgatgatggctctgtttgaggaaagcctaaccttgctcaccatgatatctcccacttgaccccgagccttttggttctcagacctctcatttctgtgcacaagttaataatcggagaaagccagagcttgtagtggaacttgatgagatattaaagcccacctcctaccttccctttccttcatggaggaatttacccagacaaatggagatctgccctattttattttttgagatggagtctcgctctgtcgcccaggctggagtgcagtggcacgatctcggctcactgcaagctctgccttctgggttcatgccattctcctgcctcagcctcccgagtagctgggactacaggcacccaccaccacgcctggctaattttgtttttgtatttttagtagagacagggtttttccatgttggtcaggctggtctcaaactcccgatctcaggtgatccacctgcctcggcctcccaaagtgctgggattacaggtgtaagccaccatgcccagccaatcttccttatttaaaaatatccaagaagtttttagggcctccctctgtggctttaggcatcattcccactcactcctccattctgctaggaatgagtgatggaacatcggtcctgcgggccagtgcagggctggacacttgtgcagagacagtcagaagtgttggagctcctctgggagctcataactaccaaagttagtgatctgtacagaactctttccaaagagacccccacagggggttaaaaggtggtcaacatgggccgggcactgtggcttacacctgtaatcccagcactttgggaggccaaggcaggaggatcacctgagattgggagttcgagcccagcctgaccaacatggagaaaccccatgtctactaaaaattagtcgggcattgtggtgcatgcctgtaatcccagctactcgggaggctgaggcaggagaatcgcttgaacctgggaggtggaggttgcggtgaactgagatcgtgccattgcattccagcctgggcaacaagagcaaaactctgtatcaaaaaagaaaaaaaaaaggggggtcaacatgattaggagcaagggttaaaaagtggaactgcttagctaacagcatggcatgctctcaccctagcccacctcccactcttgaaaactggtgggagatagaagcacactacacccaggcaaatcctcaacgttgacatgtctatttacagctagggtaaactatttcaatagaccacagaaggtgcttctcggggagtgacagttggcaatgggacagggatagaaaatctgtgtcagggagaaatctttcagttataacagaaaactcaattacttgtggaagtgtaaaatggtacagctgctatggaaaacagcacagcaattcccccaaaaaattaaaaatggaataagcatatgctctagcagttccacttctgggtatacacccaaaagaatcaaaagtgggactcaagcagatatttaagcacccgtattcatagcagcattattcatagtagtcaaaagatgaacacaacccaatggccattggcagattaatggataatcaaaacgtggtatatgtatacaatggaatagcaatcagccttaaaaaggaagaaaatgctgacacatgctgcaacatgggtgaaccttgaagctgtgttgctaagtgaaataagccagagacagaaggacaaatactgtgtgattccactgctctgaggttcctagaatagtcaggttcatagagacagaaaggagaatggtggctgccgggagctagagtagggagaggaacgaggagttattgtgtaacgggtctggagtttcagtctgggaagatgaaaacaagtttggagaaggatggtaatgatggttgtacacgaatgtgaatgtatttaatgccccttaactatacatttttaaatggttaaaatgatacattttctcatacatatatttacttcaattcttaagaagaaaaaaaaactggtttaaaaagaaaagagaatgttttggcccacatgactctaaaggccatatatggatctagctgctggtacaacatgattcagggctcagaaggcagcataaagggtctgtttcttggctcagcttcttcccaggttcctggggtgagggatgacctccggccacttccaatttataccattgcaactcttaagcagaatggagtacattatctggtaacttcctccaaaaagccaggattcattctttcattgactcagattgagtgcatccacacccatcctcatttcctaccactcccatcagcccttgtgcacaattacagaaatcaggctggggaggcccagggtggaagatgcagtgataagcacaggccaaggccctgcacctcaccctggggtggaggaatcagccacattttatcatgtggactaggagagggggagtgatggtgtccccagagccaaatggcgtgtagtttccagaaagtgagagaacagatgctagccagacaaaatgaaacagatgttcccttatctattcatttgctcattcatccaacacttctcaagtgcctacacccactcagccactaagctcagtggtgaggataagagattaccgtggccagggccctcagccagacttgaagaaatgcgatcttgtgcgaggcgacagacaaacctatgtataacgctaaagtgataaatgttgtaaaagccacatagggtaagtcccatggtctggttgttccacagcgtctgagggctgctttcctatttatctttttgatttctctgacagcagagcctgctcatgggtctggagaaaattagctttaaaatgtggctccaggagtcttaattgtgaaaaagctcactgcagtcttatgtcttgccaagcactcagtaaataattgcattcatttttgacgcacttgagttggcagattgcacttgagaaaaggaaaaaaaaaatgacttggtgtctgtattagctttctggggctgccatacaaagtgccacaaactaggtggcatagaacaacaaaaatgtattgtttcacagttgtagaggctggaggtctgagatcaaggtgtcatcagggttgtttccatctgagagctgtgaagaagctgttccatgcctctctcctaatttcaggtgctttgctgaaaatccttggtgtttcttggcttgtggacacatcaccctgatctctgccttcacgttcagatgttgttctccctgtgggtgtatctgtctccaaattcccccctactttttttttttttttttttttttttttgagacagagtctcgctctgttgccaggctggagtgcaatggtgcgatctcggctcactacaacctccacctcccgggttcaagcgattctcctgcctcagcctcccaagtagctgggactacaggtgtgtgccaccacacccagctaatttttgtatttttagtagagacggggtttctctgcattggcaggatggtctcgatgtcttcacctcatgatctgctcgccttggcctcccaaagccccctttttattaatataaggatactggtcttactggattcaaggcccaccctactccagtatgacctcatcttaactaattatatcgtatcaaccctatttccaaataaggttgcattctgaggtactggaggtcaggacttcaacaaatgaatttgggaataaggggacgcagttcaacctattacagtatctgtctcctcttacagtatctgtctcctctctgctctgtcctcctttctgtagacaaacttgaaaaacatcctgatgggaagatgggaagatgggaaaagaggggggtctctttgtggtgttctataagaaacagaatggatcaaaaacccaggattcattctctttcattgactcagattgagtgtgtccacatccatcctcgttttctgatgctcccatcagcccttgtgcacaattacagaaatcaggccaggggaggatcgagactgccctcctgtctaggattgccctcagctgggactagttggcttggaaacttttagactttccaaatggacacaaaccttaattacgaggaatgctgctttaaaaagacaaaccgtgctggagccaaatgtttctaaattgaacaaagtgccttacaggctagcaatggcctcatgcatgcatctccaccaagtggataccccacagcttgcttaacctttctcattaggtagaagggccatccaatatgatgctttttagggcccaagttctctctgagactatctccataggaccctctggagtaaagaattcaggaagaggctgggcgtggtggctcatgcctgtaatcctagcactttgggaggccgaggcaggcgtatcacaaggtcaggagtttgagaccagcctgaccaacatggtgaaaccccgtctgtactaaaaatacaaaaattagccaggcgtggtggcacgtgcctgtaatcccaactactcaggaggctgaggcaggagaatcgcttgaacctgggaggcagaagttgcagtgagccaagatcatgctattgcactccatcctgggcgacagagtgagactccatctcaaaaaaagataaataaatatataaataaattcaggaagagagtaccaagaaactatcatattggaaaatgtaatgtagaatatggagactaataactctagaatctgaagtgtatcaagcaaaaggcattaacactgttctctgggacagccaagcagcttcagtttccatagtacgtttctcagtgctgtgtgagggaaagacatggaaggcacttgctttcaataatccacttgactctgttcttaaaattatagaatgagtgtgagtgcaagaaaggatttcgaggaaatgggattgactgtgaaccaataacttcatgcttggaacaaaccgggaaatgtcatccattggtgagttatttaaccttgtttttcattacttaaaaaaaaaaaaaaaacaatgcttgagaaagaaagattatttcctgtctggcctagtgatgaacaaaatctcttacccccaaaagggaatctctaagcagaatgcgagtagttattgcaacttctacttcattccaaagcttggaagaaccaacatatgacttccaggtaaaatacagaagttctggttaaatttaattttgaagtaagtaacaaacaatctttaagcacaagtaagtcccaaatatggtgtgggataaacttataattactcatttttcacctaaaattgaaatttaacaagtcattcaatatttttatttgctaaacctggcacctctaaaccaacagtttaaaggatagtttaagaggtaaccggacttccatttcgaatgtcacaacagagttttacaagttatcggtgaaaatgcccattcaagggtaaatggtgccttgcttctcaactttgaaagatcaggcacaggtattagggctgggggtggttatgctttcaaaagaacgctaagcaccaaacataggaatcaatgaagtctgatgccttaatcacagtgtttggagttccaggtaacagagtccatgcagaagataaatttgctgggaggacccccagggtagctctgggaatctagaggcaggaagtatagctagacttcccaagagcccagaaccaggacatgaagagagcaggatcaccagaatctaagcagtttctttccccagtcctctgagacaatgtgacctctcgtttgacttccctctgtgcattttctttctctctgcctctgtctcattccccgaacttgtagtgcttctgtgtacatcttgaggtaaacggttcccccaccatcagtgatgccctctaatttattagcaccccatgtccccgttcaaaatcatagaggaaaggatctaactggcccaactgggtgcaggtgtctacatatgagtccgtcaattgtggccaagaagtggggttgttatgaacatagctgccagggcccacccctagtacatgtgcagggtggggcgtgggggactaattctctgatagaagaaaaatgaggagggagatgcccccaaggtgtctgttactcaagaatctcaagaacattttgcaaagctgaaggagctctcacacttctgcttgatttaagcccaaccaagccctgacattccagatgtgagtagctattgcaagtttcattccattgcaaagcttggaagaaccaacatatgattgccagataaaatgcaggatacccaattgaatgtgaatttcagatgcacaagtatgtgttgaaaaatctttcagcacaagtatgccccaaatattgcatgggcaaacgtatactcaaacttactcatttatctgaaactctcatttaactgtgcatcctgtatttttttatttgctaaatctggcagggatgagaataaataatcgtgattaatagctgcatcaaacatgcagacaggagactttcactgcaacactaaagggtctatgggttacttctaccatctttcagccccaaatttgcagttatcaccttagatggagcctgtcgtctcatagatgtaactcaggtctaacgtttttgttggggtaaccatttctttcatcttggttttctcaggcaagctgtcaatctacttcgtctggtgtctggagctgtgtttgtcaagagggctatgaaggagatggctttctgtgctatggaaacgcagcagtggtaagtcatcgatgatgaactcaataatatagacaaaaccctttaaaaacctcttagctaagatgcctttaaagtgatctattgacatatcttttgctgcaggagattttacatgaagcaagctgtttctcacagatgacatacatgctctgtgggtcacgttttctacaggctgaaggcagctggctttttggcagcttctgtgtaccaagcagtccttacttctctttcttgatactctacctgtttccattctcagacttcctaaagagcaactaactggcctctgctgggttcactgggctctcctgtctgggctaccctttgcttacccatgctgtgtgtgtgtgtgtgtgtgtgtgtgtgtgtgcgcgtgcgtgtgtgtgtgcgtgcgcgcatgtgtgtgtgtgtgtacacacttctttatgccaggcgtcttgctcagtccttaccaggcagtagcactccatctaaatctcaacaaccttctgctactattatgcccattttacaggcaggtaaactgagaggcttagcaaaacttgcccaacacccttcagctccagagtgaggaatccagctgatagctctgatagctgtcaagtgcagagcccaaatatttaaccaccagtgtagaacattctatctgtacagcatgggccacactaaatcagcattgctcctacatttttctattttgaccataaacttttttttaatttattgaggtaaaatatacatatataatttaccatctttaccatttctatgtatatagttcagcagtaataaatacatttatattctttattttcttttcatcccctccctccccttcccttcctggtctctggtagccacgaatccactctctgtcttcatgagatccatgtttttagctcttgcatatcagtgagaacttgtgatatttgtccctctacaaccataaactcttgaaagatgatctttgtcttgtttcctacgtcagtcctattgcttataaatatttgtcaaaatgagaaagtcaattgacaaatttcctcatcacttactttttattcaactccctgctgttgagttcctgcccctcctctctgctgaaatcacgagcctaacaattcccaggacccgcagcctgcactaagagtctcgccctaagaaccttgcccttggggggccctttccacccttcccctctcactgtcaactgtgccttctactcaccgagtcaggccaaggagctgtctcctgacatgcagaccatggcacataaatcacaacattttctctgcactagctacagaccctggtttcctaaaattctaaaatcctgctttcacgacgtccctctcctcccacgaaaagcaaaattaagtcctcagcttggctctccaggtatctccacacagacttcactcttgtttttggtctttttcttgagacaagatctcactctgttgcccaggctgaggtacagtggcatgattatggctcactgcagccttgacctccccaggttcaggtgatcctcctgtctcagcctcccaagtagctgggactacaagaatgtgtcaccacactcagctaatttttgtattttttatagagacagggtctcgccatgtgagatacctcaaactccaagtgattcacatacctcggcctctgaaagtgctgggatggcaggcctgagccaccatgcccagcccacttgtttttcttctaaacagctttccgctgcagtttagccgccacctccccagctccaggtctgccatgttcctctctctcctccccaactctggccttcccaccagcagatcaggtgcacctcagccctcctctcccttaaaatgtcccctctaagggattactcaggcatctctgctcttgtgtttattcactttcttgctaacttacttttttaacatgtgcttattgacttgcttaataacctcaactactagatggaattgagtcagcactgagacttattgtattcatgtaaatttgcataggatcatgatattgccatttttctggtattcagtagtttaaaaaatattttcacatatattaatgcacttaattttcataatccctggagcaaggtttcaccatattcattttcagataaagcacttgagttctcagaggttaagtgacttgcccaagatcacacagctggtaaatggcagatccaagaagtgaacccagtcttttttaataactctgtgtttagagacattaaaaaaaaaaaactataacgccttcaaatgtcactgctctgccagcaatattggttatcttttcaaggccgaacttcccctaaacaactgtaagtcatagaggagccagggccatcttttcccttcaatatcttacatcctctttcatatcttatagcttcccttcaccccaccccagtaccaactggggtggctctatatatagagagagccatatgggtaaattaaagataataggggctaaaacttactgaaattactgcatgccagcctctaatcactttaaaaacaactcctatttctcttatcaaactgtgagttggagcttttattatgcccattttacagataagaaaattgaggtcctttaggtaactggcctagggaactaggaaatggcagaaccaacatgaaaacccatgtggtttgcttccattgttctgagccactactcaccaacggctctgaaagggggctatttgctgagctctgtgacccccacttagcgtctaggtagccgcgttcttacagcctaaattctgatttggaagaaccttgagttgttgcttcattcgaagttcctggaattacttccatagagaataaccaagccaccttagtgtgaaagaaatgtgcggttctgtcagcatggaaatgcagctagctggagcacgcattcacatcagcatcagggaggcaggccaggacaacgagcctagccccaggaaggctgagtgcaggtgacccagagatgcactgtgattgcacttctcattgttctttctctgtgttctctcccatctcttcttccctcccttgcatgatatgaataaggaattgtcatttctctccgaagcagctatatttaaccgatggataaatgtgagtacctttattgggacttaggattgggaatgtatatattttagaaacttggaatgcatacaatagaaaaccgaaaatgcagctggtaaggagtgtaggcaattgtgctgagcagtgtttctcaacgctggctgcactgtggaaccacatggaacacatttttaaaaaatattcctgcataggtcccacccctgaagactctgatgtgattgatcagaggtttgctctgagcatcagtgtgtcggggccagaaagggggcttcattcatcacaggattcttttttgtaagttaacatgactcatcattgtaattcaccaagttcgatttgggatttatagctgcaatctgacatacttcatatgtgcttaactctcagctcaacaagagctgccaagcccagccagccattgcaacaaatggtttatccccttaaaatagacacatgccaaatagtccatgcctggtcagcacccaccccaggacagcttcctgttgcttctgtatggggcctctctgaaccccccatcccagcataggtgaaagaagagactgagcgtgctctcttgagcatgctgactttcatctagactcttcattcttggtctcaccccacaggcatgagctggcccagtggtgtgctgaaccctgttcacactcactcacgaaagctgattgtgcacatttttcctaactccactttcggtacagtcattttggtatcttgaaatcagccctggtgggagtatttacgccatagaaatcagtaaatactacaaaccaagtcttttggtttttttttttctttttcctggagatccagttgttaaacatgccactgcttctaccaaaaactggctctctaggcaagaatgaaatttatgtaaggttttatttcagccctctactttctcccatgctgaaactgttcctgcagtctccccaccatccttacttcaaagacgtccaagaatactcaaggtggctgggcgcagtggctcatgcctgtaatcccagcactttgggaggctgaggtgggtggatcaggtgaggttaggcgttcaagactagcctggccaacatcgtgaaaccccgtctctgctacaagtacaaaaattagccaggcatggtggtgtgtgcctgtaattccagctactcaggaggcagagacagaagaattgcttgaacctgggaggcggaggttgcagtgagctgagatcacaccactgcactccagcttgggtgacagagtgagactccatctcaaaaaaaaaaagaaaaaaaaaaatgaatgctcaaggttctctgcacacacacatactcacaagaacctattaaggctatttcttggctcttcatttagactaaagtgtaaaggacttataatgactgaaagtgtgatctcattatcaaaggcagatttgctttgataagactcatacattgaattaagtgagtctcacaagggaaaatgaggcaacagccagtgggtggggtggatttgggaaaggagaccctaggacccttccagtatcttatgggaaattgtcatctcttccaagcatttaaggcagctctgtttgtcccctaacataagcaggtcactttattttccttctgtggttcagaatgcttctctacaacccacactgtcagccacctcaaacctcactgtcctcgtgccttcccaacaagctactgaggacatggaccaggatgagaaaagcttctggttgtcacagagcaatattccagccctaataaagtaggtgttacttattttattttacatcgtatctgaatggcatctgtgtaaacatgtctttgaagttcaatgtaggaaaaccacatggtccttcaaattcgtggagctgaacatgttctaggattctcctttcctcccaccccaggatagtaatagtcaacaattgctgacagccaactctgccaagcactcttttacatataacccagttaattctctcaacaaccctatgatagatattgtaatgattcccattttacagatatggaaaccaaagcacagcgtggttgagtaactaactctagccaaggctggtaactgcagggggaacttgaattttgactatggcaatctggctccagagcctattctcttaactattcaatgatacagccccatacatttatattgaattatagcctttgtggactattgtttcaggtaccatatgctactaggcacatacagagtggcagatctgcagaccctgtcttcttctgacatgttggcaacatctttgcagggcaacttccttcacttggcaaaggtggatggggtaagagctctggaatttgtctgtttacttgaaacataacagctttgtttatattgtactttttaaattttcatgttatgggaacttccaaacatgcgcaaaactacagagaacagaatccctcatgtgggcatcacccagctgcaataattatcatcatatatcaatacatacacatatacacgttaccctatagcagtgatcctctaaaatgtggccttctgcccactgattggccacaagtcttgcaacagaccacagactaacccagaaagggtaaaggatgtgcaattccacaacttttcttttgacgtatagttgattaagacctggttattagtaattgaatctgtatagagaaatgaaattgaatctttatagagttgagtctatatatactcaatctttatagaattaaatctttattagagaaatgaaattttatattaaggtagagttaatcaaccaacaactattgagcacctactactatgtaccaggcacagatctaggtgctggagatagggcaatgcccaaggaagaacccagccctagagaagcttatcatctggcactttctacagtgtgtcaaagactcagattcagaattctgtgagggagtctggccgccctgctgcacgggcagtgtttcagagctcttcctgtgaattgcacaagatgagaatgaagattccactgcaaaatgagaactgctacatccatgaaccatgggctacagtcaaaaatgtttgagaattactgccctaaaacatttctaccctcccactcatcagtgtgagcactatgaaaaagatctatgcgtagtaatacctacatatatgtgactcatcagatattttcttttagaaagcagaaaacagtggtcctatggctttttaatatcttatgataattctggtgacattgaagttattttccatcaggttttaaattaaaattgtatgtatttaaagtgtacaatatgatgttttgatatacaaatacattgtaaggtgattcctacagtcatgctaatttattggtgttttaaatcattgattatcttagcaagcattaactaaacacccatctgggcaggcatatcccaggccctacagattcagaggtaaatcaatcaaggcccttgacctagaggagctaaccattaaagacacatttgtaatgagttcattcctatgtcctatataaatatctcctgccaggagggttttcttcaggtcctctgcagatgtgacttgggagttgctcagagtgagacaagaccagggtttccagaagggatttcaactggggagaagaggagaggaaaccagaaagagtagagtccagttggtgttgattggtggctgagtgggtgggtgggtgggttggattttacttagccccatttcttatgcaattcatagcctcaaaaagtagttggattctgatcaggaaagtcaattaccatctgtattagtttgccaacactaccataacaatgtaccacagactgggaggcttaaacaacaggcatttattttctcacagttctgaaggccagaagtccaagatcaagatgtgggcaggattggttccttctaaggctttgagggaagggcctgtctttggcctctctccttgggttgtagatggcatcttcatgttcacatggcagtctctgagtgtagctgtctctgtacaaattcctgcttcttgtgagaacaccagtcaaattggattagggtccaccctaaggacctcactttaacttgatcatctctgtgaagaccctgtctgtaaagtcatcatctgaggtactaggggttaggatttcagtatacaaattgtgggggcagggggggacacagctcaacccacagttctgtctccagggtcaaaccacagggtcactttaatgagcctcgaacagcacttttgtcaatgaaatagcatggaatagaatagacttgatgatcacagtacctcccacataggggaaagtattatttctttctttctctttctctttttctttctctctctctctctctgtctctgtgtgtgtgtgtgtgcgtgtgcacgtgcacgtgtgtgagagagagagagagaggggtctatgggacaacaagttaaaggtatttcttactgtgggtcttggcccaaaagtatgaaggtcactgctgctcaaaaagcagaaaccccagagatcatctcaatcccaaggtgcgctctataaagactcatcttcccactgtggtttgcatttacagaatatcacaattgaaggggcctccattgtcgatggggacaacgcagccacaaatggagtgatacacatcatcaacaaggtacaagattccattctcctgtgcgtgcagcatctcttttccctttgttgtttatcgtcctatacagcatttttttttttaaatagaaaaatacttagccttatatggaagtaaccggtactgtgcctcatgacttttattttaaaaccatcaagagagtctattgattcaatgagactcagtttccatttatccagcctgtattctgcaatgggccctttatcaagtgtggtcacatatattatctttcttgtttatggaaacatctcaaaagacacttgaggccaggtgctgtggctcacgcctataatcctagcattttgggagtctgaggtaggaggattgcttgagcccaggagttcaagaccagtctgggcaacataatgagatcctctctctaccaaaaaaaaaagcatgcacctatgtggtcccagctactaggaaggctgaggcaggaggatcacttgagcccaggaggtcaagactgcaatgagctgtgttcaagccactgcactccagcctgggcaacagagcgagactgtctcacaaaaacaaaaaaaaaacacacttgagcttaagcaccctggcactgtgaagtctgtacaaccagatgggatataatcaagaactggagggagaggcatgtgattacatatcatttttccactctcctatctgcattaatgcatcctaaaaagatgaggtagggaaggccctaaggaaaaaagtggaaaagaatataaaaagcatggtgacatttttattttcttctaatacccagtataacaaaggtatgacataggaaaaaaagaataatgagaaatgggattgtaagctaccctgcaattttcagttaccatattaggatcttcatttaaaatgaaagttgcaagttggaatttagggtacattgggaacttttgtaagatggaagatcagaaaaaaataacaattaattgtgttttaattaaaattgttctcagttgggcacggtggctcactcttgtaattccagcactttgggaggccgaggcgggcggatcacaaggtcaagagatcgaaaccatcctggccaacatggtgaagccccctctctactaaaaaaaaaaaaaaagtacaagatggctgttaattgattcagttatctgtgtagcctctgggctgcaggcgctccctaaggagctccttctctatctgtcaattggcatcaagggcatctttgtcagggccaccattgtgccctgcataaaggtgcctggccagagtggaggctagctaaatcccagcccacttcactccccatgctgtgcacccctgtttggggttgcaaactcctagagaaaggagtgtctttttcttgattttcagtggccctcatcactgcctattgttatgtgacatagacatagaaccatcaagttctatcaggccttctcctcatagctcttgaatctgccaaatcccgtctaatcaccttaagcccctcctcccccttcagctccaacaactcagaaatgtgtctgtcttcctccaacacaggggttggtacaacgtttctggaaaaagccagatacaattattagactttgcaggtcacatggtctccatcatagctgttcaactctgccaccgtagtgcaaaaacagacttagacaatatgtaaacaaatttgcatggctgtattccaacaaaattttatttttaagtacaagcagcagactggattgggctttctactgtagtatgctgtgagctcatttagggcagaacccagacctcagtcacacttgtatacccactgcctggcctgtagtaggcaagcaataaatgttggaaaaatactgattagattagaaaaacattccagtgttgaattcttcaatctgacaaagttctaggtagaatgcaaaggtgaaaatagtgatcttggccagaaggttaattatgcagagcttgcaaactcaaatgcccagatagatcagatggataacaaaatgagtaaggagtatgtcccaagtagaagacattagggagtggtggagcctataatgaaagtggctgctgctactctctgcagctgtgtgtctgcagaaattcagactgattttttttaaaggcaatctaaatttatatgtaaaaatgtcctattattacatagcacaagccaaacaaaacatttttacaagccagattcaggccactgggttgcagtagatttgagacttcagagaaaataaatggagaacctaaagaataaacacacgaataacaaccaagaagaaaggattagatattagctgcaacctgctgtgtttcacctcgatttggtctaaggtcttctctgacaaggtagattaatgcgagctggaattaattacttaggagaagctgaaagtctttcgtgcaagaagaacttttctctaatcaaggaggtttaacggtaaggcataaaattgaatgactaacatctccaactctgctccagccttgtcatgctgtatcctggaatatttttatactgtgagtaatcttcaaaaggttgtcaatgtcaatccattgaactgtctaaagaggttaatggcattagactctcctatgtatcgaaaagcagtaggtcctaccaaaacatgctaacaggattctggggtttcttttttcaggtgctggtcccacaaagacgtctaactggctccttaccaaacctgctcatgcggctggaacagatgcctgactattccatcttccggggctacatcattgcaagtaccacattctctgcctgaccaccatgctcaggttacccaggaacaggaatccctcatgcactcttgtctctttccatcgcagcaatataatctggcgaatgcaattgaggctgccgatgcctacacagtgtttgctccaaacaacaatgccatcgagaattacatcagggagaagaaagtcttgtctctagtaagtgtcaagaactataactagggaagttattttgtgaaaattcaaacactcagtgtttgtaatccattagttgtgtgccatttcactccttcatccttgtccatagccacatacttgacgtagactggtgcagagactctctcatacacaaacatcccctcggtcagagctgctggatgctactcacatgcccctggaattgcacacttgagcctgtatacacaaggatgcaggtgtggtgcattaagggtgtggtgttggtgtgtatatgtaaatatgaacaaaggaagcccaaacccacaggtgcttggcctgtttaggatctatctatagaaccatcactctggttctagcccgagtgatgaaaccacatggagaaaccacatggtttctccagagcagtggtgggagaaaagagtgggctcaggggtggcttctcggggctttcagtgccacccccatcttattaacatcctcatctcagccacccaatataaacatggaagtgaaaacagtgtgcttgccgtgcaaatccagcttcaaatgtgtcttctcatgtggggttggggtggggtggccctgggcccttcccgtataaaaattctggagccactactgaatatcggataaattatgatcagcttatggtagtcttaaatacctggagaggtcatttggacttagtcctgtaagaaacaggatccacaaaagagttttaagtcagatcgtggcatgattgaagcttttgaattaattcacaaaatcctttgacaaactttgactatttacccctagatgttaggaatcagggaaaatagagaaggggagaagaggaggaagaaagagataatccacccctctaggtccctgctgctgacatcttagctactggaaccaaggaaaggccagggacggggggaggagaggaggggtgatcatgaggattcttccagcttcctgggacacctgcatgcttgttcctatgagctcaagtgtgtaattccaggggtatgcataaaacacacagcagctctgctatgggggaggattgtatatgggagagtctctgtgtgaggctgtattaagtatgtggctatggacgagaaggttttgatggaaaagtgaaatgacacgattgaactgaaaacggtgtttgaattttcagcaaatagggatttttcttatttaataaggaaataaggaaggctgctcttcttcctcaccacctcctaaattatccctatccactcatcatgtccagtcccacctcctcagggaagctggccctggccacctgaggtgagctgctctctcccgcctctgaattcacaccatgtgtaccccctttcagcatttattatgtatccccaataggatgaactgtcttctcaaagaagcaagtcttagctctccaactagattataagctctgaaggcagggagagtgtcctaaactcctgtaacaggcatgttgcactcctgggatggaactggaaatcttctaccttgtcttttccctgccctctaacccaacccatttctttaacctcttcagtgagaaatgttatttttctgccacagaatgaaacttcagacagtcccatagcctctctgccttcccaaaaagtcctataatcaccttggagacaaatgtactttaagtcacaaactcagtctcagctaagtaaaaataaagaatccaattccttacaataattaacactttgaattggatttaaaactagttcttcctccctccctgctccacagcagagcttggtgcagaaaacatctcggtccttgaatcaaggtccacaggagatggaaaacataccaattacataaactgagaatttgatagaatgaattgtttattggatataaagctgtataaatgaaaggttaaagtgagaaagaaatatcacaatggtagcaatcacaggattcacttatgacccctaaagctaggagaacaatgggaggaggttggaatttctaaaatgtataaacctagagcctctgagaaggggtcactattcagctggtgctggtgtctttgagcttggatgagtggcgagggtctctgtgggtctgagacccagacctccaggagcaggcattgcctggctggtgtcttatgagcggagagggcaggattaagctggctctgcgagtgacgggaaactgccaaccagattcaggtgccactgcagggaagagaagtgaggctgggtgatgccaataggaacagggagagaacaggaaggactgagttcctctttcccctccagccctctgactgtctagagcttctcattggcagaccctaatagggagccccttgcaaaggagaaatgtgggaaacagcctcagccccagcatcatcaagcagagtgtaggaggtggatttggagctgacaggcaatcacttaggaaccttctcctctccttccccacaggatgtttctcttccctttctgatctcactaaattccattttggtttcactaggtttgaagtagcggggtaagaagggttagtggttgggaagagacatcaagagggtaagaaggttaagaggggtggaagagggcaggaaggaccctaaaaccacagagcccacccctagctctgccccggggagcctgcccatccaggctgacataggctctctcagacactccccatgtctgagccacagcaaacacccacattcttgtcccaagccaactatgcaagtgcaaatcggtcccacgcagcaacaaccctcctcacttcaccaagaggcagctcaccagcagtccctgccttggtcagaccccatccaacatgccaccctatctccacgagacacagatcaaggtccttggagcatcctagtgaagctcctctcgtgccccagaggtgaaaggcaggctggggtgtggggactctaacttctcagtagttctgcccaaagaattatcacctttaaaatctacccccagctctcatatcttcagtctgggttttagaatcctctaatgagttcttgactgtgctatctggaaaatttgtaagttctctgaagccatctgtttcacaactcactttcatattgaatattgtgtcttaatacctctgtcaaaacttccacttggacaagctgttgttcctctttgtaatctccacagtgacagcacatgggagaagctgggtaactgtcaggctgatctcttgactgacttccaattctgtgtgtgatccaggaggaggacgtcctccggtatcatgtggtcctggaggagaaactcctgaagaatgacctgcacaatggcatgcatcgtgagaccatgctgggtttctcctatttccttagcttctttctccataatgaccaggtacgatccttttatgtaaaaccccagcaatgccaccgagaattacatcagggagagtatgaggaatgagtgtcttggctcctgtcatccttcatcacttctgtattagtcagttttcacactgctgataaagacatagccaagactggaaagaaaaagaggtttaacagactcagttccccgtggctggggaggcctcacaatcatagtggaaggcaaggaggcacaagtcacgtctttcatggatggcagcaggcaaaaagacagctcgtgcaggaaactcccccttatgaaaccatcagatctcatgagacttattcactatcacgagaacagcatgagaaagacctgcccccatgattaaattacctcctaccaggtccctcccacaacacgtgggaattcaggatgagatttgggtgtgggcacagccaaaccatgtcaacttccatattgggatcatctcaccagtgcttcctaagccttaccaacacaaaacggttgtctgtgtttcaccataaagtaaagcctaaaccagactgtcaagctcccactctcctgcccagttgccagccttcagatgatcagtgtagccttacaaattgtggcattgaatctctgcagtcataggcgtccttcagcgctggtacaacaaacccaacagatggcccccaagccgtgcctaggatgggagggaacctgggagatcaacctaattcccaggaagtggtgtgggctccagggcataagagccccatgacatacacaggagccagcagccaagtgtattaatgttattatcattgtataaccatagagatagattgcagtcctaggactaaccgaccaccacactggtattctagtgttcatctcacatgatacctaaatatttaaacgtgtttacaattcatagaaaagaattcatgaggctcaatatttaatatatttcagttataaaattctattcacatatttcaaatatcaagtaaaaagatcagtttgaaattcaataagaaactcataattttaatgtaaattatcacaagaaaaattaaaacaaattatttaagagacactaaacactatattgaaatgaaggtttaatcacagaactttttaagcgacaatatttgaacctttctaaaaagtataattttaaaaacaatttcttcagtggtgtcactactgaataacaagtaaatttttatgtaaaatggtttttatctgcttatggggaaaaaagtctttctgactcttgattgattaaagaataatctaacttcaaatatttttctcagactcctacagataagtctacctattgtgtaataacttggaagaggcccttttaaatatactttttatttttccaggattggtaattatggtattgacagagcttcgtttttgcttctgtatgtgtttgtcaccttttatttcatcatgtagagattaatgcccaatgcagttagctgaatcaattttagagctgcagcgttcatttttccatgtgtgcagaaattcttttatctagagaaagaattcatacaatagaggcttttattgataatttactttctcttatgacaatggaagtatagagaaatgctttcttttttttaattattattatactttaagttttagggtacatgtgcacaatgtgcaggttagttacatatgtatacatgtgccatgctggtgcgctgcacccactaactcgtcatctagcattaggtatatctcccaatgctatccctcccccctcccccctgcccccaccccacaacagtccccagagtgtgatgttccccttcctgtgtccatgtgttctcattgttcaattcccacctatgagtgaaaatatgcggtgtttggttttttgttcttgcgatagtttactgacaatgatgatttccaatttcatccatgtccctacaaaggacatgaactcatcattttttatggctgcatagtattccatggtgtatatgtgccacattttcttaatccagtctatcattgttggacatttgggttggttccaagtctttgctattgtgaataatgctgcaataaacatacgtgtgcatatgtctttagagcagcatgatttatagtcctttgggtatatacccagtaatgggatggctgggtcaaatggtatttctagttctagatccctgaggaaacgccacactgacttccacaatggttgaactagtttacagtcccaccaacagtgtaaaagtgttcctaagagaaatgctttctaaatgagtagacacagtcaagtcaaaatttcaatgtgatccataattctctgaatatacctcagaatggaaataatttagacttttttaaatgccaaatcaacagtattacaatatcaaatgttcttctatttttagtatttaaaaatagctcaacatcttagaattctggaaatttattacaatcaccatttgagactaaggtttcctcttaattttccaaatgtacacagaccttggaacacctctgtggagttcagccagacttatcccaacatccaaatggaagctcatttgactgcaagtaaatcataagggactttaacattcagtggaagtttgaattaagcacttagtacggtcattttaatattgctgtaacatggatttctgggataatatatgaatttaagaattttaaaccattgttggatcctaacttgagttttcccctctcccaacttcagccctgctacacacacacacacacacacacacacacacacacacacacacacaccccaccccaatttttcaaagaatgatttgcttccagttatatatgtgttatattaatgaatgaatccatggcttcatttatttttcattgattactcattaaagtgttcttccctaaaaaaaaaaaaaaaaatcaaaacaaattgcaactcaaagttgaatttgacttggcggcatttagatacagacttcatacccatgccttggttgtttatggacacgctaaacaaggacagatataaatataccattttttaaaaaattatcagttatttttttttttttttgagacggagtctcgctctgtcgcccaggccggactgcggactgcagtggtgcgatctcggctcactgcaagctccgcttcccgggttcacgccgttctcctgcctcagcctcccgagtagctgggactacaggcgcccgccaccgcgcccggctaatttttttgtatttttagtagagacggggtttcaccttgttagccaggatggtctcgatctcctgacctcatgatccacccgcctcggcctcccaaagtgctgggattacaggcgtgagccaccgcgcccggcctatcagttatttttattcttgtataaccatcattagcctttctgagggttgtttgcacattaaccatgaagcggagacatactgaaaggaacagttgcattcttcgattcttggttatggaaggcactaccacctccagaaccactggtctacagcacaactgagcaagtccatggagccgtcttgccggtgggcactaacataatgatcatgggtggtatttttcaaacaaacataagccaattaatttgcttcatggaagatacctagaaattatgtagaacaacttcttccttttacaaaagagaaaattaaagttcagaagaggaaagcaattggcctaaggtcacacagctagatggcgccaggactgttattcagacttccgctcctaagtcagagctctttccaatacaagtgactattatatctccaggtgaatattgtaatatctcctaggcaattgtcctattgctaacctccacttcctatcttttccatatctctttaaatgtcataaaaagtgacatttaaccctgttgttcacagctctatgtaaatgaggctccaataaactacaccaatgtagccactgataagggagtgatccatggcttgggaaaagttctggaaattcagaagaacagatgtgataataatgacactactattatacgagtaagttctatgggccagagccagtgatggaactaatgaatattggcttttttttatataattttgggggcataaggcttttctattaaggtgtatcaattcagtccataaaccactgaatgagtatctttgatgtgccaaggagcataccaggctgtggttctacaaagatacataagacatgacccctgccctcagtgggcttgtgatctagtgcaagaggttgtaccttgtgtgcctgggaaaggctgccaggtgtgtggggatggtgggggggagtggtgtgctgtgttgggcaggattttggaccatggctttcttcaaagggaaaatgtgccatatctaggacaggcacagggtaggaaccatggtgcccctatggcagttatgggccaagcctgctctaccagtagagaaaataaggaaatgaatgatttcagtgtattatggaatatgataatggaggcttttcatgccaattcatggggctatgtaggacctttcaacaataattataaccactgacgtttatcggacactcgttatatgccgggcactgctctaaacattttacatgcactaacctgtgtaatcctcacaatactctaccaagtaggtactattactatccccattttacagatgggaaaagtgagccagagaggttaactaatacatgcaggttcatacactaccaagtggcagagaaggggtttaaatgtaggcagcctggcccagaactggaaccctgaacaaccacattatcctgtctggtaggcttaaggttcagaactagacacattgaccacctcctgttttagggacaggttgagcttgagggtttctgtcattgtgaacttttactctttgttttgtaatagcatgtattatctctggggcatctccatgctgaacccctcatcttagcaatgtgctccgaagctgggcactgggtacagtaacttgtgagtttctgaatctggcccaattcacttaatagttggtttttaataaataaaagttattgttaaagaatttggacttaaatgagataaggtcacactttaaagagttagcagagtcagaagagtgttttggagaaaagtgatgcaaatgtgcaagacccagaggagttgaagtgtttgtctcagaacattaaagaggctgcccagataatctgccttgatttttaattcaaaaaccttcatttccaagttctggacatgcagcttcattttgtattaaagttaattacattgattgcttttgtgttttaccaagggaagatgtaggacatgctcctcagagctgacctgcccattcggaactaaatctctagtaagtactttgtctgttttgataaaatagtttccagatccgaggagtcccaattagaaaatgaacctcaagattatgtgatttgcacttccctcattccttcacttaatttgaattacactttacctcgttatattatatgcatctttgtaaaatcttacatctatttttttggaccaaggcaaaatttaataaacataaatgggttcatatgaatcaacagacaggacagaaattttttatgctctacgtctttcatatcctagtagccagttgaggaccgcagcaagaaatcttgtcagagaagagagattccatatccaaaaccatatccagcctggatatattccacctgcctgatttccttttatagttgaagttgcaactaactttctcaaagaaacagatggcaggtacgggggaggtagacaatccatgtttcttgttgctatttattgtaaaagatacttctgattacattacaaagaatactcatgtaccttcaacagcataatagtttttactaaatatatgataatttttaatttatgataaattttaatctataacaaccatacagatgttctcatttgaggtttaatttaatcttgtatattataatctttgtatgcagccttaatcctttcctggaccaaagcagactataaatcaatagaaaccaaagttcagttgagtcaatgtacggtgctggaaggacatttttacctggtttactctacaattcttgcaaacttaagttgatattctaaagaaatgttcttttcatggagtactactttaaagtataattattggattttgccacctggcattccggcaaccaacattgtgttttcatgttttcttgcttaagaagcagtgccaacaagccaccaccttctcttcccacaacactttagtcagagagacagcaatgcatcacccacctacttgctttcggagactggaaaactttttcctaacttaggagctgacgtagtcattaatatttcacagggtaatgagaagaggagatgcatctatacctcctatttcatgggaagacgaaccctgtttattgggtgccagccaaaatgtgtgagaaccgtcattgtgagtacaataattgaatcatactaactactgcagcaccattgggaaaatccatcatatggtatccttttcaaaatccctgtgcaggtatgctttctgccatctcctcttccttgttacctgcattatcattgtcatccaatgtagtagtggtagcagtaaagctcagaacagctctgtaatccagaaaatgggtaaaagctgcaattcaattcagtttcatgatgaaaaaaactgagagtccgagaggctaatgggaccaccctgttctcacaacagggtagctctgtgagcatgcttgtaagcaaaagagagaaagtgtccactcacattgtgaagataaggtgcacttggtcatttagaaaacaggaccccaaggctaactacctctagtggtgcctttggaatttgcaggaaaagtcatgagaacttcctgtgctgctcctttcccagatgactagacataacctctgcctagctgggcagaggtggggtgatctggcccttaggctgcagagcataggggtgggggagattttgtgttttaatgcactcaagaataaaggcaaggcaaacccaagcagacaccctacggggcttccctgaactgcaaaagattggtttgtaaaatgccaaaagcctcacctgcagaggcctcctcaccttcagtagtagacgaaataacatcgatgtgaaggggcccagatctgggttggagacggccccttggtcctcccactctccagcatcacaggcattattctttagtttcttctgctgcccctcctcctttctcatttttcttcatcctcttctctgacatgcctttttcctttccctctttcctacctccttagtggagcccttggtcctgttcctagcacccctagaaattgccaagcctcacccagtccccagagggtcctgcccccacccctcacccactccatgtgaggtcgaagaaacaggtgcacaagaagtcacccacagcaggatttctacaccgaggctggacaacaccagaggatagaagtgcgttgtcaagctttgtccttctgtttcagacgagagaatgctgtgccggcttctttggcccccaatgccagccctgcccagggaatgcccagaatgtctgctttggtaatggcatctgtttggatggagtgaatggcacaggtgtgtgtgagtgtggggagggcttcagcggcacagcctgcgagacctgcaccgagggcaagtacggcatccactgtgaccaaggtgagcaccgtcctctccacagaggatcttgggctgctgaaaccaaccaggaatatgcagggaaagagtgatcccacacgtgctctctagctggcctgtcgccccaagtgggctggaatcccacctgctactatcactgtgaattataagagcatctgtgttgtcatttgcatttgcagtgttcccaaacattttcagtctctaacttgaacctaccaactcacttccaatttgctcattgacattcccagcccaaatgcgtttttatatttgcctatgcacactaatcatcacggctaaactttccattgtggacattgcttgatagtttgaaaaacagatttgcacatgttattcatttaatccacacaggaaccttaggtacatgagtattgctatgcccattttacagatgagggtagtaaggcaaagaggttgaatgacttcccccaaggctacacctgatgagaggcagaactgagaactgaatgtacacctttcttgactccaaagcttgcttttagatcatgctgttctttacctgagggttgctctattgtttcaccagcagcaagacacatgctttaagtagtttttgcaaaaacaatgatctgtttgagccaagtcatctgtattctcacatccagatttccttgtgtccaggaacacacagctgtgagagtgttgactccagagtttgggtttcctaacaaagcattattctacctagtactaaaaaccatacagttcacttggctatcactgttttctcctcagctggtctaagccagacaaaattaatgtacaattgaatcattataattgggccatataatatttacttggaattacagtgttgattttttcccatgttatttggagtaattatctgcttgcatttgtgcatgagttcctaaaatgggatttgtagatgaccctgatgggattcagcaaaccgctaaagctgaatacatttttctggggaaggcatctgtagctttcatcaagttctcagagactcatctgtgtaattgaggaagcagtgccacaccaggcttatacaaacccagtgtcaaatgggcttcttcctgaagtccattcttaaggggcaaacgtggttccaatcaaaggagccctgcataaccctggatcctcaggtaaccttgactgaggacactctcacactgcttgggtcacagatcttcagtgctacactgtctcaaaactgcagtctgagccacttcattgaagctagagctagttcacctgtgaacttgctagattctgtctcctgcacccctgccctttttgtgattcaagacccctgttaaagactatgattcctagaagtaggttggagaattaagtgcaataaagcaaacctagtaaatgacaaatgagttattgaacatgggttagaatctgacgatttgcaggtgattttcccacttagcatgttcttgtgtccatgggagatgcaaccaaggacccttgggagatggctcctgtgactgtgatgttggctggcgaggagtgcattgtgacaatggtaagagtgaggcctccagtatttataatctgctctaagctttgcttctcagcagctacatttttctttctaaaatataaatgacacctttttttacttcttctggcaataaacatgattctttcttgcagcaaaaagtttgtaaaataaagaaaagcagaaagaagaaaataaaatcactcataacctcaaggcaggaaagaactattactgatattttatattaggctaccaacctttttctaggtatataagcaaatgtgtagggaatcacactttacatattgtctagtaacctacttttccacttcacaatatatatatagatatctttccctgtgattaaaatagaaaaatattaatttgtaatctccacaaaatgttacagtatgaccatgctacacttttttgaaccaattttctgctctctcaaacactgctacaataaccatattcatttagtcaaattcctagagatgagatttctgagtcaggggatggcactctgggggaaaggtcttgctacttattgccaggttgtcctccggaggaaatagcaatttattctcctgccaatagtgtctgagaggcccatttccttcaatccgaccacatcacattgatttttcttaatgtgcttcaggtgagggcggtcaaagagaagggaatttcaggcagaaagaagcacctggaataccacaacgacatgggaaagctcaacacatttagggaatcaaaggattgcagaatgagaggactttaagggcaaagaggagggttgatgagaaaaggcaggagcagtgggcaggcgccgggccgtgaaacgctaaggaggttggacttctcactaaaggcaacaggaagccattaaagagttttcaacaagggagcaatatgatcgtatttggcacttaagaaaaatcattcagactttggattgaagagaatacccctggaagcaggtatcagagactccccctcttccgggttgggagctggggaggagatcacaagtgattgctagcctagtgggggctccatggatgtggcattgacagagggggcgtctttgcccaaagctccaggcaatgcaaaaatcaagggaatgcagttgccttttaatggtcagcaacaaggggtcagggaggaaggttagttgaaaagctgaattgggaagtctgaatggtcccaagccaaagaaatatcccagagcagatgtcaaatgtcagggtacagagccaggcttctgagagcctgggagagggaagcaggaagcaatggggtcacataaacagtaggacattttcggtgaatccccagaataaatacaataggctctctcctcttcttgctttctctactctgaagaaagaccccaccacccatgcacctggtcacccaatctaggaacctccctactcagcttccatacctccttgtccctcactaacatacctaacatattccatgtctccacatctctcaatccatctcttcctcctgctcccctctcaccagtagccttgtggtctctttgtttcctgtcctatcttcctccactccgtactccccactactgccagatagaacttaccaaaacatagatcgtgtttttcaccccagctcctccccagaacttgacaaattgctgtggttcttcattgcctacagaagaaagtcctaactccttagcagggtggagcacaaagactcttcaccaatgaacactcacccagttttccagacttatctcccatccctgtctccagtgcacattctacacaggaagtttccagtctagaaaaggaaataaatgtttagtaaaaggaaaaattgtggtatggagtacaaagcaaagagcctgtagactataacaaagaagacaactcctttgtgtgcaaactcctcgctcctaagtccacagcagacatcactaatcaatcatgacactccctccctctgtgaccagccaggggcacccaacccttctcaaagtagcacaccattaagctgctaccaattaattgaagttggctcaaaggtttagagcaggttccagagaaaaggacataaaacatgattgaaatgccaataggtagagaatagagagaaagggattgtttaggctcaaggaataagatacaggcacaaaattgcctccattccagcccatttgagtctaaattccctccgacacaaaacagaccacttttgcaggcctctgtttcaggacctcctgtatgactcagccaggattggtaagatttctatcccaaaagctcttaacatgagcatcctatccaagagtattcttccctcatctctaatgatttacttctggatcttgtcctgtcaagaaataggtaggcatccaagagcaataacctatgctgtgtccaggaaatttacatattaattcaacaaatattgtgtacctgctgtgtgcaaagccctgattttctgcacatgcaaaaaaatcttttataattatagttttgcttgtttacagcactccataataaaatgatgaaaaccgggaataaagttaggaataaactagaaagaatagcataggaaatacaaataaaagtagaaaatcaaaacccagaagaggggtacacatcaacacccagaccataagagcacatggtcacattccagggagaattctgtgttttattcactcttgcatcctcactgcctagcacagggcctggcaaacagaagacaccatcaatgtatttgaccttcagatttggctttgagcttcatggcagccagtataaaaaaggattgacatgacctcatagttttatatcgctcacatgatacatatcacttccaaagaagtagcttttctgagcacaaaatactaaaaatcctcaggtgagatttagtaagagggctaagacagcaactggttctctttttcagcaaccacagaagacaactgcaatgggacatgccataccagcgccaagtaggtagccctgggccacctctggggacagtgtaaaggggattttttcccaatattgtctaccctagtctctatcctcaggggatttgtttcctgacaccatttctgagggcttaggataaacttgagtatgaaactaaaaatatctctgaagaggccactatcaaatagccagatccaggctttctaacaagctgccatctgacttacctggcacattgacgaaaatgcccactgttaccccagtccaagctaccaggactcatggagactgaggaaacccagtgggcctcagtttccataaaccttgttcctgactcacagcaagtcataacttggcttcataatgctaactcccagagaggcttaatgaattaagtacctagtagtggagttagacatgaattcaaagtcagcctctgttatttgcactaccacatgatcttgagtccaacgttgaatccctccaaagcctcagattcttcatttgtaaatgggaataatccgacttgccagggctattggatagtgagtagatgacacaaaataatacatgaaacatggctcctagcacatcagtggctctctaaagcttggcagctacccatcttattcctgaactgacacctatatctatgcacgctgtagtttgcctgataaatgagtacagttttagctgcttgtggtggggttatgccagaattagactcttctcccaagccttaggcaggacttatgagtgtctcatgggggcaggggccaggatactgagggtgaagggcatttgtgagtcatgtggtgggaggtggagtatttttctacaaaccccatttgtccttccttgttgcagctgcctcaccaactcagatggtacagcttcatgcaagtgtgcagcaggattccaaggaaacgggaccatctgcacaggcaagcgaaggaaggaatttgctgggggggctggcaaggcttgcacaggctattgagaggttcttgttcctgcagtctgaatgggcctcagcagctggtgccaaccactgatggtgaattgtatgtaatggggcagttgattgtgcctggggacaggaaaccaactgttcacagccttgaccacaattgggatcacctgggaagctttaaaaaacagtgatttgtgttgagaacccacataatgatcgatgtttcagatgatggatatgctaattaccctcatctatacattatgacagcattactatataccctagaaatatgtccaattatgtgtccattaaaaaagaatttaactcactgatttgattggcctagggtatggctggagcatcgagggtctggagcagactaaaaaagaatttgagccctggttcttcctccaactacccaggtggccttggatagctcatttgtaaagtaaacttaaaactacctcccttgcagagtggttttgaggttaagtgagctctctgtgttcaatggcagaataatgcagctgttgaaaactcaggtcaacttagactccccaggtttgaacctaaatacttattacttacattaccttgggaaagtttcttgactgctctttgcattattatttttatctgcaacttggggataataagaagacctccctcactgagttggacaataacctgaattaatacctgtgaagtgcttagaacagacccagcacatagaattcaataaatgcaagctaatattcttatggtgtctggtgctagaaaaaatggaaaatcttaaggtcatttttctcttgagcactgtgtcctggcaggctttggtccagattgtggcagcactggacaatgatcatgccaatctgctttctagaccatcttaccctggggattctcccagagggccaagtagactcaccttcatccccaggtgtgtcctgcagtaggatgtgtacagaatgctaataaaagcagctagaaagggcaaatcacagatgttttacttgctctctgtttttgggaattggccatatttaatccagtgcctgctcaagtagttttgcagtatgttccatttctcaatgacttgaggaaaaatacatcaatggcttttgcccttccctctccccttctgctctgtgtcatcttctatagcaatcaatgcctgtgagatcagcaatggaggttgctctgccaaggctgactgtaagagaaccaccccaggaaggcgagtgtgcacgtgcaaagcaggctacacgggtgatggcattgtgtgcctgggtaggtgtccttccctcttccatcggcgaaatggtataagagtcatagccctattaaatgattccaacgtgtgtgccctgattatcaggacacaaaactgaggtcagtattccatttgccagggcaggaaagtataagggcatggaaaagtgaccacagggtatgaaggcatgtcatgtccaaaaattacttcggaagggtaaaaggagatacattttccaattaaacatcatggcgatgacagaacatttaaacttttattagttcctttttatacaagtagcacatgctcactgtagaaaaagaaagcacatgtactggagaaaatactctgaagatagtgctcttattattgtcattaccccattttgctatgcctacatgtatttttttttaacaaaaatggtatctcaggatatacagcatttactatgcttagcaatatatcaaagtaactctccctgaaaacaagtatacctctaacattatttaaatatccacacactgttctactataaaggtatgccatagtaagttgtctgaatttaactgtttagttagaaaaaaattgacatagaagagttatacaaatagcacaaaaaagacccacttgttctttacccacattcacctattaacatttagccctggctgggcgcagtggctcacacctctaatcccagcactttgggagaccaaggcaggcagatcataaggtcaggagttcgagacaagcctggccaacatggtgaaaccacatctctactaaaaatacaaaattagccgggtgtggtggcacacacagctacttgggaggctgaggcaggagaattgcttgtacccagcaggcagaagttgcagtgagctgagattgtgccactgcactccagcctgggcgatggagtgagactccatttccaaaaaaaaaaaaaaaccatttagccctgtttatcatttgctctctttgtatatatacatttttaagccatttgagagtaatctgtgtatattgtattccctttgttcctaaatacttgagtgtatatttcctaagaataaggatagcctcttacgtaaccacagcacagttatcaacttcagtaaatttattattgatgtaatacttttgtctaattaccattcatattctaattttgtcagttgttcaataatgtcctttttgacaatttttcctccagtgagggatcaagtctagggctggatattgtgtttcattgtcatgtatcttgagtcccctttaatctgggagagttcctcagctttgctttgtgtcttatgacattaacacatgggaataatatcctccacctcgccaacttttttttagtagcatgtcctttatttggggtttgcctgatgtttttcattcttagattcaggttatacattcaaggcccaaatgtcacacaagtgatattgcatctgtctcagggaaccttgagctctccttctgccctctgtgtgtgatgttaattttgaccactcagtgaaggtgctgtgatgtttccattatacagttattttttttttctactttactactgataagcagtcagaggagacacactttaacaccaagcagatatgttgttccccctcaaaatatgctccttagtttagcatcttttgatgattcttccctgaaccaatctatattgtgatggttgcaaatgattgtttttaattcctaagtctcttcattcatagcagtcttagattagactccaagattctatggtttcaagtactttgctacaaatgctcaaatttattccacggactgatttaagccagtagacaatccctctgctggaactggcctatcccagaatagtcaatcttaagaaaccatatacagtaccctcctagttcagttatttctgtctcagaacttccagaaaactgaatcatgctttgacacccgctcccttcagtcagttagccatcttagctcatccctcaagctggcttcacttggaaaccagactggatttccaggccagatgttggctttttgttttaaagaaatcaacccgtgtttggagaaccatggtggctgtgacaagaatgcggagtgcacacagacaggacccaaccaggtgagtgccacctctcccaggcccttaggtttcctaaaagggaactcctaggtctttagacacaggcctgagagaaagaggctgagaacggacctctaaagagctgcagctgaaaataaatactttaggggaaattctgaaagaatcaagaggcccttctttgggaatgaggtgaaatgggggaaaaccaagggtactaggacaaggggcttccctagagtgcggagaagtaggtatctgcaaataccatgtgattccagaagcatctagacagtcccctaaaatactccactttctttcagcattctgatgcccagaatcccacactttatctttggcttaaggctctgaagcacatgtgccatggtggaagataatactgtgggcactctaccagtcacatggccctgagtaccatgagcttgcagcatctgtctggagagcaggctgggggaggtggggaaaacatgagagcaaccgcatcagagaatgggggtcacagggtggaaagatacaggcagggaagctggaggcctggagacccaagttcggccttcctcagtttctgccacatggtgaacaagcaaaatggccagacaggaaatcacatatatccaaaattggatgacaaagtgaagtcaccagtgaatgctctattgacctagttgagccatctggagacctcagtgccaggtctctcaatgggcagatcaagcaagtacctaaagtacgcaaaaataaggaaaaaaaattgtcttgaaagaactgtgtgagcacacatgcacatgtgtgtggacacatttagtcatgggggaattcggaacagtcaatgctgagctttcttagacatcttttgaggtttggtagtttttatttcaaactacatatgaggtaggagataatctataaactttttggtgcttgggacctccaagggtgcccatccagtcctagggggcagtaaaggaggatgtggagttgaactttgagaacaagacgttagctgaggagggacagctggtgatgtcttgggaaaggtttgcactgatattggggcccattgtgaagaaagaggaagagaaacgggaaaacctgcccgtgtagccctagctggcaccaatgatgacttaaagttctaagaagcagacgtcaacccagggcccttgctgctacataggaggcccttgtgtgagttagaaaagctgcctcctgggagggcacagtgggagcaggtgtctcttcctttggggacatcagtgaatagagtgtgagctgggcttcagcccagtggccgggtgctcctgcgcagacatgggacatgggaccttgtccccagcttcttcagacagtgtcccctccctcaacttgaagcttccacccaacttcctgggccaaccaatgggtttgatagattgtttccatgtgcacacctcagtgggctataaaggtctctccttagcatctcctagcactggtgcctttcagctcagcatgggcgcagatgagcaagatatgagtatgaatgagagtgggatatagttgggcttcttctcaactgacctttaccaatcaaagaaaagaggtgaatacctgaaggcaagggaccaaatggagtgagaacattaaaaagaaaaaaaacggtatcttagcaacaaagataggatgtgcatgagatcccagtgctcaagtgaagtgtgtcaagtgctaaaatattaaacatagggtgacaattatcattataaaatagatattaccaacgtcaaatagagactctcctaacattaccatgaccatgatggagttcaggtctgagagccagaccatgcggccagtacagaacccacctgcaaaatgaccccatgtgcttctactcctggacaggctgcctgtaactgtttgccagcatacactggagatggaaaggtctgcacactcatcaatgtctgcttaactgtgagtatggctctagggtggatatccttcaagcctcagagcccagggtgcctcccaccccacttctcggggatgcagagttgaggaactcttcctctggaggcctcagagctgtgtgttgaccatgaggcttgtttctctggcacactccattgtaatgttggggagaaaagagagaaggcacagtctgctacccccagcctgcccctttggctgcaccatattgagctaagtctatccacttgcttatcccctatccatattgccaactcttatgaaaaagatccctttccaccaagcatgtctctcacctcctctaggaagccatcttaggtaaacctcacagcaactttccactccttattctcctagacttacacgtaggaatccacagcgagcgcactatgagtcaacaatatagtgtagcattccaaaagcttgttctgtcatcacagaggcctagaggacaggctaaggaagatgattctactctcaccccacaactaccctccatggcccctaccacccccattctacatgataactctaccttagaacagaagatccagttctagatgctctgcattgagcaggggttcatatggggatagaagcactgtgtctcctatgtccatgcacacatcattagttctcccagttctctctctctaaagaggaattgggatgtagggtggaggctgccaccaacatttcaaggattgccacaaaacagaagggttgttcttgttctgtgtaagtccaagcagtaggactaggaccagcggatggacattagaagaaaacagatttctttcaacttaactcacttatttcattagaactgtccagacatagagagttttgagaagtaatgagcttattataactcaaggtatttaactataggaatgaagcaacagatgggttatcaacccagacagccatttagattcctcccagccctgatccacatgactctagggttttcggttggtttgcttcttgggacctcagtttccttggatggttataagtgtccctggaattccttttaccactaacatctgggctttgactttcttcctccagtctgtaggatattgttgacacacttcttgtctccgtttgcatgtcgatcctggcaggagcaggatcttctgattttcttataacccttgactgcaggctggacccatgttatgcaaacgaggagtttactcagtcattaatcactgagtctcaaactgggctagtcgcctactgctgctcagagcctaattgtcccaggcctggtacctgcaaagggatgagataagcctgctgacccagcctgtcacatccggagcagtttgtgtggtcagctaggcctctgaagtcctgcatcaatgtcacattcatatccactgcttgccaggggtcagccactgtgcttaggggtgcccaatcattctttcgtttaatttctctaacagccatatgaggtaagaactgttattaaccccattttacagacaaagagactctagctgtgcctctttcctaggactgctataacaaactgccacaaactgggtgggtgaaaacaatagaaatgtattttctcacagttctagaggaccaaatccaaaattaaggtgcctgcaaggatgtgctccctctgaaggctctgtgggaaaatccttcctttcctcttccagcttctggtgactccaggcattcctggcctgcggccgcatcactccaatcttgcctccatcttcacatggccttcacttctgtatctgtgtcttctcctcttgcaaggacatttgtggcattaagtggttaatctaggatgatgttatctggagatccttaattacatctgtaaagactctttttctaaataagttgcatccacagttgcatccagtccttaggacagttcaacccactaggctgtgaggagtgaaggcccttgcccaaggccacagagctagtatgtggcatggccagcacttgagcctatctctgtcctactcaagacctgcacccttgaccacttcttggggtgcttattcttcctacaaggcccaatcccaacaccttgctttcctgtttatattacttcccacctgagagcctccagctgttgacatgagaacagtgcagacgccctgtaattaaagcccttcttcttcaattgaggctcccattatctccttgtgtttgtctggcaagctcctcaagagatcaatgtcctctacatgaaacagttatgtaaggataataaagaagaagctacggaaaagatgggggctgagatgtgaagctattaccactagaactatggccagcttaattttcacagcaattcttccatgggccattcatgttttgtaaaaaaaaatggccaccttgtcttggacaaatgactcctgatacagctgacctgggagattctgaaggtcttttgctactctatctcagcagcatattcccatgggaattaactctattgcaagattgtaaaattataggccatcaggggccaggcagggaataatatcaacaggaagacccaaatcatattgctgctctaatggggaaatatctactccaactgactggtgctctaagctatgtcagcccagtgttgacggtactcctgacattttaaaagatatgaaaatttatgaatttgtatgtaaattttactaatttgtaaatgatggtaattcattccaaaaagctcttttaaatactgggctaaagaaacaaaatagtcctggtgctaaatctggcccaagaacaattatttctgctcaagtcctaccaacaaggactgtgaaacattgcctttcctgagttagtccccagtccaaactgttttagttcatttgtgctgctttaacagcacagaggatacctgagactgggtagcttataagcaacagaaatttatttctcacattctggaggctgggcagtccaagatcaaggcactggctagttctgtgtctgctgcaggtctgcttcctggttcacagacggtgccttcttgctcattggtagaagggacaactgagttcccttgggtctctgttttcttctcttttcacatcagaagggtaatgtgtcaatgttgtaacaagttttgagggaggcacatctcatagaatagtgtgaaaacccaatatcaagctaatgaaccacaaaaggatctctcttttataagggcactaatcccatttataaaggctttgccctcatgaacctaatgaccttctaaaggccccacctcctaataccatagtgagggttaggtgggggacacaaacatttagactagagcaggaggcaaacatgttgatggaacagagactgggtgagaggggaagggtcgtagtgatcagacaaggcctctctgccgaggtgactcattcctgaatgttaagaagcgggcagccacatgaaaatcttggggaaaatgtataagcaaaaggaagagcaagccaggggtcctgggaagaggaagagcttggcatgttctgggaactgaagagagagccagtgtgaatgcagtaaagggaataaaagggaggtggtgagaggggccagatcaccttaccccatgtaggctatgctgtggagcttatatttttttccagttgtgactaggaagccactggatgatcatgtaggtcaatgtcaatgtctggcttggctctcaaatctcattctggctgctgtgatgactatgcaggataggggttctaaagcagaagcaagaagaccatgtaaaagactaatgatgctgaccaagaaagaccagggtggtatgactagagctatagcagtgggtgtaataagaagtcgcttgggccaggtggacatagtggctcatgcctataatcccagcactttggggcactgaggcaggaagttcacttgagctcaggagtttgagaccagcttggagagagagggagataaatcactggacaggggatgtattttggagataaccaataagacctgctgatagactggatatgggaaatacaaggaaaaggaatcaaggacactatctagattttttgttgagacatgttggttctactcatgaagataaggatggcttaggaggaaatgttgagtgaaatatcaacaggtctgtctttttgttgagtttgagttgcttggtagccattcaagtgaagatttccagtgaaatgtaagcctgaaggagagatcatgacagaggtacaaacatagcggtcattggcacacagatggtatttaaacacaggggactgactgaagcacaagatgaaaggtagaggcaaagacggggcaggtggaggggccctggatattaagccattgagcagaggaagaagtacttacggagaagcctcagtaaaaaagcccacaatgtggaaggaaaaccacttatcaagtatagtgtcaacagagaccaagagaagaaaatgtttcaagaggagtgattgtacaggcaaaggatgttgagatgtcacctatgttgagagaagagaactgaccactgccttctcaaggtctcaattcttgaagacaagatcaaggtggaggcttgtgtaaaagtggcaccaagagcctggaagtaagttgagaagaaaattggaagtaaggaaagtagaaacatagacatttgcaaggatcttcctgggcaaataaatgggtagttaatggagaaggatgtggactaaagtaagtaatgttcctaacactttaccctggaaaattttaaacctacatgaaactagagcaactaatacatgaacccatctgtacctgacactcaggtgaaagagtcaactcatggtcagtctttgttcatctatacctagtacgttctcttaaaggaaaaaaaaaggagtttggcttttttcaagatgagtaatatgaaggcatgtttttgtgctggggagtatgatctgatagaggggaggaaaccactcctgaaggagagcaggttgttgttacaggagggggtgagagggagtgggacccagaccccaggtggagacatcaccctcagatagaagcagacgtagtgtcggtcagtatattagtcagtgatgaactagtgagtccattaatgagtcagtccattagttagttagttgttagtacacttgttaaataaggaaagcacagtccgtgagttcagacccaaacaagtggtgaagctcaggatggggagatgaggtggttcttgttacctgtgtctcttttctccatgaggcacaagtggggctcatcaactaagatgagaggacagtaattgagagttgagaaaggtgaggagtggaatgtcatctgtattagtcaattttcacgctgctgataaagacatactccagactgggcaacttacaaaagaaaggtttattgggcttacagttccccatggctggggaggtctcataatcatggtggaaggtgacaagcatgtctcacatggtggcagataagagaagggagcttgtgcagggaaactcccatttttaaaaccatcagatctcctgagattcattcactattacaagaagagcacaggaaagacctgccccacaattcaatcacttcctaccaggttcctccatgacacatgagaattgtgggagttataattcaaaatgagatttgggtgggaacacaggcaaaccgtaacatcatctctagagagagggaaattaaatgtactgcaaaagtgcaagcatctgtgtacatacctttgaagggagtccagatagcatgtatcgtgactttctcaggcaatgcaccgccagcccggcagacccagagaagttagagtggggcccaggagggctagggatttgccaagccatagtgatggagggagagaagagccagggagggtcacagtgttccaccttgccagctggctggggttcgaggggactgagtgggtgggcaggaatgctggggagaaagaagtaagctcaaaggaggggaggttcctgtggaccaaaggaggttggagactgcagtattagaagagataagttgaaatgataaaagttggtggccagagagagagggatgcttgaaatggagctctcaggagcagtcagtgcactttaatgttgactgcaaagccaggggatggggacaggggtggtagaggccgttgacaagggtattgacactgccacggacggcaacatcaagaatgaagggaaaggcggtgatccaggcaacaccattaggaccaaagagtaaaaattggtaaaggattatggatactatgtgtttaaaggatgagggtgtttggaagtgacaatgtacagtaagaaagacactctcccagcacagccaggacattgccacttcaatccctcaccagtgtggaggtagtggaggaaaacagcttcacttgaggggcataggaagggcaatgtttgcaggagacaaagacctctgcaggaagaggtgaagggagcttactaaggtgagaatgtcagaaagttgctaatggcaatgactttgagaaagcacggggaagggtttgtgaggaaggggcctatggggtcaggtgatgcgtgtgtagaggaacatggggtgagtgtccctgcagtgagcgttcccatggatgttagctttgaaccgtgctttgctttgtttgtattttaggtctctgcccatcttccacaacttataagctctttgagggctgggacaatgtgttctattttgtaccacctgccttctctctgataatggttaccttttcctatgatcagagtttagcttaaagctgggaagtatcaaacaggtggggtcttcctagttaatacctggatgctgagaaatttccaatttggcaactctgggcttacctgtacagggctggagatctgctcaaagggacctgtcatcttaggatacaaggccaggtgaataagatgcccctatgagcatagggaattggaaggcaagctcaggaaaaggataaacaatacaaatgaatcaaagagagtgagacaaaaaatgaattcaaacgcagaattgctttgtaaatatcggtagagctggcaaactaactggtctaatccccatcccttgccccttggcaattttaccagaaaaatggcggctgtagtgaatttgccatctgcaaccacactgggcaagtagaaaggacttgtacttgcaagccaaactacattggagatggatttacctgccgcggcagcatttatcaggtaacgcgagacatgtttccatcaagtaaactctacttccctaaaaatgccaagaatccaggtagctaaggagtatttaagagcttggtgaaatgtaaagcgctataaaaatatgaaaggcaattttacataaatcagcaatgaaaagaaattttgtcttcctctgggaattcatttgacctgaggaagagtgtaatgtagggattaaggtggaccgacagctctggagtcagaaacacttgggtttgaattcagttctcctggttggtaatgtgactttgagcatattatgtcacctctctgtatatcaattttccaatctgtaaaagaaaataatggtggtacaaactgcatcaggttgttaaaataaggtaatatgtgcaaaggacacagagtgctcaatagctcaaccacattaccatggcgtggattgcagtgtgtgcatgtgtgcgtgtgcatgtgtgcgtgcacgtgttaatgtgtgtacacgtgtgtgtgcatgtgtgtacgtgtgtgtgcttgtgtgtgcatgcaggtgcatatgtgcatgtgtgtatgcacgtgtgtgtgcatgtgtgtgtgtactgagcatagtggttgaggcaaggtgatatttgcagctttctattataaagtaaatgttcagttatttaaagagggacaaaaatgttccggctgatcaaatattgttactagagtaaccaaatctgccataaacctataactgattttttttaaatatttgaaagtcagaaaatgctcttaaagttcagatacttctggaaatggctgaacctttctttcataaatcagatggcgattccagaaaggttatagaattcacactatgtccacatagtcattctgaacgttaattgtcagcctacagatgaagctccaaaaaggcccggtgttacagatttccagctgaagggatggcagagaaatcatcccatgacaaccctgtattgttctaatatatatttcacaggcattaagtgaaactactctttgtttgcaggagcttcccaagaacccgaaaacttcccagtatttcttccagttgcaggtaggaaatatacatgtctgtctagccataagagttcagcctaggccaggtgcagtggctcacacctgtaattccaacactttgggaggccaaggcgggcagattgcctgagctcaggagttcgagaccagtctggggaacatggcaaaaccccgtctcttttaaaaatacaaaaaagattagctgggcatggtggcgcaggcctgtagtcccagctacttggaaactgaggcgtgagaattgcttgaacctgtgaggcagaggttgcagtgagctgagatcatgccactgcactccagcctaggtgacagagtgagacactgtctcaaaaataaataaagagttcagcctcaagccaaatacaggataaactggtggcctctagagttggtgagggtagaagaaagtctgggaccctggatttctagaattttctacataagaatgtagtacatgaaaagactcccatcacactggtagagaaaaaggtgtgactgggacagctagttaacacttggggtaaaaattaagtttgatctttctgcacatcatacatctgaatgagattcagatataagaataaaatataaaaaactaaaataaaatcataaaaatgtaagaaataagattttaataaaatcattaaaaactagaagaaaatatgctcatagtaaccatatgatcttagaattgcaagaagacaattataacagttaagtatatcaactcacgttttatgtttgtattattatcctaatgatataaaatactgatatgtgcaagagacattggaaaaaaatacctgaaaatagtaagagctgcttctaggtggtgggactagggaggcagctattatttttttctttgtgctgtattttcaaaatctttaatacaataaacgtgttaattttataatgagaagaaaaccacacacaatttcaacgacggagaatctgggtttcatttgaatccaagactgaaacagaggtctcctcatccagtctttgcttcacccaggtgccatcatctctggtattagtttgagccccggcatgtattgatgttaagtgagtgatgtgtgagcctcacctttcttcccacaggagcatttcgtgaaagatctggtcggcccaggccccttcactgtttttgcacctttatctgcagcctttgatgaggaagctcgggtgagcatgagactgtgggcagaagggggaggtctgcggctggaacatagtccttgggcctcgccctggaaccaagactggagatgtttctaagcaggagctctgagatcaggtggaactcaccagcaatagaaggggctgcctcttggcacagggacccctgtcaggggaaacattcaggtggatttggggtaaccactggccagagactttctaaaggacattcctgaacaaagtatgaggttggagaagattaacaattctcaagtgatttagacctcctatagacaaaaaacaggggagtggagggagagatgctgggttaaagagatttaaatagattcttttcttgcaggatttatcagagcctttactgttctaatattcacgggggctcttcatactggattgcccattcataataatgatgggtaacatttactgtgagtgtccaacactgttctgagtacccggcttagaatgactcatttggtcctcacaacaaccctgtgagttctgctgtgatcctcattttacagctgtgaatactgagggaagtagctttcccaagatcacatgactagcagggggtggagcaaagacccaaacctgggcccgtgtacttaaccactgtacacccagcctctccatgcctgtattttggacaccagcaaagcagaggcacaaaaatagtttttgaaagaacttgacactttataattcaaaataaaaagccattaaaggagttatgaaacaatgagaattttgtgggcttttgattatttactttatgttaatattgtttgattgtttgtttttgagacagggtcttgctctgtcacccaggctggagtgcagtgccatgatctcggctcactgcagcctctacctcctgggttcaagtgattctcatgcctcagcctccggagtagtatttttagtagagatggtgttttaccatgtgggccaggctggtctcgaactcctggcctcaagtgatccacccgcctcggcctcccagagtgctgggattacaggcatgagccactgcacccagccttgtttgtattttgaattccaaatggagatacgtcatgatcttcccactactaaaggtttaaatctggcactgatacctctccaagagggctatatactatgcagtgtttcccagcatgtttcacaagaaaattcttttttgaggatcatctcacagaacttgggatctttgcaacatgtattgtgaaatccaggccagaggaaccccatgttccttccacactgatattccacaatggaggcaagaaaggagctagagtcacttcctcccttttgtctgaacagcctccactctataatcctgaccacaaagcttacttcccagagtctgggtgggccgagaggtgtggaagagagaatggaggacaggagagccaaatggcacattgcagcaaaagactcctgcctctggctgaaaccctctgatcttctgttacaggttaaagactgggacaaatacggtttaatgccccaggttcttcggtaccatgtggtcgcctgccaccagctgcttctggaaaacctgaaattgatctcaaatgctacttccctccaaggagagccaatagtcatctccgtctctcaggtagatgccagttatccttaggtcctctctcccctagatcatgtcctttgcaggaacctggatggagctggaggccatcatcctcagcaaactaatgcaggaacagaaaacccaatgctgcatgtcctcacttacaagtgggagctaaataatgagaattcacggacacatagaggggaacaatacacactggggcctagtggagggtggagagtgggaggagggagaggatcatgaaaaataactaataggtactaggcttaatacctgggtgatgaaataatctctacaacaaacccccatgacacaagtttacctgtgtagcaaacctgcatatgttcccctgaacataaaagttgtttgctttttttttaaacaaagtaagtgccttatccttaggtcctctttctctttttttccttaaagtaatataagaaataataataacatacgttaagtgatttctgtatgcaggcacttagtatttgatgtgtactaactcatttaatctgcaaaatactcccttgatatagacagtgttaatccttaatttccgaataagaaaactgagctcagaaaggttaagtaacttgtccaaggtcacacaaagagcaaatattaaagccaggattaaaactcaagggcaggcctctccaagtagtaaatagaactgcttttggtagcattagtcagaagctgggaaggtttgaaagcttttgatccaagccacttgaccagactggtccagtccctccctactacagagaaaaaaatggtgactgtagaattccttgcagaaggaaaaaagccaggggaggaggtatagaacaaatataaaagagaagccaattttgagctgcttgcttatttcacattggagaatcatattgaaattactgttttagatgattctatgttataattaacttctccaggtgaaagttacatttttatctctgttttcactttataatcataataaaaatacactcaagtattaacttggatattcagtttttgctcctgataatttgacacattggtaaagcattctgtgagaagcaattttgtgtctatttcactttgcactcatttcttttttgtttttggttgatttcagagcacggtgtatataaacaataaggctaagatcatatccagtgatatcatcagtactaatgggattgttcatatcatagacaaattgctatctcccaaaaatttgcttatcactcccaaagacaactctggaagaattctggtaggtaaactctctgttatgttttcagcctggagtgactcaatacattatcatctctattctgattcgaagtcatcattttgaaacattttctttttctgcttcaatctcaagctattattaaaagcctagtaaacattattcttagtaagaaataaataagtaaaagactatcttaaattgataagtgggttttatatgtttttctatagcatccacaaggacaggtagtcttacataggtttagaaaatggagaagatagataaaattaattctggagtaaaattccttctaaattgacagaaaatgtaattttaacttttatttttatttattaatataggtcaaggtcttccacagcagaacacagaatccactacacttagacaaaaaaaagtttcttgagatagtagatacatcatcaaatctctggaagggtagagcctaattcggatgctacacagctgggagcagagcagcccaaggaggtctacaaagggtagacacctggctaggtgcagtggctcaaacctgtaatcccagcaatccgggaggccaagatgaacagattgcttgagtccaggagttcaagaccagcctgggcaacatagtgaaaccctgtttctactaaaaatacaaaaaactagccaggtgtgatggtgcatgcctataatcccagctacttgggaggctgaggtgggagaatcacctcatcccaggatcagatgcttgcagtgagctgagggcagtgacctgagatcatgctactgcactctagtctgggcaaccagagtgagatcctgtctaaaaaagttttttttaattaaacacacacacgaagggtgaacacctaacctgataaccttaccaccaacaccaggctgttctggctgtcctggctgtcacagctctgtgactgccacctgtctccagcctcaccaccttggacactagacactgggctatagatgtccccattgtgcttgccagaggggttgatctcccttctagcagctgctgccacctcatattatttctttccaccaagaagctttgcacaagtgcttctgcttggaggaccttatatatcacattggggttctagctgcaagggagtctgggaaaaagtagcgcttagcctactagtctctagaatgcagaaaagcgtggtcagaagagagttggagcaggtgctgatgagcccatctatgtatccgtcaggttatgttacctttactttttttcacttgagctcttgttaaattcctcttaaactgtataaggaaaagtttcatgcccattcttattatctttgcagcaaaatcttacgactttggcaacaaacaatggctacatcaaatttagcaacttaatacaggtaaaaatttaggggaagttgactcagaggataacctgcctaaagaagttttgttttgtttgttttgttgttgtttctgttttgttttgacattggccagctgttgtgggatctgcatggggaagtctcagttttctggagagcaaagtcattctctgccactcccttcttagaatgttatatggcttgttgagctatataatgtacattggctgagttagaaattgaggatttgaggctggggagagggaaagaaattggaatgtggcagtagtgtactaggtgcttcacatctggaattatcaactccattataaagatggggaatttgcatgggagagttgggaactctatgcctgtgaggcaggtagaaattaaaaccgtatctttctggcaggcacagtggctcacacctgtaatttcagcactttgggaggccaaagcaggtggatcacttgaggtcaggagtttgataccagcctggctaacatggtgaaactctgtctctactaaaaatacaaaaattagctgggcatgatggcattcacctgtagttccagctacttaggagggtgaggcaggagaatcacttgaacccaggaagcagaggttgcagtaagctgagatcgcaccactgcactccagccggggtgacagagtgagactccatctcaaaaacaaaaaagacatatcttactgactccagagattgttcccatgaattgagtagaaacttccagtatgaacaaaagattgcagaggagaatagggaggagcaggccaagcatctttctgaggctccctcttccctgatactcaaccctgagcagtcactggggactccagaatttgactttctgatttgctgtccaagaaaatacaggtcaggatgggcacagttggctcatgcctgtaatcctagtactttgggaggccaaggcaggaggattgcttgagcccaggagtttgagaccagcctgggcaacatggcgaaaccccatctctacaaaaataccaaaatgtgcagagtgtggtggtgcatgccagtagtcccagctactcaggaggttgaggtgggaggatcacttgaacccacgaggttgaagctgcattgagctgtgactgtgctactgcactccagccggggcaacagagtgagaccctgtctcaaaaataagaaaaaaaattgtaggtcagaatggttggggtgtgatgggcttctagtttctctagctgcatcacccttgaaccatccagagtcccagtaagccacgggcttgagcatggaggagaatcctcagagacagaacccctgcccacatgtctgggccttgctcaagccagcaaggggctgaatccctgtgtttcaggactcaggtttgctgagtgtcatcaccgatcccatccacaccccagtcactctcttctggcccaccgaccaagccctccatgccctacctgctgaacaacaggacttcctgttcaaccaagacaacaaggacaagctgaaggagtatttgaagtttcatgtgatacgagatgccaaggtatttagtttacatgcagacataagtgcaagaatgtcccagggtggtgataaaattcagcaccaaggcattgtggcctaggaactgtcagtgtgtccctgtcaccactgtatgcaggaagccacagcatcccctgccccactgtgtcctcctctgactggccgtggttgattggctcctgcagtataccacatttggttctgttccttggacctgccaattttttttttactttaatcaatacccaagagcatcattcctctctctactgcagatcagcgtttcctccttcctagttctcctggcaaaatggctgctgaaaacagttctcaagtttttccagatggactctttctcatccaattccaaaatttctaggcaaatgactgattgatccagcttcaatcaattgtggcccctgaactgattaactgtatcagagaagcacgatcatatagaaactagcatgatcatataggaacatgcatgatcacataggaacatatgtgatataggaataagcatgatataggagcaagcacaatcatataggaataagcatgatcatataggaacatacatgatcatataggaacatatatgatcatataggagcaagcatcatcatataggagcaagcacgatcacagcagcaagcatgatcatatgagagcagcatgatcatataggagcaagcacgatcatataggagcaagcacaatcacataggagcaaacatcataaaggagcaagcatgatcacataggagcaagcacgatcataggggagcagcacagtcatataggagcaagcacgaccatataggagcaagcatgatcatataggaacaagcgcgatcatatgggagcaagcacgatcatatgggagcaagcatgatcacatgggagcatgcagtcttataggagcaagcacgatcatataggagtaagcatgatcatatgggagcatgcacagtctcataggagcaagcacgatcatataggagcaagcacgatcatataggagcaagcacgatcacataggagcaaacatcataaaggagcaagcatgatcacataggagcaagcaagatcatataggagcaagcacgatcatataggaacaagcgcgatcatatgggagcaagcatgatcacatgggagcatgcacagtctcataggaacaagagcgatcatataggagcaagcacaatcatatgggagcaagcatgatcacatgggagcatgcagtcttataggagcaagcacgatcatacaggagcaagcatgatcatataggagcatgcacagtctcataggaacaagcatgatcatatgggagcaaacatgatcatataggagcaagcacaatcatataggaacatggcagccatcctgagtcctcatccaggactcatgtttctctccaggaccaagtctgctcagttcaagaatgccaaatgccccaactttagttcatccacagcatctagattagtttcccagggctgccatcacaaattaccacaagctgggcagcttaagccacagaagtggtttttttttgtagtaaacagttctggaggtgagatgtcggagatgaaggagctggcaaggttgttccttctggagtttctgagggagaatttgctccatgcttctctctccgcttctggtggcttctggaaatccttggtgctcctggatttgtagtgtatccctccaatctgtctctgccatcacaggactgtctctccctgtgtgtttctgtgccttcacgtagcatttgcctcttctttcttataagaacaccattcaaactagattaagagtccactctactccaggattacctcatcctaactagttacatcagcaatgacctcatttccaaataagatcatattctgaggaactgggggtcaggacttcaacataactctttgaggggcacagtgccacccataactgcatcctatgtcatttcccagcctcacccactcattctttcattggcttcatacgctaagactgcatcttcagagactcccaagcatagatgggagatggaagggtgattgaaaccagtccacctggtcaactctttccctcaagaaggaatttccaacctcccagagagccccgattattcttcccattggttatacctacggtcatttgtaaagctaaagttattataactcgtggaaaaatttgcatctgaatttggttttttggtaaagctccttcgggccgtcccttcttcggcccaaatttggggcagtcacgtggtgccatcactcctacaggttttagctgtggatcttcccacatccactgcctggaagaccctgcaaggttcagagctgagtgtgaaatgtggagctggcagggacatcgtgagtatcatcatgaagggtgggcagggaggggttaacacattcacagcaagctattccccaacaactgccccttcaaggagatgttcattttttcccctccattcatagcgggctcattttttttctcactaccttcagaggtatttttcctgagactgcgtcattggatatgaaaaacctgataaatcctggccaacccaagccctcctagcaggtggcaggaagcctcttacactgtggagagcagcttccagttgatttcattttttgtgtagagcattttccaatgtgagatactttcctgaaacaggaaagtatacagtcattcctttctcttccttcccagccccaccactgtgacctcacctccaaccctctcttgtcagtcagggccagctctgggctatacttacctagatcagccaactgagaggtttgcaatttttaccttccctggctagttcctgaacaattctgtcttcctgtaattccatatgatgaatgggtctaatgggattatttcaactgcatatcatggaaaagccaaaatcctgtgacttaaatatataaggatttattctctttcataaaagaaatctttagtatgatggctcagtggagaggtgccttctctttctgctctgcagcacacggttcaagcctctaaggtccagcatggttgctggagctccaggcaccatgtctactttccaggcagtgggaaggaggaagggcaaaagggatgcatctcccaattgagttaattcccttcaaggaggattccaacaagttccatacaacattctgcatacatcttatgaccagtatccctttggtatttgaattagaattgcattgaatttataactgactttgaagagtattcacatcttttcattccagcttctggtacgttatcccagtgtgcactcttgggattgtcctgtctccctagaccaaaatagacaactatcagagaaggatagtaagaatgccctctgcttgttctgtgtgttgatatagctttcagagcactttgcaatgtattatttagtctgatctgtataacaaccctatattagaaatcctttactctatttacctggtgaaaaaaacaatgaacctcagagaggttcagtgacttgcccatagtcacatagtacatgagtgaacacgcaaggctttaaccacagttttctggtgttccttccactgagtcacactatctccatcccatccatagatgctgggagttatcttgttttcctctcaaaagctttctaaaagcattttgtatattggaagaataatgtatccatcaacttactagctgggtgacctcaggaaaggaagccctgagattattgccagcattaaatgaaataatatctccaaagcccagttgattatgcctggtacatgtgaaaaaagaaattatcattacaaagttaaagcctgtcacttgtacaccctggaaagaaagccaaaccgggcactttgctaggtgctggcactaaataaggagactcagttactacacacaaagagggcacatcagcgaagttcatccctaaccacagcaaggtcatccttgctccaacctatcacccactgctgacgtttctcctttggtagaggaagtgaagcagagggttcaagggggcaggctttgaggctgactgcctgggtgcaaatgcccacaccaccattcactgggcaagtcatttaacctctcactgccttagttccctcgtctgtaaatgggtactaataataatagctacatccatagagacaccttggatttttgtaagaattaaaagaattagcacaggtaaaggacttagaacagtatctggcacataatacaagctgggtatttgataaatatatgaatacatggggttttattaagttcttcctgagtcttgcagttactggccatgttacatggctgggaaagaagagatgtgtgaaagagattgactgtttctctctctctctctctctctctctctttctcttttttttttttttttttctttcttagggtgacctctttctgaatggccaaacctgcagaattgtgcagcgggagctcttgtttgacctgggtgtggcctacggcattgactgtctgctgattgatcccaccctggggggccgctgtgacacctttactactttcgatgcctcggtcagtcctaaaaacaacagtgtagtaagagaaccttaagccaaagaatggccctcatgatccagtgtggaccctgttgtgaaaccattaagggcctgtcctcagcaagactaggacccagaagacctgagggccaaatgatgtagttctttagactcagaagcaacaggcatctacttagccccacacagcctggaatattcttgtttatccacccatctactcacccactcattcactcccttatcattgagaaaacagtttttggataccaaccatatgccaactgccattcgttttcaaacacatccctctattcagtcactcactcatgcattcaacaaatatttgttgaatgtctgacagattacaccatatgaaattgccatatttgacagtctggagcctatgaaaagggcaatttcacatagtcagtctaatatgatatgccactcacacctctattcacttacccattgattcattcatttgacaatattgattgaacttctatcccaggccctgcactgtgtgaggcatttttacattcactcattcatccatccagcacctttactgagtactcccctgaagccagccattgtgttcaatgcttagcttacccctacaataatccaataataggaacagttatcatctgccctattgtgtagatttagaaactgagtctcaaagaggtaaagtgactttacatggcaaagtttgtcaccagttgatatcagtacctggcatcccctaggaatttcaataactatcccaaattttttggatcccagtcagccaaagtaggagatgaaaccagttgtcctttctacaacaggggtcttcttaatttccaaattatattccacacatatttttcatttaatcatttttcctcatcaatcttctgaagatcaaatagcaagaattattatccctatttattataaaactaaggctcaaatagtatttgtgattggccaaaagtataccatttaacttaaaatggaactaacacttgcacccatatgtcccactgctaatagcatatgcctgtaagacactgccctggtccagctctgtataacagattttcccttcagagaacaaaaccacggagctaatgcccaagacagatcttcagaattatctgtggcaaagttagtgtgtgtgtgttgatattctttgttgttgttgttgttgtcgtcttgagatagggccttgctctgtcatccaggctggggttcagtggtgcaatcacagctcactgcagccttgaactcctgggctcaagtgatcccctcaactcagcctccaaagtcgctgggactacaggttcatgtgccaccatgcctggctaatttttttttttttttacagttggagtcttgctgtgttgcctaggctggtctcaaacttctcgcctcaagcaatctttctgccttggcctcccaaagtgctaggattacaggtgtcagccaccatgcctggcctgttttcatattcttgatcatagccagagtcttaagattagttaagcccttaatccatccaggtattaatcaggaacatttccttgtgttttctgatattcttggttttcaagtgtttcttttcttgcatactagggggagtgtgggagctgtgtcaatactcccagctgcccaaggtggagtaaaccaaaggtaattaagactgcagtgataatgtttggagagccataggtctgtttcattatcagacctgtgtgtgtgtgtgtgtgtgtgtgtgtgtgtgtgtgtgtgtgtgtgcccgtgcacgtatgttgcataaatgtaatttatgtcattctttcaacaacaaagccaatggggtaagatagatattctcagcccaggcaacctgtcaacccatgttctaggacctgtctagaaaagtcatgggatggtagacctagaaggacttagaagataattatgattataaaaatagctgcattttgttggctgctctccatgtcccaggctctgtgctgagcctttatatactcattactctatccctctttataatactcataggaagctattattacctacactttacttatgagaaaaatgggtctcagagagggtaagcaatcagcccaaggctacacagctagtaaggagcaatgctaggatgaaagtccagagagcaatggagagtaatgtttaagtcaatgaaatttggagtccacaggtatggggtcaaattccataatctttgacaaatcttatgacctatcaggtttgcctctgtaaaatggagctaataatggactctctgtgcagctattaggaaaagtaaattttaaaaatgtgggtacactgaagtgcctggcacatagtaagtgctcattaaatgctgttttgtattacttattccaaagtcaagctctttctagtctactagtaaaacctataacaaaaatatctctacaaaacaaaatctaactcataccctccctgcctacaatttgggagccttgccccacaccccttccatgacagcaagctacctccttcccactccctccccaggcaaccatgccacttgcagagcactctaagggtctgaaagttcttccccttgagactggggagaaatcttcccatggaccctagatctactccctcccctatctgcgtgtttctgttgactcccataggaaaaatatcaccttggaaaaaaaaagttggctcacactggaagtcccattttttatttgggcagtacctaagacctccatgagggcacagactagagccccagagccctagtccctgcagtggtaagtgaagggatggtccactctcttcccttagggtgtgaagcagaagtgtctctacaacctgcccttcaagaggaacctggaaggctgccgggagcggtgcagcctggtgatacagatccccaggtgctgcaagggctacttcgggcgagactgtcagggtgagggtgcctcttcccccctcgcaactctaaaagtggtaatatgctcctgctcgttgtccagtctttgaatgtaccaaaattatagggggatgggggaaacactgctaataatgattcccagaccccagaactctgaagagttgtgtatcattccttctactttggcatattttttttatcgagttgagatcctgctgtgcatatattgtaattgtgtgtctgctttttcccttgacattacagcatagacatttattatggtgctaaatacaccgtatttcatttttgatgctgtgcaacatgatttccatgatattgataagcatgtttaaagactttgatgtgactctcccttggcaggtgatgtactgacacagtatgtatgggccataatttcctgagcgcacccctgtccctggtagaggatgtatagcattggctccctctgttacctcatcaggaaagggctccttgccaaagcacatttgggcccattctgaaacccctgtgttaacttctagccaacaatacatcaacaggtgcacgtaacaaatgcctcaaaagcactatctgctacatgttgttctaagtaggcacatttattgagttttattgagtgctttttcccatacatatcaaaacatttaatctgggcaacaacccctagggagtaggttccattgttgtcttcccctccccactgactttttttgagagagggtctcactctgttacccaggctggagtacagtggcaggaccacagctcactacagtctcaaccctctgggctcaagtgatcttctcacctcagcctctcaagtagctgggactacaggcacatgccacaagactcagctaatttttttgtatttttcataggctgggttttcgccatgttgcccaggctggtctcaaactcctgagctcaagcagtccatccatcttggcctcccaaagtgctaggattacaggcgtgagccgccgtgcctggcctgttgaccccattttgtaaatgagaaaacagaggcacagagaggacaagaagtaaacccaaggtcccactggtctgtcttcagcagctgtgatttttactagcatgcatactccattcatcataatctcactgagaatactctgggttgagagcccccatgaccacccagctccaccctccatcactaaagtgtggaccattcatgaaaatcagtatcattctaatatttgttcagtgctttatattttcaaaatgttctcagttataatgcctcatttgatcttcacaataacaacatgggtataggtcaagcagacactgtatcatcattattatcatcatcatttagatctaagaaaacaaaagctcagagcaagttcattactcaacccagatatcctcaaatccagtgcacaaacccccaaatacagtgcacagttcagtgtatcaccctgccaagacagaatcatatcagataccataaagttcatgtcccataggccagtgacgtgccttaaatatccactgacactgaaggcgatggtccctctgggctaacagaagtcagatgccacagcacatttacaaaggtgctgagctgctctggctttgggagactgttgagtcactgctgtttcatctcttccagcctgccctggaggaccagatgccccgtgtaataaccggggtgtctgccttgatcagtactcggccaccggagagtgtaaatgcaacaccggcttcaatgggacggcgtgtgagatgtgctggccggggagattcgggcctgattgtctgcgtatgtggcgccgcttctccgtgctagagcttgttttttgactgtgtgctccctgtccttgttcatgccatctgcctgacctggaggcatccttttgtcctttctctcagccacacccctccaatctgcctgccctatgtgtttatttcctccttggatgcattcccagtttccaatgaaaaagcttcgcctctagaagtgaaacttgtccccagcagccactaaggcaagatgtggctgaacaatgttcattcgatcattcaaccaatgtggatttactaagtccttactaatagtgaatgctgacattgattaagtgcctactatgtgccaggcacaaatgttttacaattcaatcctcttaaccaccctttgagataggtactgttattatctgcaagtagcagatgaagaaaccaaggtacaaagagcttaagtgatttgctcaagagccagcaatttttttttcttttttttttttttttgagacagagtttcgctcttgttgcccaggctggagtgcaatggcgcaatctcagctcactgcaacctctgcctcccaggttcaagtgattctccagcctcagtctcctgagtagctgggattacaggcgcccgccaccacacccggctaattttatatttttagtagagacagggtttctccatgttggtcaggctggtctcaaactcccgacctcaggtgatccacccgcctcagcctcccaacagtgctgggattacaggtgtgagccactgtgcccggctgaatatttctaatgtctagggatttgtggtttagggactgacagggacaaaattccagctctcaaaaggcttacagacacaaatttttctaaaaaatagttataaaggatataaaagcaaagaagcaggtagaagggtgaagaatgaaaggagacattgttttagaagacacctcacatagggaatatttgagtagagacctaacagacgcaaggggaccaagcatgaggtatgaagagcaggccaatcaaactttcggcagtgcgggaaagactccatgactccactggccagtatggtagccactaggcacatgtggctatcgagcacccaaaacgtgtggctgaggaagcaaatgtttaattaaatttaaatagccacgcgtagatagtggacagtgcagaccagaggaacagctttcctccaggtgagatgagcaagtgcaaaggccctgggacagaagccagcttggtgtgtacagaacagcaagaagaccagggtggctgagcggagtgggcaaagaggaggaagagaggaagagaatgcaatctgaaggtcaccaggggccagatcttcttggccaatgaaaagtctttagctctatgtgtgacaggaggccagcaaagggttgtgaacagagggatgttgtgaagagattagaaaggatggctctggggagggtatctgtaggagaacaggcacagaagcagggccccttggagaaaataatgcaacaacccaggccagcgctaatggtgacttgcactagtacggtagtgctggaggtggtgagaggtggtggaattggtacatattttttaatgttactttttttttttgagacaaaatctcactctatcacccaggctgaaatacagtggcgggattatggctcactgcagcctcaacctcctgggctcaagcaatcctcccacctcagccttctgagtagttaggactacaggcacatgccaccatacccaaataattttttattttttaaattttttgtagagattgagtctccctatgttccccagactggtctcaaactcctggcctcaagcaatcctcctgcttcagcctcccaaagcactgggattacaggcatgatccactgcacctggccacaattttactttttttttttttttttttttttaagacagggtctcactctgttacccagactggtatacagtggtgtgatcacagcttactgtagcctcaacatcttgggctcaagcagtcctcccatcccagcctcccaagtagctgggactaaaggcgtgtaccacgacatctggctaatttttgtttgttgttgttgttttgtagatacggggttgcaccatgttgcccaggctggtcttgaccgggcctcaagcaatcctcccacctcagccgcccaaagtgccgggattacagacatgagccaccacacccagccaaaattttacttttaaatagatttctccatcaggaagccccagatgagatgatctccctaaatgttcattgcgtaccccatgatactctctactgtgattataacattcatctcacttataattatatgatcaacagctgggcactctgagactgtaagccccatgagaacagggaccttctctattatgtttttccctgtaaccttatcgcttagcagtgcctggcctgtgatagtccctgaataagttattttttagatgtttcaatgaatgaatgaatgactgtgacataagcatggtgcctcccacaactgaaaatgcatagcaaacaaggggtcagggagctggttgattgggtctcaacccctgatgactgaccatatcctaatttgtttacagcctgtggctgctcagaccacggacagtgcgatgatggcatcacgggctccgggcagtgcctctgtgaaacggggtggacaggcccctcgtgtgacactcaggcaggtcagtcatgggagtggtcagctgctggcagcccagggctgcagtggacactgccaagagcatacaagtgaggttgggagtctgagtgacatctgaaaaaagtgacaaagcaggtccatgtggtaaaagataattcagatctgtagccccgggcctcaggaggatggagacttgcagtaaaactagatgaaaagatttaactcaaacctatgaaactagcatgtcatcctgtatgattataggacccacctcaagcacagaatcccaggttcaagcaaggactgtgccttgtcttggtgattttggggcccagatgggtactgacacagaggctgagtggtttcatggaaatcactttgaaggcccgagaccagggtctgacccctggttctgctacttactagatgaatggccttagagaaccacactctctgagccttgacttgcttatccttaaaaagaactccatgctacacattctgcaacgcaaggattgctggcagggtcagcgagcatggttttgaagttcccagtgtacgcagatgctcaaaacaagcagctgccattatcacactcatcatttataatcattgccatagctcgatccttactaggtggtcagttttctgatgtctcctttatactcgaagccctgtgttctggtagatctgaaatgtgctggttgaattatccatgtgaatgactgtcatttaatcctccctggggtcacagggcatggcgaggccctacctgtgggctttagcaacctgaagtttcatgggttgcagcagtatggctaacttgagttcctcctccctgttccttctgcctcctccctcctcccctaagcactacatggcctcctgctgcctgcatgcactgtaaccccagccaataccaaagctccaggcttctccctagctcagtggtgccctcagaaggccatggaatttctcctccaatttaaccatatccatcgggaacccctgtccttagagccagagagctaatctgccaagttcattcctgctaataagttttgtggtataaagttttaattgatagcccctaaagaacattttttctcatataaatctcaatgacattgcagagatcatgtcttactataaaagagtaattctagaatcccagaatctccaaggctagaaaagaccttagcaaatcaccccatcttcctgctgtacaggggcacttatgaacacagtggtcgtccagagagagtcttggaaagtctccttagatgggttttaactcttcacaccatgggtacagaatgaaagtggcccctttctttgcagttttgcctgcagtgtgtacgcctccttgttctgctcatgccacctgtaaggagaacaacacgtgtgagtgtaacctggattatgaaggtgacggaatcacatgcacaggtaagccacctttgtgcacaggtgaaatagcagcatggtgtgggagaggagcaggacttgctcacagtgcctgggcttcatcctagccctccttcctgtctgggccacttcagcagcacctaccctctctatgactcagtttctttaatgggtgtgctcatgcttgatctgctcaccctctaggtcagggtttcaaaattgttttgcaaactgggatgcactttactttagaatgtttttctttcttttttttttttttttttttttccgagatggactttcacgcttgttgcccaggctggagtgcaatggtgcaatcttggctcactgcaacctccgcttcccaggttcaagcaattctcctgcctcagcctcccaagtagctgggattacaggcatgcgccaccgcacctggctaactttagagtgtttttctaactctacaagtaatccagccttcaaaaaaaaatcagaaaatacacaacaccatttttttaagttaaacctaaacatactctcaccactaggtgagaaccactgtgaacactgcaatatccctctatagtagttaggatataggttcagccatacagaggcccaaatgaacagtggcataaataaggcagatgtttcctattgtctcatataacaggttggaagtattcagggctaatacagtttcactctgaaagctcattttgggggctgaactccttttctgaactccttttatcttgtggctctgccatcgttcactcacctcacctgaggtggccaataccataagcccagcctggacagcaagatggaaggagaggaaggaggcaaacctccttccctttaagaatgcaaactaggaattgttaaaaatcacatctgctcccatcccattggctggaatctcatcattggtcatgcctagctacaagggaacctgggaaatgtcgtcttttattgggcaaccatgaacccacctgaaaatctattattacagaaaaaaagagactaggctgggagcaatggctcacacctgtaattctagcactttgggaggccggggtgggcagatcacttgaggtcaggagtttgaaaccagcctggccaacatggtgaaaccccatctctactaaatctacaaaaattagccgggcatggtgacaggtgcctgtaatcccagctacttgggaggctgaggcaggagaatcacctgaacccaggaggcagaggttgcagtgagctgagatcaggccactctactctagcctgggcaacagaacaagactctgtctccaaaaaaaaaaaaaaaaaaagggaagaagaagaagaaaacagagactaggtattgaggaaaaatcagcagtctcagccacatgtactttctaatatttttcatggataaatattcacagagatatatactttctttacacaaattagatcttgctatacctgttctttattcagctacaaggcattccagaagtgagtcagcattcaacaatggcaacaaagacctagattctcttttcccaccctcccatccttagaatgagtcttcttgtccttgtatttattcttccagggtctcaagtggctgcataaatgcagatggcttttcagctactcctgaggctggagctaatctatcgttgggtcgatatttgggggatcataaaaacaaaggttctaagaggcagcacagtgaggaaagcatggatttttggaggcaaaccaacctgggtttaaatcttcagccaggccacattttagctgttttagctttgtcaggtcagttaagctgagtctcagtttgttcatctacagaatggggacaacaatgtctatctcacagggtgctcaatattgtactaactctacaccacacacacacacacacacatacacacacacacacacacacacacacacacacacacacacacacacacacacactgtcctaacattaaaaatccaaatttattctgaaaactgataccaaagtcaagcctggaggtatatgacaaagggggcagaagcggacagatgtcatcaggctgcatctatgagggtgtcacaaaaatattcatgttgcaaaggccagcacagaggccacagggcatggagagagaagcacgaacacgcaggggcccatttactcacccaacaccactagtgctgtggtgccccataccctgacctgaagccctagttccacagaaggtggtaagttgagccctctctcctctgctcttgcagttgtggatttctgcaaacaggacaacgggggctgtgcaaaggtggccagatgctcccagaagggcacgaaggtctcctgcagctgccagaagggatacaaaggggacgggcacagctgcacagagatagacccctgtgcagacggccttaacggagggtgtcacgagcacgccacctgtaagatgacaggcccggtgagtcgctctttcccagggaaatttgggagcagcgccgtgggcttcgctcctccttgcctttccacctcccatactctgcttatctcctggactcttcctaaacattttttctagcacagtctgtttcttgttaaaagtcattgggctaaatgcaaggtagtcccctaggcagaaaaaggacgtccatggaaaactggttaaattcttaagtgtattgcttagttaacagtaatgtaccaacattaatttcttagctctgactaatgtgctatagttatgttggacatcaggggaaagtgggtagagagtataggagagtttgctctttggccacccttctatctatctaaaattatcctaaataaaaggcttattaaaacaaaaagctggccgggcacggtggctcacgcctgtaatcccagtactttgggaggccgaggcagatggatcacgaggtcaggagatcaagaccatcctggctaacacggtgaaaccccatgtctactaaaaaaatgcaaaaaaaaaaaaaaattagccgggcatggtggcgggcacctgtagtcccagctactcgggaggctgaggcaggagaatggcatgaacacaggaggcggagcttgcagtgagccgagatcgtgccactgcactccagcctgggtgacagagcaagactctgtctcacaaaaaaaaaaaaaaaaaaaaaaaaaaaaaaagctggtaagatgtggcaggaaaagtgccgaaaagatgatgcaagataatgtccgttcctggttataaaggtggttctagagtcagattgcttttgcatcttacctcctggactgacaagctgtgtgacctggaggtggctaattactctctgagccccagttttctcatttgtaaagtgggcctcataataatgcagacatcatagagttgttgtggggattaaaggagatcattcattgattcaaccagtggtcattgtgcacctactatgtgctcttgcaggtcccagggttacaacaaaaagacagagtccctgctttcctggtgcttgtgcacaagtagagagagggggcaatgcactgtacagaaacaaatgcatggaattttttcagagagcacaaggagccctgtgaagaacataaatcaggccaatgtgatagaagggaatggaaaagctacttatgtagggtggtcagggaggctgtctctgaggaagtcacatttgaactgagatgtaaaggatgaggtttcatcataagcctgcataaaagcaggacgtagcagttattcccactggacaggaaaggcacgttctcttggtccatctgaacacctcctaggctggacattggtcccatgggcacttgggcatcctggggtcctagagaaggaactttttcatctcttcccactctccctccacagggcaagcacaagtgtgagtgtaaaagtcactatgtcggagatgggctgaactgtgagccggagcagctgcccattgaccgctgcttacaggacaatgggcagtgccatgcagacgccaaatgtgtcgacctccacttccagggttagtgtgaccagggcctatggcccaaagcaccctcctcttcaggcctggggaagggaccctcaagggaaagaagaaaaacaaaacaggccaagcctggtggctcaagcctgtaatcccaatactttgggaggccaaggcagatggatcacttgaggtcaggagttggagaccagcccggccaacatggcaaaaccccatctctactaaaaatacaaaaaatcagccggttgtggcagtgcgcgcctgtaatcccagctacttgggaggctgaggaaagcgaaaagccacatagaagtgcagaggcatgggcaataggacatcttgaaacccaacggaggaagccagaaaggacccacaaacatagttcctagccaaggcagagggacttcagtggttcagaaagtgactcagggcactgcactttatggctaatcagtatgtactggatctctccagggttgggtttgtttgacagatgtggtctctggtggagacttcctggaggcttgaattgggctagaggagctagcaagccatttctgctggccaggacagcatggccaggagagaatgatcaagggtcagctgagaaggatgaagccatgaggaagacacatgaaggctgtgaccccctagtggcagggtctgtactgaggagtgagatgaggttgaaagaactaacaatggacacagaatagagaaaaggaaaggctcagccatgacataaagtttccatcctgagaccaaatgcagtggtggtgctgggttaaagcagctggggagggaaggtgacgagaggtttgaaagcttggttggggatattctatggtctaggtacaggggcacttccaagcagaaagattttatgggcagttgctacttagcatggggataaaaatgcacagctgggaccagctgatttggaagttatttgcccctgggactgtgaagtcaagaagagcttggctttttctttaggacacagttcattcagcctgtcccacctgttcccaaagcccacttccaagtggaaatctacccagaccatagagtgtggtccagcttctcccatgggcttttctcttctgttttcttatgaatgccaagaaaatgttggcagtgatactaagtgactgtgcatcacgttggacctcccttctgttggagctgtgtggttaccattagcttgggagaatgccccagctttccctataggcacagttacagaaccatcccacattcaggaggaagcgcctgccctcacacagttcataggagggcaaactgccttcatgatttgcagccgatttggtaatgtgtgcagcagacagccttaaaataactcatactgagacctgatggttccgtttccaggaccccatcctacagaaataatctgagaattgaaaaaagataagcatacccatcccaccattatttaacatcacagaaaattagaaataacatatatatctaatagtaaatgatgataaaatatattgatatacatctactcaaattcattgtaaggtattttgttgtctcaataaagagacaaggaacacttttccatacttctccaagctgttaaattggtgtttgcatttcagatatggccaagatcatttgacttacgcactgtgctactgaaatatgttcaaacgagaaaaacttagtcttctttggtgtagaaagtatcatttttgtggcattatacaatgaacttgacaatataaaaatgtgacttgcttcttgaactattgctggtgtctgcactgaattgtttggttaggaaaggtatcagctatgaaccaatgataaaaatcttccagtatcttagggggaaatgaatttttaaaacttttttaaaaagcacagcaggggtcagaaaacacacagccctgggcagaaactcactttaatgtgttttttatagctgtaaaggtcacaacaaatttttcaattataaatatggggaggaggagaaaatcatgttaccagagaaattttataattttgggatataattatgatttaatgttgttttaaaaagatttatgaaaactacatcggcagtatgctaccacatttagagtatatataacatgaataaataggaaagaagattgaaagaatgtcaaattatatcaaattaaaaatttaccaaaaaataaagtaaaattctagaaggaaatgcaccaaaatgttagccatggagtaatgattatttctggagaatagaattgtaggtggtttttgcttatgtttttacttttctgtattgccctaatttctacaatgaacatatgctagttttatagttagaaaagaaatattttaaatgatgtacttcaacataacttgaagggaaagtggcttctggagacaccctggggtatagctggccttcattttgaaagtccttcagagtccattgttggaaacactgccaacctggtgggctgacctgggcgattcctcctcttcctcatccagataccactgttggggtgttccatctacgctccccactgggccagtataagctgacctttgacaaagccagagaggcctgtgccaacgaagctgcgaccatggcaacctacaaccagctctcctatgcccagaaggtgggtcttcagttagcagattctgtgcagacagagtctgcaggggcggaagtgcagccctttcttaagatggggaagacttgagctgttgccttcaagcaagggagtgcaggtagctcctggaacaatgctaacagtcaccatgtccatttattgggcatctattatgtgtcagggactgtgcagggtacttcgtggatattattgttcatccttacaacatctctgaaggcagagcaggtgttacttactattcccattttacagatagggaaactgaggcttagaaagtttaagtacagtgcctgatgtcacccagccaagaggtggcagatccaatatttaagggtagacctgactcttaaaagtctatttcaaccatgacattcaactgccaaggcagaagtggagactggaagtgcatccctcacagctggaaaccagaaagacagcaatacccacgagcctagggtggatctccccgaacccacaaaacagtggagtttccctggaatagctggggctctctctggctggagggactgtgaaaagaaaaaagagactgcacaagctttcagatatggcaggaaggaaacggagctctttgatcaggtgctgctctcttaacctctaaaactagaagtcctacccatttggaaaagctagcaggttggagttccaggctggtggtttatcactgggagcagaggagatgaatgcctagtacgtatgattttaaagccccttctccaacctccatcactaacaaatctctactttttcagacctggtattcctttaccaaggaataaagcctttgatgccaggacccagactcaaggagaatctgaatctctgctctcctgcttgctggtcatgtggccttgatatcaagccactaaaatctctgacttacctggaatgtttgtggaaggactaaatgtaatatggcacacagtaggaactcaatttttaagattattaaaagatctggaatagtagaccacctgggtttgaatgccagttgccagctgtgtgactttgagcaagttacttctctttgcctcaattttctcaattgtataaggatttaaaacgttcccacctcatagggttgattgagagttaaaggtgttgacacatgaaaaactcttgcaagagaacctgaccccagataagctcccaataagtcttatgatgatgatggtggttgtggtgattatgataatggtggtggtgatgatggggaggatgacaataattataataacgatgagagcaatgatgatattatgatgaagaattagagttctaggccaggcgtggtgactcacgcctgtaatcccagcactttgggagccagaggcgggtggatcacttgaggtcaggagtttaagaccagcctgatcatggagaaacccaatctctactaaaatacaaaaattagctgcacatggtggtgcacacctgtaatcctagctacccaggaggttgagacaggagaattgcttaaacttgggaaatggaggttgcaatgagccaagatcatgccactgccctttagcctgggtgacagagcaagactccacctcaaaaaaaaaaaaaaaatttgagttctatcatcagagttctaccaacccattagcagaaaaatttgcacctagtatcaatggatgacagcaaattctttctcaagagcagagagaagagaaatgagtatgaaagacctgggcacctacaagaaagagaggacacttttgttcacccagtggctcaatcaatcagtcaacatctaatgaccacctactgtgtgccaggcacagaggtgcaataggcaaagtgagactttatgggttttatggcctaataggggaatcagacattaaccaagtgatgccacaacacatgaacttgcagctgacccatggccctgtctgtatccctgcaggccaagtaccacctgtgctcagcaggctggctggagaccgggcgggttgcctaccccacagccttcgcctcccagaactgtggctctggtgtggttgggatagtggactatggacctagacccaacaagagtgaaatgtgggatgtcttctgctatcggatgaaaggtaaccgccccagctacacttcaggttctgggccacacagctgctgagcaatcctcagcctggccagtcactccccaagcagaagcagtgcagccctggcccctgccttacttgtgtgggaccctgtgtgcctctgccctccagatgtgaactgcacctgcaaggtgggctatgtgggagatggcttctcatgcagtgggaacctgctgcaggtcctgatgtccttcccctcactcacaaacttcctgacggtatgtaccatgtctgcttggtttgcctcaggcagggaggggttgcctcaaagcaggtattagaggggtgaggccttaagctgaaggccacagtcacagttaagagcatgggtgctggaccaccttgcctgaatctaaagcctagttttgccactcacttgtaaaaccttaaagaagttactttcctctctgggactcaatttcctcatctataaaatggagatggtagtagcatcaaccatgtagggtcattgtgatcattaaatgagttaatagttgtgaagcatttagacctgtggtctgtacatggaaaattctatgttcttgtgagctggtattatcatctctgtttgtatgtggaacagtttaagagcatggtctacacaaatgagacactctttaatcctcttcatggatgtagttagctaagcctgcctggtgatcacccagtgagccaaattaacatggagtcaatttgcgtcttgcactgcacttaaagtcacgtcaatattctacaagtcatatccagcgaagagaaagcctcatctggagaaaggtttggtgctgactgatcaaagaactgacctaacagtaataatgacaacaacagtaataacagctaacatttcttgagcatttaagaggacatttcattcaagccatagaatgtaagttccataagggaaaggattttctttgccttgaccaccattgtctccccaaaccctcagatagcaggtggcacatgacaggtgctccataaatacttgttagaaggactaaatcctcctgcaactgtataaggccacttctatatccacgttttagatgaagaaactgaggcttagcaaggccaaggacacagcctaactcatcagagctgggctcaatctcagactgcctggttccagcctccccctcatgctttcgagtacggaacaaggacagcctgggccactgttccgagtagaatctacagtcagtgaccgcaggaggaaagggcactgagcatgagtatagggcttgtaggatccatgtggaagttagaccaaggaccccaaaatggagtctctgtccacagaccaaagatatccatctcactggtgtaaaaatcaggaccaccattaaatacactagagatgaacacccacactaatctttctgctgtgtgggagcctggcttacaacagcatttcaaagaaaagacggtgtcagaacaaaacattttcagcaaattacctaccttctctgggcctcagtagcccagaaggagggaaaatatatatatatatatatatatatatatatatataaaatatatatattaaagtatgtaaatatatattttaaaaattatatatttatatatattttgtttgtttgttttcttaagagagtcttgttgtgttgcccaggctggagtacagtggcatgatctcggctcatggcagcctcaacctcctgggctcaagggctcctcccaccccagcctccagagcagctgggactacaggcacacaccaccacactggctaattttttaactttttgtagagatggactcttactatgttgcccaggctggtctcaaactcctgtgctcaagctgctctctcacctcagcctcccaaagtgctgggattataggtgtgagccaccacacccagcctgatcagtgaatatttagcacttaccatgtgcttgagatatatcagtgaacaagcaagcaaacaataaatggaacaaacacgtcaatagtattgagtgctagaagatgatagatccagatcctatggaaaaagtggagcagggcttggggggcaccccagggtcccccttctgtctgaagtgatgggggaaggctttggggagaaagtgacatgtaagcaaagtgtaaacaggggagagggagtgagccatgcagacttaggggaagaacattccaggcagaaggaacagtccaacaaaggatgagcagcaggagcgtgccaggcaagtctgaggaagagcagggaggccccatatggctggaacagagtgagcaagagaggacaagctaggcctggggtcagagatgcaacagcagccacatgctttgggcctcgtgagctgttatgaagacttggactgttcctctgagtgaagtggggggccactgcaggattttgagaagactcgagatttgatgcacctttcaaagggctgctcaagcagccacgtggaggatgggctgtgacgtggctgtgtcttaaaccataggattcactgaggaaaggaaaagtcctcaaactctcccacggcgcaggcagaagacacagcaaaggagcagcaggctgagttggctcacaccatgaatattcacagatgggtgatgccctgggaccttcttcagccacccaggtccctgcacaccagggctggcccctctgatgacttccttcttctccccaggaagtgctggcctattccaacagctcagctcgaggccgtgcatttctagaacacctgactgacctgtccatccgcggcaccctctttgtgccacagaacagtgggctgggggagaatgaggtgagttgagtccctggtgcctttgctttagactagcatgttatctatcaccacaacaatgctgtgtcacaaattacctgaaaactcagtggctacacatttatttagctcacagatcatctgcagatcagttggccactcccttggtcttggcacactcgggtctgagaccagctgtcagctgctctagctgggccatcaatggctctgctccatggaactctcatcgtccaacaggctagcccaggcgagttctcagggcaatggcagggagtgagagaggcgagagtaggccctgtcccaacagtgctttctcaagcctctgtttggtcacatttgctaatgtgcccctggcctgataggtcacatgactgagcccaaagtcagcatggggggcaaagggccaggggtgcagggagtggggaagaaccagggccactgatgcaatctgtgttccacaccaaccttcttcatatcacggcacacagaggattggcggtatttattcaattcacgcacaggtggctgacctgaggctccgacagccccaccagccacctgagggctgaggaaagcaatacctctgcctacctcaagacaccgctggaaagctctgctctagacaatacaaatgacattcaatcccccatcctagctataggtggcctctggcagagcccagacaaccagaagcctaagaaaaccttgacatttcctgatctccacatggaggcaggaaagcctaggccatgagaagcaattttcttcgtcatccccatcattaaaaagacaaaatattgcttggcctttgaagagcattctgtgtttctccttttttctcagaccttgtctgggcgggacatcgagcaccacctcgccaatgtcagcatgtttttctacaatgaccttgtcaatggcaccaccctgcaaacgaggctgggaagcaagctgctcatcactgccagccaggacccactccaaccggtacaaagtcttctgggcttcttgggggaacgggagataatgcatgcaaagttcctggcatacagtaggtgcttaatagatggcaactattatgcaaacataaactctaaacctgcagataggggacggtgttaactgcccactacagcataccacactgacaattgggcagcccctaccccttgggaaatagggcagcctcagaagctggttatggggaaggataatgaacccattttaaagctgattctccgccttcattttggtcagcttgtcagactattccaggcattaacatgagctccaaagtcaaatgaccccagtatgaatcccagttctgccacttgctaactgtaaggacttaaacaagttatccagcttccctgtgtctcaatttccccatctgaaaaatcaggatgatggtgatggtggtgatgatgatacaggtcattattttcatgattgtgatacaagggagggaaaacttattctaccctcttagggtctgtggctgggcctgagaattaaatagacatacgataaataggagagaagcatacacattttatttaatcttttatgtgaatcaagggaaccctcatatggagaatagagacccaaagaacagttgggatcaagagcttatttactttttaaagaaatgatacatttgtggaaaattgatcaaataaagagctttaggctaagggcagtaaattgtggcatgactaagaaatagatggtggatatgagtggaagataaggagtatttcagtagatttgtttgtacagatccatttcgtcatctactcccagtctccagtaaggatgttcttctcttctggaacagaaggggcactttctcatgggaaattgtattacctgcttttagggagacagcaggtcagggaacccttcctgcaactgccgtttctcaagtgacttctgctcaaaataactaataatgccacaatggtgtgtggggggtggttttttgttgttttttagacagtctctcgctctgtcacccaggctggagcacagtggcacaatctcggttcactgcaacctccccctcctggattcaagcgatcctcctgcctcagcctcccgcgtagctgggactacaggtgcccgccaccacactcagctgatttttgtatttttaatagagatggggttttgccatgttggccaggctggtcttgaactcctggcttcaagtgacatgcctgcctcggccttccaaagtgctaggatcacaggggtgagctaccatgcccagcccaaaatggtgttattttggggtgacatgtcctaagccccttcagtgtggatgatggtgatgatactgatggagatgaccgtgggggtagcggtggaggtggtgataaccatgatgtcggattcaggttctgagacatgcagagagtagtgcctgacaggtagcaagtgcttaataaatattggttttaaatatttatctcattaaatgatttctatttaagagcagtttagactagtgtctctcaaaatttaatgtgcatttgaatctgctggagatttgttaaaatgaagacgtgattcagcaggggagaaggcacagggcctcagcttctgcccacacaagccaggaaatcacactgggacatcacttaaaatacagcttttctaacagtgtggtgcgatgttcagtgcatggacgcagcgtccacaggcatggggtttgctacttcctgggtgatctgggtcaggccactttccttctgatcactcatctgtcagacaagtgggttggacaaatgacccataaggttctctgcagccctcagatcagcttgttggcacaggacaattaatgtgttctgggctgtccagagggtgaggagaagtcctgggctgcctatcagtggagacaaacctgaaacatgggctcaggggccttgggaaaattgaacaacttccctccatggagggctgcccactcggagagtaaaagccatcaaccctcttctcatttccctagacggagaccaggtttgttgatggaagagccattctgcagtgggacatctttgcctccaatgggatcattcatgtcatttccaggcctttaaaagcaccccctgcccccgtggtgagtatctagggtccctgataacgggccaggaggagccccggtgcccactcaccaacaggcaaaccattaccagaagccctgtcctcctccctcttcctccagagactggaggagcctccagcctccaacctccaaggtagctggccaggaccgcccaaccctgcttcctgccatccccactcccaagcattagcaacacagcaccagtcaccattaatatctgttgaatgaaagggggaggatgggccaccaaaggaagcgctggaaggggagtgagaaatcctaagctatggtttggcccctccacttcgtagcatctctgagtcccaattttctcatctgcaaaatggggctcataatgcctccctcctgggttttgggaaggattgtaagttagaaatggaaaacacttagaacagcccctgacacacagtacatgctatataaaagttggtgatggtggttgttagtattcttttttgcaaaagcatgaggggagaggtgagctgctggagagttccacagcatagtggttaagcacagaagctccaaagccagactgggttcaaagcccacttccaccactgactggctgtgtgatatcgggcaagtgcttcacctctctgtgccccagttctcccacaataataactctccctatctctttgggttattatcacacttcaatgggttatttcacagaagggtattagaccctggcagtaataagggccagatacatgttaacatgtcagtatttttatccccactggctccagaatgcctcgggccaccaagggttccccttttggggagtcagaagttttaagaatgggcccctttcctttctttgtgttcagaccttgacccacactggcttgggagcagggatcttctttgccatcatcctggtgactggggctgttgccttggctgcttactcctactttcggataaaccggagaacaatcggcttccagcattttgaggtaagagagaaaaatgggaacatgatgatggggtcctctccaaaaacccagtccctggacctgggctgcttcagtcggtggctgcgccagagtcctcacccagaagcagtgtgtcacacagtagcaggggcggccacccaccccacgcttactgctgcttggatggggtccctgctcttaagaggaacagcagtggtggttccaagcccctccttctggctgagacagggcttggcaaggagagaacccaccctgagcctctgtgccaggggtttggcctggaggcacattcactaggacctaggagtcttgtttaccttggaggattcactgcacaagcacaccccatgacctagcttgggcttcaagaccggctctgagaactgggggacagggctagggaccctacacagccagaggctttatgctgcagccagtgacactcatttctatttgaacagttgagtccacatcccaatcagcagccagctcttgactggctgtgtaagaatatggccggggcagcagcacagcggttgagcatctttccttatggactttgtcctcctctctggcccaccctctcctcaaaacactcctggtaaaggctgtggtgcagagcccccaagcagcagtttgctgccttctggcagacagcttgtatatttataagctccagggaaaatctcaaaatccccatttttagcaaaagtgtataggctgtatgactgcatttatattaagttaaaggataggcaacaccacttcagggtgatgggagtcagaacagcagttaccctgggtggcaggcaccagcaggctaagagcatgtgaacacatcctggggtatggaaatgccctatgtgccgatttggtggtgatcacaaatgggcagacatcggtaagatgtcactgagctgaatctaaaggttggtaaattttattatatgtgaatcatctctcaacaaagtactgttaaaaaaggaaaagctcccagaggcaaagggtggcttgctttacctgccaacttggctgagacgctcctgctttggggatgctcctggctttcatgcttgtctttccaaacagtcggaagaggacattaatgttgcagctcttggcaagcagcagcctgagaatatctcgaaccccttgtatgagagcacaacctcagctcccccagaaccttcctacgaccccttcacggtgagtttgcattcttatctaggaataggttcccttggggtacaggggaatgatgtcttttaggaaatttcagtggagatctttgtaccaaagaaggttcatttctagaatgtatgtcaggtaacaagcctaaaagccagttttgcaagctgactgaagccagtgtggttgctcagagttcctgggttctcttgggtagacagcagaatccttgaacaaacagagacaggcgagaacaagaggttgttatccaagcccaatctcatgaccaggtgagatgccacagtgaaaaaaagtcttgggctgaattctgctgcaatcatttatgaggtagcaggtgcaaaacaagatggaaaaaggatttttcctttagatgtccttttttttttttctttgagatggagtctcactctgtcacccaggctggagtgcagtggcacgatctcggctcattgcaacctctgcctcccgagtagctgggattacaggcgcataccaccatgcccagctaactttgtattgttaatacagacagggtttctccatgttggtcaggctggtctcgaactcccaacctcaggtgatacgcccacctcggcctcccaaagtgctgggattacaggcgtgagccactgcatctggccttagatgtcctttaaacttacttacactgacattgttgtccaagattttactgcttgttgtcagagctgctgctttcttgcttttggagctacttttctttgatgaggccttatagtatatatgggtgggtgttctgctctggtctttcagaaggggaccatttatctctagagtcagtgatgctttagcttagctggggcctccactgacatcaatccagggggaccccttggcagggtaccccatacataacacatgtggaagtacatcctgcctgtagtttaataccagttctcgactgaaaaaaatacataggaatagaacttaatttttctttttataaaaggagagaaatgttttcttccaccatgttgaagtttgtatagtgtaacagatattatttttccaaagtaaatcaaggtaaatatcttgtggttcttcatgcctgtggtaacagatttaatataaatgcaatagactgaaaaataaccagattgcaaatcatatttttttaatcaaacccatgtaaaggcttctggttcacatttcaagggtaagttcgggccgggtgcagtggctcatgcgtgtaatcccagcactttcggaggccaaggcaggtggatcacctgaggtcaagagttcaagaccagcctggccaacatggtgaaatcccatgtctactaaattaggcaggagcggtggtgcctgcctgtaatcccagctacacgggaggctgaggcaacagaatcgcttgaactgggaggcggaggttgcagtgagcagagattgcaccactgcactccagcttgggcagcagagcaagactctgtctcaaaaaaaaaaaaaaaaaaaaaaaaagggaggtggtaagttcagctaaattacatttgttaactaagtactgttatgctgaaatcaccttcatttaaaaagcagaaacaaatgcatacatcctctccaatgcaccccatgccttccctgttgtctgtccccttctgagggctctatcagcaccatgcatgaaagatttacctgaggcaggtgagaaagtagcctaaatgcaggattcagctaaacctactattcagactacatggcaaaaacattccagaatcctaagcataaggtaccagcttacaaagtgacgtgctacattctcacgcctttgacactatttttagtgactccagacacatttaccaccactagttttacccatgaaaagccatttctagcatctattatgctaattgacaaagcctgggtgccagtcagagctaaagtcagcagaaggcttggcatggccacctctagagtgtggccttttttaggcagggtcctggtgtgtcacgcaggctggagtgcagcggcaccatcagggctcactgcaagcctcaggtgatcctcccacctcagcctcccgagtagctgggcctacaggcatgtgccacctaatttttgtattttttgtagagataaggtttcaccgtgttgctcaggctgatctcgaactcctgagctcaagtgatccgcctgcctcagcctcccgaagtgctgggattacaggcgcgagccaccatgcccggctgagcggggtttctattacactctctcaggcactcaagagccaccactggttcaagatgaattttcaaaccgaaaggagtttttataatattattagccaccttttgtgaggtgcttataccttgctaaatgtaggctctaatttaatcctcctacctccctgtgaggtatattatgaccctttgtagatgaagaaactgcagccgagttgggatgatttgtcttgggccacccagcttcaagcaggagagactaaaacaggtggccctacccccagcccatcctgcctcccaacacaaggcagcagcacaaacaaacacgcccagcacatacgtgttcacagtgctcagggagagtcatgcctcagaccagtggccaccagaaagattcaactaggactcaacacacagaatgccctgcccccttacaaccctctcttttccaggactctgaagaacggcagcttgagggcaatgaccccttgaggacactgtgagggcctggacgggagatgccagccatcactcactgccacctgggccatcaactgtgaattctcagcaccagttgccttttaggaacgtaaagtcctttaagcactcagaagccatacctcatctctctggctgatctgggggttgtttctgtgggtgagagatgtgttgctgtgcccacccagtacagcttcctcctctgaccctttggctcttcttcctttgtactcttcagctggcacctgctccattctgccctacatgatgggtaactgtgatctttcttccctgttagattgtaagcctccgtctttgtatcccagcccctagcccagtgcctgacacaggaactgtgcacaataaaggtttatggaacagaaacaaagtcaacagaacaaacctagtgttttgggactgcaccagaggaggagttgaactctgaaggcaaaatccacttcctggggccttttcaatcaatcagacaccagccttataaattcttctgaatttggttgtgtttgcttctttaagaagacatgataatcataatgagatgtcacttcacacccacgaggatggctagaatcaaaacagtaacacgtattggaaaggatgtggagaaaatagaaccctcatacattgctggtgggaatccaaaatagtacagccactgtagaaaacagtttggcaaaaaaataagttaaacacagagttaccatatgacccaaaaatgccacccctaggtatatatccaagagacagaaatcaagatatgtccgtacaaaaacttgtacatgcatcttcacagtagcattattcataaaagccaaaaaaatggaaacaactcgaatgtccatcagctgaaaaataaatgaagctgtggtattccaaacaataaaacatttagccctaaaaaatgaagtactgatacatgcaatagttcagatgaaccttgaaaacattaagaagccagtcacaaaggaccacatatcatatgattccatttatatgaaatggctaaaataggcaaattgatgattgatagagacagaaagtaggttgattgccaggggaatgaggagtgactgctaatgggtatggggtttcttttttggatgatgaggaattcgatagcagtgacggtcgtactaccttatgaatatactaagaaacacgaaattgtacactttaaaacagtgaatttcatggtatgctgtttgttagttatatctcaaagaagacatgataactaaataatacatcatctttccaaatattacaggtgagctggctttggggtcttttaaatacaattaacctgccaaagaatgttgaagatgcccctcccatttggacacactgcaagagtgattgatttgcaccgagaccccttccttcagaaggcaaagggaaaccttggcctgggtattagccaggtgttaggcacagttaaaattaacacttgaggtcgggcatggtggctcatgcctgtaatcccagcactttgggaggctgagatggacggatcacgaggtcaggagttcgagaccagcctgactaacatggtgaaaccccgtctctactaaaaatacaaaaaaaaaataatagctgggcatggtagcacggacctgtaattccagctactcacaaggctgaggcaagagaatagcttgaacccaggaggcagaggttgcagtgagctgagatcacaccactgcactccagcctgggcaacagagcaagactccttctcaaaaaaaaaaaaaaaaaaaaaatttaacacttgggatactacagcccattaaaaagtttgaaaatggccaggtgcagtggctcatgcctataatcccagcactctgggaggcccaggcaggtgaatcacctgagatcaggagttcaagaccagcctggccgacatggtgaaaccctgtctctactaaaactacaaaaattagcctggcgtggtggtgcacacctgtagttccagctactcaggaggctgaggcaggagaatcgcttgaacctgagaggcggaggttgcagtgagccaagatcctgccactgcactccagcctgggtgacagagtaagactccatccaaaaaaagaaagtttgaaaaaattgtgttatcacaagcagggtttcatacaaacttggggtagggagggggagggaaagatggagagatgggagagagagggagagggggagagggagggaggcggagggagagagagggagggggagggggagggagggagagggaaagggggagagagggagagagagggagagggagtgagagagagagagagagagggaaagagagagaataccttctgtagaaacacctgagatttacaaccagaagaaacaggttcaactgtaggctcccttacttaatagttaagggaaaaacttcaacatcacaagtttgttgaggatgaagtatcaactgtatgcaggccttaccgtagcagactgaggacccgaaaacacaactccacattagcttagacagcacggcaggtttactgttagctgttactggaagacccagaagagggcagcctcagggttgattccactcagagcctcgaagacatcatcgaagacccagtgtcttcccacgctgccctctgagtgcacctacagcagatttcctcgaggggataaagtggctttgtcagttccatagagtgttacactcaggagagagcctctcataggagctggctcagaacagtgaggaactttctttcctagaaatgcccttccccccaacacacacacacaaacttgccctagagtctgaagatgccacattccactggcacaggcaaaggggatgggggatcacccagatgggcttagcctactcaggcccacccaaccaacttctcgcaataactgtgtgcccttgttagtgttcctgaaactcctggggcacaaattattttgcactgtagcctgtcacatgaggtaatatgagccaatccccagcaggccctcagcatggggtgcagtgcactagtgttgaattacttccccttcccacctcttgacaacttggttccccactcctgagccctgaggcaaacaccagcggaaaactccgtccccaacacacgtgccctgcatggagcagggtctttgctatgtccagttccagaacagcgcagggcacagagcaggccctaggcaaatggagcttggaggagtgccgggtcagtgggacccatgcagacaactgcccctctcatggtccaggctccttgttactgcccagctggtggacccaggatgcagggtgggaggctacagctgttggccaccccagctgactgccactaacgccagaggcgcagctattcagaaagatatatggactgagcctctacccaacatctcttcttgtcttacgagcagggaggaaaagatcacctcacccaactacttacaaagaaattctgaaacatttttaacgacaaatgtgttagcttgttaattgctagaattaccttagaagaaaaggcatgtgagaggagtgaccagggatgacaatttgcctcaacttcccatacctgatatttttgctgaggaggaaagtaatgcgaaggattggggcaggcaggctcagcctctcggcaggacttcctggaggggcctgcatggatgtgcagccacgaggcagtttctctaaatctgcagttcttgacccagagcacctgctccttggcgacatgaaaagtaattcatagaaaacatggcctatcctcacacgattttttttaatcagtgtaatattctacacttccattcactgaaagaaaacagtttataatgcatctttaaggaagtatgcttagatttgccttttaaagctatacatgtaaacctgtcattaaaaaataaatgagtgaagaattagaaatgtatatataatgttctataacagaaagacaaagtaacttacaataaaatacatacttggtaaaatctcagctacaattccaatagaagacacaatgaagacaattataattgcttaaaacaaatttggatcttagaaaatatttgactaatgagtttttaaataattgactttttttttttttgagacagggtctcactctgtcacccagactggattgcagtagctcaatcatggctcactgaagcctcaaccttctgggctcaagtgatcctccagcctcagcctcccaagtagctgctgctataggcacccatcaccaaacccaactaatgtggtttattttttgtagagatggggtttcactatgttacccaggctggtctcaaattcctgagctcaagcaatcctcccaccttggcctccctaagtgctaggattacaagcatgagccactgcacctggctgacattttaaaataaaggttaagtgctatggtctgaatgtttgtgacccccaaaattcctgtgttgaaatctttacccccaaggtgataacactaggagggtggtaagtgagcctgtaagcctttgggaggtgattaagggggaggggcatcctgaaagggattagtgcccttataatagaggcctcagagagctccctcaacctatctaccatgtagaagtcaccatctgtgaaccaggaaacaggcctcaccagacaccaaatctgccggcaccttgatcttggacttgccagcctcctgggcagtgagaagtaaatttctgttgtttataagctaaatcagcatatggtattttgttatagcagcatgaatggactcagacagtaagtacagtcttacatacgtgtgtctatataatcttcatggaaatgaccagtagaaatgcagactgacacgggtgtgattcacgactcaaataccaggagtggcctcctgtggaggatgtgctcttctgaaatgacgaacaattccttataaagctctgaataagatgaagtcaaaatcttcctttggtttacatatagctgcattcctggaaaattcagtatgttaaaattatgtcacaaaaattttttgtggttacctataaaagagtttctaggcttagaaaattataaacatgtttccacctacatgaattgtatcacgtagatttatgtgtagacaggggaccatgcttcagtgtactgggctctcccttacaatgcagggggtctaacatgcctggtccctgccctcaaaatactagacatcccctccccatcactgcaaaacccaagcaccctgcaacccacctctccccacatctccaaattgtccccagggggcactgctggccaaggttgggaatcaccactggggacggagggaaaggctgggttgagctgagctcaggctctcctctctgctgccttcactgcccaaataactgcattccacatcgtcgggatttctgctgagccaagcccaaagttctggaagccccaagtgtcttataagctcattcacaactccaggaaagagaagcagcccatatttcaggcagaggagcaggctgtcatttcctcttagatgacatgccaagtttccagaaaatcgcccccaaaaaatcaatatgggacagatttgctagtgagtccaccaacacccaccatcacaggtacacaaaggcaggtgatcgaagggaggaaaaaaaagatatccatgggaggaatgacagtcttcaagctctgaaaacaagtgggtgtgcttgctgtgggtggggggagatgggggtagtgagaagaaacctttgagctttccccaaaaaaggttatcccttctctcagggataaactttttgaagtcccttagaattttttttaatccaagatctcctttatctatttttgtagaaataacctcaagtcctggaaaaaaatgcctttttagaaaacgatactgtggattcatcagaatttaacgtggcagacttaagcacacaaaataggtgactgacaataaaccagatgatacaattcaaacttttatttggcaataagttcagagtcacataacacataaaatcaacatttaaaataaatagcaaattcacatctagaataaataggtctgcctaatttgcattaattgtgcctgatatcatacaggcacaatctgtcattccacgagataactggaaaagtctccaaagtcagagttcaaacctgcaggactgaaaacacacagaagcactgtcgcaggttgggttccccgaaagcagatactgaggtggagaatggcgtgcaggaaggttcataggacagtgctgtgggctgagccggctgggtacaggcttgtcagggagaggcactgggctgtaatgtggccacaatgaggtctcactgaccccacaaggggctctggagctgggatggccccagagggtttcccaagttggggtgaggaggccagccctttgtaccccatatggagccggtaagggttacaggcaggaagggggtatgatctggggcaggcagggctcttcagcaggggaaactcctcataagggctggaagtaaatggccagccagcagcactcccagctgttaggggagtatgtccttcagtctggaaaggtcatccgggcagctgagctcagcacccagcactagcacaattacaaactaatgcaatgagaggtatattcaacaagtgtctgagcctgatggctcaagtacacacactggccatacatgtaactatgcccaggaagtagctcagagggaatacagtgcacttattacctacagaactttctcctctctgcatcccagctataaggttattcatctgcatgttctcagcaagggaatcttgccattgccgccaacacaatccattagagcaggggctagcaagccacagcctgaggaccaaatacagcccacagcttgtcttggtaaatcaagttgtgctggaacacagccatgaccatggtcattcccacagtagtagtagcaaaagcaaacagcccaaaaagccaaaaatacttcctatctggccttttacaggaaaagtttgctgaccctgcattaagggtacttcattccctaccctttcttgaacgcactagcagtgtcaaaggttagctgaactttgagctaagctcctaaatgacactagtagtgtcaaagattactgttactaaatgacactagtagtgtcaaaggttagctgaactttgagctaagctcctaaggcaaaaaagaaagaaagaaaaacctggtacaaaagaaagtcgatattaagaaggcaaaatgtaggttctctattagttgaacagaacaatcaaggaaccctgtgtctggccaaatttcgtcttagagcattctagacaaggagccccaagtggtctttggcagcaaatgagcaggcagaaaagtggaattcagttccagtatttagcccagtctctgctgcttaaaaggccttttgagaagaggacagaagaaaagccacttagtttgcccaaagctaaattaactaggaccacaagactacttttcaattctcctttgcaataattaagagtgccaatgcattcaaagcaactagtaattgtagtctgtaatatgcccaaatcagtagcaagtggtttatgttacataatattaatgggaatagcagaaaatagtgccgaagggtaaaatgttttaaaaaacagacaggcactatgttagggggaaagtgggagctctaagccaaacaactaaagtatttcaaaagccacgtttcacccgtaaaaacaacactggaaaaagaaaatcagctgtgcaagtcccttccaaagggacctccatgggccttgctggactgtcatatttgtgatggctgctgccctggactcatcattgttcacataattcttagaaaatcagtcaaacaatattaaacagtaatttttaaatgttcaagctatttttgtttgctttacaacacaattttttaaatggctgaaaacagattcatttcccttgtaccaatatgcattcatcaatgtgcacatcagagaacaaaacacccagtgcagtgtgccagatcccagttgagtcatgataggctgggcacggtggctcatgcctgtaatcccagcaccttgggaggccaaggcaggtggattacccaaggtcaggagttcgagaccagcctggccaacatggtgaaaccccgtctctactaaaaatacaaaaaaattagctggatgtggtggtgggcacctgtaatcccagctactcgggaggctgaggcaggagaatcacttgaacccaggaggcggaggttggagtgagccaagatcgtgccattgcactccggcctgggcaaaaagagcaaaactaaatctcaaaaaaaaaaaaaaaaaaaaagagaaaagagtcatgacgaggccaggcatgacagtggctcacacccagaatcccagcactttggaaggctgaggtgggcagaacacttgaggctaggagtttgagaccagcctggccaacatggtgaaaccccatctctattaaaactacaaaacttggccaggcctggtggcatgtaccagtagtcccagctactcgggaggctgaggcacgaaaattgcttgaacctgggaggcaagaggttgcagtgagccgagatcacaccactgcactccagaatgggcaacagagcgagaccttgcctcaaaaaaaaaaaaaaaaagtcatgacagcgacaagttaaaatctgtcctgactgagtatatacaaggattaataataaagtgggatgtgcctccatcgttcacatgggaatgactgtgttcggccccgttaccgccacgacatgggtctacagtctgcaaggtacacagtcagtgagccttggtggcccagatgtcaggcttctgtcacatgggagatctcaacactgccaagctcaatggcccagagactgaaattcttctaactgggaattgattacaaaactcattattcatacccaaaaatgtttttctccttcaaagcttaggtcacctaacgtgaacactcatggaaacaggttttaaaaatagttctacttcattcttgagtaaacaaaacaccctataactggcacctggtaggtaatcaatgaatatctgattagataaaaaccaagaattatttttaagcaacacctacttcctgaatctgcttctccaaagcagaaacttgaagccaagaacaccagcgcattcttttagaaccccgacaccgagcagttctgggcgcaacacacacccattaagtgtcagcctccaatacaccctgatggcgaaaacacctagaagcaagcaaacaataaacaaaatgcctaccctgttccaaaaaaagaacatactactgtgccttactgtgttcataacaaaatgtagaagatggggagaagccttattggatctaaagggtcaccttcaccattatagttaaatacagccaaatatcacaagtacattccaactataacaagcagcattacaaaggatgctatataactcattaagtttctgccatctggcaaggagcccatggaatgccagacttggatttcatcaatagatggttacatacatttatcacaataaaaatgttgaataagcaagcactctccacaagctcccctcatgttcctgccatcctttagatttaagaatatatacaagttaccgcaaaagcttaaaatgagttttagcaatactagattaggctaatctgaacagaagtattgatatagcatatgcaattaaaacagtattagcagccccataactaataacagcagacattcccatagcactcagagagtgcagtaaatatgcactttacattgaaggatactacaaatgcaggtgcaattaaggattcttccctccaacaaaaggaatacatgccacttgcattgcccctagaaagaaatgaaaaaagcaggccaggtgcggtggctcacacctgtaatcccagcaatttgggaggccaaggcgggcagattatctgaggtcgggagttcgagaccagcctgaccaacatggagaaaccccatctctactagaaatacaaaattagctgggtgtggtagtgcatgcctgtaatcccagctacttgggaggctgaggcaggagaatcgcttgaacccgggaggcagaggttgcagtgagctgagattgtgccactgcactccagcctgggcaataagagcaaaactccatctcaacaaaacaaaacagaaggaaatgagaaaagcttggttagctaggtcatatctattccttagcttcaatgtccttcgccctttcccatcttagacatctaaaaaaaaacaaaacaaaacaaaaaaaaaaaaaacaaactacacaaactcccaaatagtcgcacaaacat

SEQ ID NO: 447 - DNA, 55859 bp, Homo sapiens
atgccattgcactccagcctgggcaacaagagtgaaactccgtctcaaaaataaataaataaaatcattggaataattttcttctttaggaagagcagccttgggccaggcatggtggcacatgcctggaatccccgaactttgggcagcccaggtaggtggattgcttgagttcaagagttccagaccagcctggacaacatgatgaaacctcttcttgatcaaatatacagaatttcgactgagcacagtggctgtaagcccagcatgttgggaagctgaggtgggtgaatcatttgaggtcagaccagcctgactaacatggcgaaaccccatctctacaaaaaatacaaaagttagccaggaggtcgtgggcgcctgtggtcccagctactcgggaggctgaggcaggagaatgacgtgaatcccggagtcgtaggttgcagtgagccaagatcgtgccactgcacttcagcctgggcgacacagcaagactgaggttgcagtgagctgtgatcctcaacctcctgggttcaagggattgtcgagcctcagcctcccaagtagctgggattatagacattcgctcccatgcctggctaatttttgtattgcaaaaatgcactccagcctagatgacaggactgcactccagcctggatgacagagcaagactgtgtctcaaaaataaataaataaataaataaatagccaactgtgatcgtgcatgcctgtagtcccagctactcaggaggccaaggcaggaggatcacttgagactgggaggtcatggctacagtgagccatgatctcgcaactgcactccagcctgggcaacagagggagagaaaggaaggaaggagggaaggagggaaggagggaagggaaggagggaaaggaagtcagtcttgtgggacaaggaaggaaggaaggaagtcagtcagtcttgtgggactcagccctgaacctttgggatctgatgctgtccccaggtagggagtgtcagaactaaatcaaaggagaggacacccagctggtctctgctggagaactggttgttggtggggagaaacatacatttttggtgaagtattctgtgttgagtgtgaaagtaggaaaaacaggactgggtatggtggttcatgcctgtcattccaggattttgggaggccaaggcaggcggatcacttgaggtcaggactttgagaccaccctggtgaacatggcaaaaccccatctctactaaaaaaaaatacaaaaattagctgggcgcggtggcaggtgcctgtaataccagctactcgggaggctgaggcaggagaatcacttgaacccgggaggcggaggttgcagtgagctgagattgtgcctttgcactccagcctgggagacagagcaagactctccctcaaaaaaaaaaaaaggccgggcgcagtggctcacgcctataatatcagcactttgggaggccgaggcaggtggatcactgacacccaacaccacgccttctaattttttgcatttttagtagaaacggggtttcaccatgttggccaggcttgtctcgaactcctgtcctctggtgatccacctgccttggcctcccaaagtgctggaattacaggcgtgaacccagcaacttttcccccttttatcataccttaatttgcctccaccacccccagaagctccaagtctctacgccttttcatttatgtatgtatgtatttatttatttatttatttattttattttgagacagggtctccctctatctcccaggctgcagtgcagtggcgtgatcttggcccactgcaacctccacctcccgggttcaagtaatcctcctgtctcagcctcccaagtagctgggattacagggcacaccaccacacctggctaatttttgtatttttagtggagactgggtttcaccctgttgtccaggctagtctcaaactcccgacgtcaggtgatccacccatttcggttcccaaagtgttgagattacagaccgtgagccactgggacggacacccctactcctttcttcttcttcttctttttttttttttttttgagatggagtctccctttgaagcccaggctggagtacaatggtgcgatcttagctcactgcagtttcctcctcccgggttcaagtgattctcctgcctcagcctccggagtagctgggattacaggcacacaccaccacaccagctaatttttgtatttttagcagagatggggtttcaccatgttggccaggctggtctcaaactcctgacctcaggtgatccacccaccttggcctcccaaactgctgggatcacaggcgtgagccactgcaccctacactcttatactcctttctgtagctcaggcagctagatgagcttcaatcatctggcccttcctccagtctcacatttttgtgggactcctgtgcatacataattgaatctggtttttcttctgtcaaactgttttgtgtcaatgtaattcatagcccatccaaagaacctaggagggtggagggaatccattttctctcctccacactggagggccatggagcccaagagttcaagactggcccggtgtacaaagtgagacccagtctctatttaaaaaagatggggagggggccgggcacggtgtctcacgcctgtaattccagcactttgggaggcccaggtgggtggatcacctgaggtcaggagtccgagactagcctggccaaggtggtgagaccgtgtctttactaaaaatacaaaattagcttggtatggtggcaggagcctgtaatcccagctacttggaaggctagggcaggagaatcgcttggtttgggattttctccctgaggcacttgctatctccaggattatgggtctcaggtgaaagaaagacaaagaaggagagagagacagagagggacagggaaagagaatttcagacttatctaacattgacacttaggagaagtagggagaaagaggtgggaaaataaagtggctaggtaaaaatgaacatgtcagtaacaataatagcattaacaataactagtattgccgggtgcagtggctcacgcctctaatcccagcactttgggacgccgaggtgggcgaatcacaaggtcaggagttcaagaccagcctggccaacatggtgaaaccctgtctctactaaaaatacaaaaagttagctagctgggcatagtggtgcatgcctgtaatcccagctactctggaggctgaggcaggagaatcgcttgaacccgggaggcaaaggttgcagtgagtcaagatcaggccactgcactccagcccaagggacagagtgagactctgtctcaaataataataataataataactagtggccaggcacagtggctcacgcctgtaatcccagtgtagcaggacgagccacagacaaaaacctctcagacaccgagttgtagaaggaagggctttattcagctgggagcatcggcaagctactgtcttaaaatccaagctcctcgagtgcacagtttctgtcccttttaagggctcacaacactaaagactgcgcatgaaagggtcatgattgagcaatctaggggatacataacaggggtttcgtgcactgctggtcagagagaaagaatagggcagggagtttcacagtgttcttctatacaatgcctggaatctatggataacatcgggttctaagtcatgagttgatttttatctactaggtttacgccaggcaggcccaggcctggtttcgggtctggttttgggtctggtgcctggcgccgggctacctgcctttggtttcacttccttgtttttttctttttctttttttttttttttgagacagagtcttgctctgtcgctaaggctggagtgcagtggcacaatctcggctcactgcaagctccgcctcctggattcaagcaattctgctgcctcatccttccgagtagctgggattacaggcgcacgccaccatgcccggctaatttttgtatttttaatagagacggggtttcaccatgttggccaggctggtctcaaactcctgaccttgtgatccacccgccttggcctcccaaagtgctgggattacaggcgtgagccaccgtgcccggcctccttgttttttttctaaaacaagtactgagtataaaacaatataaaacaatatgagacggtttctctcttccctcaccagcactttgggaggctgaggcaggtggatcacaaggtcagagtggatagcactttaggaggttgaggtgggaggatcccttgagcccaggagctcaagtccagcctgggcaacatagcaagacccccatttccaattttagtgtatgtgctgccaaagcaaatactctgagaccctgtttctacaaaaaataaaaaaattaaaattagtgcttggaaaaaaaaattagtgcttgaccaggaggcaagcacacctcctcatcctctcatggatgtctgtctgtagaaagtaaatggagacagcttcattttacccaactgctccgttttaggtccgctcctgagcttctgttgttcccagccatgcaaccctgggagccgactcccggctgcagagccttgtcagaagcaggcaatgtacacagagacccaaggcctggtgtagacaggctttcacagacctgggcattttgttgaattgtttttgaattgtggtttcttatcagttcatccgatactctgttctaaccacgtagttcctcttttggatctccaaacccctttgcaggttccatctacccgaaccaaactcacttattccaacagaagtctggtgtttcttgttttttttgtttgtttgtttctttcgttttgttttttgagatgttgtctccctctatcacccaggctggagtgcagtggcgagatctcagctcactgcaacctctgcttcccgggttcaagcaattctcctccctcagcctcctgggtagctgggattacaggtgcctgccgccacacccagctaacttttgtatttttagtagagacgggatttcaccatgttggccaggctagtctcgagctcctgacctcaagtgatccacccatctcagcctcccaaagtgctgggattacagccttaagccaccgcgctcaaccagaagtctgtttaaatccatccttctccccagccacccatgagttatgtgaccttggggttgctacttaacatttcagtctcaatttcctcaatagaacaaaagttagaagaattgtaacaaaagatagttttatttttatttttatttttattttttgagatggagtcttgctctgtcacctaggctggagtgcagtggtgtgatggtggctcactgcaagctccgcctcccggattcacgccattctcctgcctcagcctcccaagtagctgggactacaggcacccgccaccgtgcccagctaatttttttaatttttagtagagacggggtttcaccgtgttagccaggatggtctcgatctcctgacctcgtgatccgcttgcctcggcctcccaaagtgctgggattacaggcgtgagccaccatgcccagcacaaaagataatttcttaatcccatgcatttgagtcttaaaaaaatattctatataattccaaggtcaaagaagaaataacaaagggcatttttaaaaatgctagaactgagtggtggtgaaattgctgttgaaatgtgtttgttgcactgatggaaatttataaatgtaaatatttatattaaaatataaaataatgggccaggcatagtggctcacacctgtaatctcagtactttgggaggccaaggcgggagggccatggagcccaggagttcaagaccggcccggtgtacaaagtgagacccagtctctagttaaaaaagagggggagtgggccaggcacagtgtctcacgcctgtaattccagcactttgggaggccaaagcaggtggatcacccgaggtcaggagtccaagaccagcccggccaaggtggtgaaaccccgtgtctactaaaaatacaaaattagcttggtatggtggcgggagcctataatcccagctagggcaggagaatcacttgaacccgggaggcagaggttgcagtgagccaagatcatgccactgcactccagcctgggcaacaacagagagacttcatctctaaataaataaataaataaataaaagaaaatacaaattttttaaaaaaggtactgtggctgggcgtggtggttcacacctgtaatcccagcactttgggaagccgaggcaggtggatctcagatcaggagttcaagaagagcctggccagcatggtgaaaacctatctgtactaaaaattagcctggcatggtggcaggtgcctgtaggaggctgaggcaagagaattgcttgagccccggaggcagaggttgcagtgagccgagaccacaccactgcactccagcctgggcaacagagcgagagtctgtctcaaaaaggaaacaaaaaaaaaagtacctccaaattatggtagggtgtccatattaagaaggtagaaaaaggtcgggggaagtggatgcctgtaatcccagaactttgggaggctgaggcgggtggatcacctgaggtcaggagttcaagaacagcctggccaaaagggtatggtgaaaccccatctctactagaactacaaaattagccgggcgtggtggtacatgcctgtaatcccagctacacaggagtctgaggcaggagaatcacaggaaaccggcaggcagaggttgcagtgagctgagatcgcgccattgcactccagcctgggcgacaagagcaaaactccatctcaaaaaaaaaaaaaagaaaaaatgaaaaagaatttattgaaatgtgcagtctgaaaactgctcctgcacattttcattcatccttcctattccctccatccctcaattttttttttttttttgagacagagtttcgctcttgttgcccaggctggagtgcaatggcacgatctcagctcactgcaacctctgcctcccaggttccagccattttcctgcctcagcctccagaatagctggaattacaggcatctgccactacgcctggctaattttttgtgtatttttagtagagatgggatttcaccatgttggtcaggctgatctcgaactcctgacctcaggtgatccacccgcctcggcctcccaaagtgctgggattacaggcatgaatcaccacgcccggcccctcattttcttttctttctttctttcttttttgtttgtttgtttttgagacagagtcttgctctgtcacccaggctggagtgcagtggcgcgatctcagctcactgcaagctccgcctcccgggttcacgccattctcctgcctcagcctcccgagtagctgggactacaggcgcccgccaccacgcccggctaattttttgtatttttagtagagacggggtttcaccgtgttagccaggatggtctccatctcctgacctcgtgatccgcccgcctcggcctcccaaagtgctgggattacaggcgtgaggcaccacactgggccccctcactttcttattctttctaggataggcaactgagcgcggcagtgaagagctgggcttccggaagctgacagctgtttgtgatcttcaagacctcagacaggttttctaaatatgccttgccttcattttctcaaggaaagtgaaaaatgggtaggatcatggcaatcactactgtgtagcaatgtttagaggacttaataagtaaacacagggtcaagcatggtggctcacaccggaaatcccagcactttgggaggccgtggtgggaagattgcttaagcccatggggttgagaccagcctgggcaacatagtgagacctccatctctataaaaaatacaaaaatctagtcaggcgtgatggcgtatgcctgtagccttcagtaagctatgattgtgccactgcacaccagcctaggcgacagagtgagaccctgtctcaaaaagaaaaaacgaaaagaaatatagatgtacatatacatatgttggttctaaaacatgaaaaaggctgggcgcggtggttcgtgcctgcaacccaagcactttgggaggccgaggcgggcggatcacgaggtcaagagtttgagaccagcctggccaacatagtgaaaccccatctctactaaaaatacaaaaaaaaggctaggcgcagtggctcatgcctgtaatcctagcactttgggaggccgaggtgagcagattacctgaggttgggagttcaagaccaccctgtccaacatggtgaaaccccatctctactaaaaataagaaaattagccgggtacagtggcacgcgcctgtaatcccagctattcaggaggctgaggcaggagaatcgcttgaactctggaggcggaggttgcagtgagccaagattgcgccactgcactccagcccgggcgacagtgccagactcagtctcagaaaaaaaaaaagcaaaacaaacaaagaaacatgaaaaaaagctataaaacccaacttttttctttttttttttgagacggagtctcactctgtcgcccagggtggagtgcagtggtgcggtctcggctcactgcaacctccgcctcctgggttcaagcaattctctgcttcagcctcccaagtagctgggattacaggcacccgccaccacgcccgactaattttttgtatttttagttgagacggggtttcatcatcttggccaggctggtcttgaagtcctgacctcgtgatccacccgccttggcctcccaaagtgctggaattacaggcgtgagccaccgcgcccggccaaaacccaactttttagtcttatttatatggtgtttttttttttttttttttttttgagatggagccttgctctgtcgcccaggctggagtgcagtggcgcgatctcggctcactgcaagctccgcctcccgggttcacgccattctcctgcctcagcctcccgagtagctgggactacaggtgcccgccaccacgcccggctaattttttgtatttttagtagagacggggtttcaccgtgttagccaggatggtctcgatctcctgacctcgtgatccacctgcctcggcctcccaaagtgctgggattacaggcgtgagccactgtgcccggctatatgtttacaaaattaatactgccagccaggcacggtggctcacgcctgtaatcccagcactttaggaggctgaggctggcagatcacctgaggtcaggagtttgagaccagcctggccagcatggcaaaaccccgtctctattgaaaaaaatacaaaaattaaccaggcgttgtggcgcatgcttgtaatctcagctactcgggaggctgaggcaggggaatcacttgaagccggcaggcggaggctgcggggagccgagatcgtgccgttgcactccagcctggggaacagagcaagactccattaaaaataaaataataataatactgtgaatgtgaaactgatgaacttggtgcttttcatgcgtctcatagttgacgtgtcattgatatttcacttgaaatacggttggatttttattaataatatacctggggtgatgggagaaggtagccaatcacagctgaggcttctaagcggtgattctcagcctcggccgcaatcacaattatctgggactctcgaaagaactccagggtctgggcagtcccagtgtaaccaatcaagcagaatctctaggcgttcgtgctttgaaatgaggctccacataggtaagtttaacaggcagtcaagatggaggaccacaggtggagatcgggaagctcaggtgaaggaccgccccccaacaccccccgcccccaaaagacctctcagtaattccggtggatacaggaagtgctcagcaacgattacgccccgagggccaatcacagggctgcggccgagaaagaagccttaatagagctttctcaacctgcagccctcatctccgccggcgagtagggccaggtgttgggaggtgagtagctctccggcagctctgcaacttcatttctttatttctccattccacagttggtaaaatttctccttttatttcatatattttttttctgagacggagtctcgctctgtcgcccaggctggagtgcagtggcgcgatctctgctcactgcaagctccgcctcccgggttcacgccattctcctgcctcagcctcccgagtagctgggactacaggcgcccgccaccacgcccggctaattttttgtatttttagtaggtggctcacgcctgtaatcccagcactttaggaggctgaggctggcagatcacctgaggtcgggagtttgagaccagcctggccagcatggcaaaaccccgtctctattgaaaaaaatacaaaaattaaccaggcgttgtggcgcatgcttgtaatctcagctactcgggaggctgaggcaggggaatcacttgaagccggcaggcggaggctgcggggagccgagatcgtgccgttgcactccagcctggggaacagagcaagactccattaaaaataaaataataataatactgtgaatgtgaaactgatgaacttggtgcttttcatgcgtctcatagttgacgtgtcattgatatttcacttgaaatacggttggatttttattaataatatacctggggtgatgggagaaggtagccaatcacagctgaggcttctaagcggtgattctcagcctcggccgcaatcacagttatctgggactctcgaaagaactccagggtctgggcagtcccagtgtaaccaatcaagcagaatctctaggcgttcgtgctttgaaatgaggctccacataggtaagtttaacaggcagtcaagatggaggaccacaggtggagatccggaagctcaggtgaaggaccgccccccaacaccccccgcccccaaaagacctctcagtaattccggtggatacaggaagtgctcagcaacgattacgccccgagggccaatcacagggctgcggccgagagagaagccttattagagctttctcaacctgcagccctcatctccgccggcgagtagggccaggtgttgggaggtgagtagctctccggcagctctgcaacttcatttctttatttctccattccacagttggtaaaatttctccttttatttcatatattttttttctgagacggagtctcgctctgtcgcccaggctggagtgcggtggcgcgatctcggctcactgcaagctccgcctcccgggttcaggccattctcctgcctcagcctcccgagtagctgagactacaggcacctgccactatgcccagctaatttttttgtatttttagtagagacggggtttcaccatgttggccaggctggtctcagtccgcctcggcctcccaaggtgccgggattacaggcgtgagccaccgcgcccagccttttttttttttttttttttttttttcttctcttttttgagggtcttactctgtttcccaggctggagcgctgtggcaggatctcggctcactgaacccttgacctctcaggttcaagcagtcctcacgcctcagcctttgaagtagctgggaccgtgggagggtgccaccacatctgttctggctaataatattattattaccactgtttgcagagactcactagatgtagggtcttaatatgttgccgaagctggtctctaactcctgggctcaagcgatcttcctgcctcagactcccaaaattctgggattataggcaggtgccaccgcgcccggcctaaatcttttcttctgttagaaattaagtggttctgcctgtctcagtggctcacgcctgtaatcgcagcgctttgggaggccgaggcgggaggatcacctgaggtcgggagttcgagaccagcctgaccaacatgtagaaaccccatctctactaaaaatataaaattaggtgggcgtggtagcgcatacttgtaatcctagctactcaggaggctgaggcaggagaatcacttgaacccgggaagcggaggttgcggggagcctagatcataccattgctctccagcctgcgcagcaagagagaaactgtctcaaaaaataaaataaaataaaattcagtggttctgactggggaaagagtagcagatgcttagatctagagagactctagttaaggttggctcataagaggatagttgtgtgtgcttttatttctgttctcttgggggatttaggatagagctatagagagctccaaaaaaaaaaatatattggaacaggtcagatgctgtggttgctgtgtgtggagtcctgggcagtgctaaggttttgtgtctaatgagtcctcttaacaagaaggtattgttttttattcactgaggtgagggagcctcttagcatcattctagtccagcttccggacctgagtcttatgcaaatacctatgccagttgccattctcacgctattcacagctatcatataaagaggtgttataccctttctgtaaagtttttgttgctactgctatttttttttttttttttttgagacaaagtctagctctgtttcccaggctggagtacagtggcgctatctcagctcactgcaacttccacctcccaggttcaagcaattctcgtgcctcagccttctaagtagctgggactacagccgcctgtcaccaacctggctaattttcgtatttttagtcgatatagggtttcactatgttggccaggctggtctcaagctccagacctcaggtgatcctcccaccttggactcccaaagtgctgtgattacaggcgtgagccaccgcacccggccctgttgtttttaaaatagagacagggtcttaagttgccaggctggtctggaacttctggactggagtgatcacccacctgagcttcccaaagtgcggggattgcaagcgtcagccaccacccccagtgttgtgtttttgtttgttttaccaggctggagtgcagtggtgcgatcacagctcactgcagccttaacttccctggctcaggtgatcctcccacctcagcctcctcagtagctgggactacaggtgcatgccactatgcccagcacaattttttttttttttgtatttttttgtagagacagggttttgccatgttgcccaggctggtctcaaactccaagcaatcctcccaccttggcttcccaaagtgtttggggttccaggtgtgagccatggccccccggccagcttcagtaaagtaaaagccacacacctgtgtcctgagaccaggctccaccactaagttatctttaagccttttttttttttgagacagtttcactcttgtcgccccaggctggagtgcagtggcgccatgtcagctcaccacaacctctgcctcccactcccaggttcaagcgattctcctgcctcagcctcccaagtagctggaactacaggcacctgccaccacgcccggctaattttttgtatttttagtagagacggggtttcactgtgttagccaggatggtctcgatctcctgacctcacgatccgcccgcctcggcctcccaaagtgctgggattgcaggcgtgagccaccgcgcccggctgtgtgtttgcattatcatattcagcccagttttcacgaagtttcttgtctcctgggtgatccacgtagctccccacttccttatctgatctatgcttgtcctttcattgttgtgttactactttgctataatgagagagtgttttcgctttataggttaacttttagaacctgagcagcccctcagggaaaaccctgacagtagctggttattttgcaattagaaaaactagctgggcactgaggcaggtgaatcacgaggtcaggagttcgagaccagcctggccaacttggtgaaaccccccatctctactaaaaatacaaaaaaattagctgggcacagtggtgaatgcctgtaatcccagctacttgggaggctgaggcaggagaattgcttgaatccgggaggcagaggttgtagtgagccgagattgcagcactgcactccagccagggtgacaaagtgagactccgtctcaaaaaaaaaaaaaaaaaaaatacaaaaagtagctgagcgtggtggtgggtgcccataatcccagctagtcgggaggctgaggcaggagaactgtttgaacctgggaggcagaggttgcagtgagctgagatcgtactactgtactccagcctgggctgcagagtgaaactatctcaaaaataagtaaataaaagtaaaatgagttgaggtcttgctctgttgcccagatgggagtgcagtggcacaatcaaggctcactgcagtttcagtctcccaggctcaagcaatcctcccactgcagcctcctgagtagctgggactacaggcatgtaccaccacccactgctaacttatttttcatggagatgggggtctcactatgttgcccaggctgggagtttgttcttgaagaagcagggtagatggtgagtgtccttgttcgtggcacagcaggaactggcatttgagacaggagtgctaatcaccatccctctccactcctcccttgattgtcatcacagctcccacgtgggacaagatggtgtcttcggcgcagatgggcttcaacctgcaggctctcctggagcagctcagccaggatgagttgagcaagttcaagtatctgatcacgaccttctccctggcacacgagctccagaagatcccccacaaggaggtagacaaggctgatgggaagcaactggtagaaatcctcaccacccattgtgacagctactgggtggagatggcgagcctccaggtctttgaaaagatgcaccgaatggatctgtctgagagagcaaaggatgaagtcagaggtgagtggaaatcggtccacactgtgtcctaggaggaagcaggcgtcctctccaggactttagaaattcagaaggccaggcgcgctggctcacgcctgtcgtcccagccctttgggaggctgaggcggttggaccacctgagggtcaggagtttgagaccagcctgaccaacatggtgatgaaacagcatctctactaaaaatacaaaaatttgctggacgtggtggcagacacctgtaatcccagctactccgggaggctgaggcaggagaatcacttaaatctaggaggcgggggttgctatgagccgagatcacgccattgcaccccagcctgggcaacaagagcaaaattctgtctcaaaaaaaaaaagaaatggcattgaggcttggagagggactgcttgttctgaatgcaggtgctggatcttcataaaccctggtgtctgtcctggtccttattttctacctacttctttttttttttttttttgtccttttatttttttattttttattttattattattattttttttattatactttaagttttagggtacatgtgcacattgtgcaggttagttacatatgtatacatgtgccatgctggtgcgctgcacccactaactcgtcatctagcattaggtatatctcccaatgctatccctcccccctccccccaccccaccacagtccccagagtgtgatgttccccttcctgtgtccatgtgatctcattgttcaattcccacctatgagtgagaatatgcggtgtttggttttttgttcttgtgatagtttactgagaatgatggtttccaatttcatccatgtccctacaaaggacatgaactcatcattttttatggctgcattgtattccatggtatatatgtgccacattttcttaatccagtctatcattgttggacatttgggttggttccaagtctttgctattgtgaataatgctgcaataaacatacgtgtgcatgtgtctttatagcagcatgatttatagtcatttgggtatatacccagtaatgggatggctgggtcaaatggtatttctagttctagatccctgaggaatccccacaccgacttccacaatggttgaactagtttacagtcccaccaacagtgtgaaagtgttcctatttctccacatcctctccagcacctgttgtttcctgactttttaatgatcgccattctaactggtgtgagatgatatctcatagtggttttgatttgcatttctctgatggccagtgatgatgagcattttttcatgtgttttttggctgcataaatgtcttcttttgagaagtgtctgttcatgtcgttcgcccactttttgatggggttgtttgtttttttcttgtaaattattttctacctatttctatcgctttcaggtatcgtacagttggcctaacatatctgtggatttaaccaatcctagatcaaaaataatgggggcaaagacaattaaaaataacaatacaataaaatgcacatgaactatggttatttaactcttcttgagagaggatctcactctgtcacccaggctggaatttagcagcacgatctcggctcactgcaacctccgcctcccgggttcaagcgattctcctgcctcagcctcccgagtagccgggattacaagcatgtcccaccatgcctggctgattttttttttttttttttttgtattctaaatagagatggggtttcaccatgttagccaggatagtctcgatgtcgtgacctcatgatctgcccgcctcggcctcccaaagtgttgggattacaggcgtgagccaccgcacccagccagcaagtgcatttagaactactctactttctaccccataacttttttttttgtttgtttgagacaagtctcactctgtcacccaggatggagtgcagcagcacaatctcagcttattgcaactcccgccccctgggttcaagtgtttctcctgcatcagcctcttgaatagctaggattatacaggcacctgccactgtgcctggctaaattttgtattttaatagagatggggtttcactatgttggccaggctggtcttgaactcctgaccacgtgatcaacccgcctcagcctcccaatgtgctggaattacaggtgtgagccgccatgcccagctacacttttttttgaaacggggtctcgttttcttgctcaggctggagtacaatggggcaatcacagctcactgcagccttgacctcccagacttgagcaatcctaccactatggcctcccaccacacctcgctcattcttgtatatatatatatttttgtagagatagggtttcaccatgttgcccaggctggtctcgaacttctgtgggctcaaccgatcctcctgccttggcttcccacagtcctgggatcagaaacatgagccacagtgcctggccagtgcagctttatttacagtaaccaagatatagagtcagtctaagtgaccatcagtggatgaataaaaaatgtgcccgttgggtaccctgcctactgcctgggttatgagattgttgggaccccaagccttaaaaaggaaacatggtaggccgggcacagtggctcacgcctgtaatcacagcactttgggaggccaaggcgggtggatcacttgaggccaggagtttgagaccagtcaggccaatgtggtgaaaccctgtctctactaaaaatataaaaaaatcagccgggcgtggtggcacactcctgtagtcccagctacttgggaggctgaggcaggaggattgcttgaaccagagagtcagaggttgcagtgagccaagatcgtgccactgcgctccagcctgggtgacagcaagactccatctcaaaaaaaaaaaacaaacaaacatggtattaattacacaatggaatactcctcaaccttaaggaactcctatctttttatttaaaaattgccagttttatttcagctagagatcactttttagcataatgtttcctgtctttaacaatgggtgagggtttttttttttttttttttggtttggtttggattttggttttgcttttgagtcgaagtttcactcttgtctcccaggctagagtgcaatggcgcgatctcggctcactgtgacctcctcctcccaggtttaagtgattctcctgcctcagcctccagagtagctgggattacaggcgcctaccaccatgcccgctaatttttgtattttagtagagacagggttttaccatgttgaccagactggtctcgaactcccgacctcaggtgatctgcccacctcagcctcccagagtgctgggattacaggtgtgagcaaccatgcccggccaagggtttttaactttagctgacctccggaggttacaagtttgaaaacggcaggaggaaacccagagagttgtaaacttacgaaggtctgggctctgaaaaagatacaaattttctttccatgccaatagcgctcacacagacatggtgaatgttcctgaaacccgccggactttctgtaagaagtgtggcaagcaccacccccacaaagtgacacaaggcaaggattcttggtatgcccaggggaagtagtgttatgacaggaagcagagtggctatggtgggcagactaagccgattttccggaaaaaggctaaaactacaaagaagattgtgctaaggcttgagtgccttgagcccaactgcagatctaagaatgctggctattaaaagatacaagcagccaagcgcggtggctcacgcctgtaatcccaacactttgggaggccgaggtgggcggatcacaaggtcaggagtctgagaccagcctggccaaaatggtgaaaccccatctctactaaaaatacaaaacttagctgggcatggtggtgtatgcctatagtcccagctactcaggaagctgaggcaggagaatcgcttgaacctgggaggcagaggttgcagtgagccaagattgtgccactccagcctgggcaacagagtgacactctgtctcaaaaaaaaaagatgcaagcattttgaactggaaggagataagagaaaggaacaagtgatccagttctaagtgtcatcttttcttttatgaaggcaataaaatcttgagcttatggtaaaatgcaaaattttccccccttctcctttttcagaagcagctttgaaatcctttaataaaaggaagcctctatcattaggtaagttacctcatttataacttttattcttcatgtgagatctggggactcgggcctttgttttaaggagaatgtgctgagcactaagaatgcaaagaaatgccggacttagcatccctgctcccagggcggagctggtctcgcaggtgcgtagcagtaagacctgggaagctgaaacacgatcgcgtttgttggaaatctataaatacatacaaagcggggaagggtaagcttggcctttgaatctggataaggtagagacttttcttttttgagatggaggcttgctctgtcacctaggctgaagtgcagtggtacgacctcggctgactgcaacctctacctcctgggttcaagcagttctcctgcctcagcctctagaatagctgggattacaggtacctgccaccaggcccggctaattttttgtggtgtttgtagagatggggtttcaccatgatggccaggctggtcttgaactcctgacctcaagtgatctgcccacctcagcgtcccaaaatgctgggattatgggcatgagccaccaccacacccggttttgtttttttttttttttttttttttttttttttttttttgaaacagggcttcactctgtcacttaggctggagtggtgcaatcatggttcactgcagccttgacctcccaagctctggtgatcctcctgcctcagcctcctgagtagctgggaccacaggcacttgccaccatgcctggctaatttttttcactttttgtagagacagggtcttgctatgttgcccaggctggcctcgaattactaaactcaatcagtcctcctgcctcaccctcccaaactgctggggtacaggtgtgagccatgacacctggcccttaccagctacttatatcctgaagattattattattttttttttttttgagatagagtctctctctgttgcccaggctggagtgcagtggcgtgatctcggctcactgcaagctccgcctcccgggttcatgccattctcctgcctcagcctcccgagtagctgggactacaggcgcccaccaccacgcctggctaatttttttgtgtttttagtagagacggggtttcaccgtgttagccaggatggtctcgatctcctgaccttgtgatccgcccgcctcggcctcccaaagtgctgggattacaggcgtgagccaccgcgcccggcccctgaagattgtgttttgagatggggtcttgctgtgttgctccggcttgattgcagtggcacagtcatagctcattgcagcctcaaccttccaggctccagagatcctcttacctcagcctcctgagtagctgggactacaggtgtgcactgccacacctgactaatatttgtatttttggtagggacagtttcactatgttgccagatatggtgtcaaactcctggtctcaagtgatcctcccaccttggcctcccaaagtgctgggattacagacatgattcaccacacctggccatgaagactttttttttttggacaaagtctcactctgttgcccaggatggaatgcagtggcatgatctcagctcactgcaacctctgacctccgcctcccggttcaagtgattctcttgcctcagcctcccgagtagctgggattataggtgtctgccaccaagcccagctaatttttgtaattttagtagagatggggtttcaccatgttggccaggctggtcttgaactcctgacctcgtgatccacgtgcctcagcctcccaaagtgttgggattacaggtgtgagtcactgcgcctggtctcatgaagaccttttttgagacagagtcttgctctgtcacccaggctggagtgcagtggtacaatctcactgcagcctccgcctcccaggttcaagtgattctcctgccttagcctcccaagtagctgggattacaggcgcctaccaccacgtctggctaatttttgtatttttagtagagacagggtttcaccatgttggccaggctggtctcaaactgctgacctcaaatgaactgtctgcctcagcctcacaaagtactgggattacaggcatgagccacctcacctggtggtgaagactctaaaggctcttctcagatcagcctttgtcctgaatttcacatgcccgtgtccagttccctccccagcatcttttcaggagttccatggactcacctcttcattatccagggttaagctgcagatattgttattaggattccaccttgttctctctctttttttttttttttttgatacggagtctcgcttgctcttttgccaggctgaagtgcagtggagcgatcttggctcactgcaatctccgcctcctgggttcaagcaattcccttgcctcagcctcgcaagtagctgggacttacaggtaacacaccaccatgcccggctaattttttgttttagtagagacggggcttcaccatgttggccgggatggtctcgatctcctgacctcatgatccgcctgccttggcctcccaaagtgttgggttacaggcatgagccaccatgcccggctgattccaccttgttcttacattctttcccagttcattttaaatttatctacctcatcagaaactagggggttaggcctggcaggcagatcacctgaggttgggagttcgagaccagcctgaccaacgtagagaaaccctgtctgtactaaaaatacaaaattagccaggtatggtggcacattcctgtaatcccagctactccggaggccgaggcaggagaatcacttgaacccaggaggcggaggttgcagtgagccgacatcacaccattgcattccagcctgggcaacaagagcaaaactacatctcaaaaaaaaagaaaaactaggcagttaatcctcaaagcctttccagtggccttatgcgtgagtagtttgtgtgtgtgtgtgtgtgtgtgtgtgtgtgtgtgtgtctttcacaccatgtgttctgaactacttaggaattctcaccagaaaggcacataaacctgggatcatggcctaatgtactttcacttttacatccagtaccttatcaacgtcctttttagtacctaatctaggcttcactactgagactcaggggtccaacttgagccatcttggagtcccactgccagcacagcaacaggcctgtaatgccgccctttttctccagggataacacggaaagaacgaccacctctagacgtggacgaaatgctggagcgcttcaaaacagaagcacaaggtgggtgtcaggacctccaatgttggagtcagctgaggaagccccccgttcttgctgctatctcctgttcctttgaagaaccccatctctctccaatcttttcctccactattcttaatgtgcccactgtctcctggagaatgccaacctcccttccgtaagaatagagggaagaacgaacgttgcagagaattagaactcagtttgtagaaagttaggagcacagcgcagagagtttttgtttttgtttttgttttgagacagtttctctgttggccaggttggaatgcaatggcgcgatctcggctcactgtaacctccacctcccaggttcaagcgattctcctgattctcctgactcagcctcctgagtagctgggattataggcacctgccaccacacccagctaatttttttttttttttttgagacgaagtcttgttcttgtcacccaggctggagtatagtggcaccatccctgttcactgcaacctccgcctcccagattcaagtgattgtcctgtctcagcctcctgagtagctgggactacaggtgcatgccaccacgcccagctaatttttttttgtacttttagtagagacaggtttcaccatctcattcagggtggtctcaaactcctgacctcaagagatctgctccacccacccccaagtctcccgaagtgctgggattacaggcgagagccaccgtacccggccttctttaaattatttaaaagttgacaggtggccaggtgtggtggctctcacctataatctcccagcactttgggaggctgaggcgggtggatcaagagatcgagaccatcctggccaacatggtgaaacccaactctactaaaaacacaaaaattagccgggtgtggtggcacccgcctgtagtcccagctactcaggaggctgaggcaggagaatcgcttgaacccgggaggtggaggttgcagtgagccaagattgtgccactgcactccagcctggcaacagtgcgagactccatcttaaaaaaaaaaaaaaaaaattgacaggcataaatgtatttatggtacattgctcagacaactttaatataaacaacttacagagaaaattgagtcttttgggtaggtgacttgcctgagctgactttgtgataggttttttctgttttttttgtttttgaaatagagtctcactctgtcatgcaggctggagtgcagtggccccatcttggctcactgcaatctctgcctcctgggttcaaggggtcttcctgccacagcctccccaggtgctgggactataggtgcccaccactatgcctggctaacttttgtgtttttagtacagatggggtttcaacagggtagccaggttggtctagaactcctgacctcaagtgatccacctacctcggtctcctaaagtgctgggattacagctgtgaaccaccgcacctagcctgtgatcagtttcagatcagccttgcttactccacattccctcttatcttcctggtagcatttttgttttttcttgagaaagagttttgcccttgtcgcccaggctagagtgcaatggtgtgatctcggctcgccacaacctccacctcccaggttcaagtgattctgcctcagcctcccgagtagctgggatcataggcgcccaccaccacatctggctaatttttgcatttgttagttttatttttagtagacagggtttcaccatgttgggcaggctggtcttgaactcctgacctcaggtgatccacccacttcggcctcccaaagtgctgggattacaggcatgagccaccgtacctagcccacattgacttttgatacagcaagtatttcttgctatggctctgtataatagaggtgagtaacttggttgaaggaattgtttgccctgttcatctctctagacacggccaatgtcattcctggcacacaatctttttttttcttgagatggagtctcactctgttgcccagactggagtgcagtggtgcaatcttggcccactgcaacctctgctacccaggttcaagcgattctcctgcctcagcctcccaaatagctgggagtacaggtgtgtgccaccacgcccagctaattttttgtattttagtagagacagggtttcaccgtgttagtcaggatggtctggatctcctaacctcgtgatccgtccgcctcagcctcccaaagtgctgggatgacaggcgtgagccactgtgcccagcctagcacacaatcttgacaaagaatttcggtgcgacttggggtactgtggtgcctgctctatcatcatgcttcagcaggaaatgtgggtgaatagtgcctggtggcatggcaggtaaagaaatgttttgttttgtttttttttttgagacagtcttgctctgtcacccaagctggagtgcagtggcgcaatctcggctcactgcaagctccatctcccgggttcacgccattctgcctcagcctccccagtagctgggactacaggcgcccgccacacgcccggctaattttttgtatttgtagtagagacagggtttcaccgtgttagccaggatggtctcgatctcctgaccttatgatccacccgccttggcctcccaaagtgctgggattacaggcgtgagccaccgcgcccagccgcgggtaaagaaatttatgaagacaatcgtaggtaaaggaaggcagatttattggagaaagtaggaaaagacattggcagagagaccccagcgggcaggttgtcatgagtagctcactgccaggagaccaaagcttcctgcagattttatagaatagggcttgggctgattgataatgtcaacagggggtttaacttgcggtcttctttcagcagaagtgtttgataaactgaggcgtttcatggcaaacagggagtttgtgagctctgtgtgtgatctggccaggaaggccaaacatcttgggccgtatctcctggaccataaaagcagacctggcccagtgcagtggttcatgcctgcaatcccagcactttgggaggctgaggtgggtggatcatctgaggtcagcagttttagactggcctggccaacatggcgaaaccccatctctactaaaaatacaaaaattagcctagacgcagtggcacatgcctgtaattccagttacttgggaagctgaggcaggagaatcgcttgaacccgggaggcggaggttgcagtgagctgagattgcgccactgcactccagcctgggcaacagagtgagactgtctcaaacagacctatagctgacctgtttcctcttgtttgtatgccctgaaccatggaggaaagcttatttatttattttattgagatggagtcttgctctgttgcccagggtggagtgcagtagtgcgatctcttactacaacctccatctcccaggttcaagcaattctcgagcctcttggcctcccaagtagctgagattacaggcatgcgccaccacgcctggctaatttttgcatttttagtagagatggggtttctgtgttggccaggctggtctcgaactcctgagctcaagtgatccaccccacctcagcctcccaaagttctgggattataggcatgagccaccacacctggccggaaaacacatttgtagcttatttgctttatctgatcccgtgccccccctcccccccgccccatcagcctgcctccttttctctaattgggactccacaggaaatacacctgattttgtgtcaatctcacatgagtttgtattttgtagcgtttacagaaacgaaaggaaatgtcatctgcctgggtaaagaagtctttaaaggaaaaaagccaggtctgtaccatatcttcctgcagggagcttgggatcagatttctctttataaacttgaagtcctcttaactttcctatgtaacacaaagcatttatttatgtatgtatgtatcgagacggagttttgctcttgttgcccaggctggagtgccgtggcgtgatctcgactcactgcaacctccgcctcccaggttcaagcaattctcctgcctcagcctcccgagtagctgggattacaggcatgcgccaccatgactggctaattttttatttttagtagagacaaggtttcttcatgttggtcaggctggtgttgaactcccaatgtcaggtgatctgcctgcctcgacctcccaaagggctgggattacaggcatgagccactgtgcccggccaacacaaggcattttgttattttggttttccctatgggtaactgattgcatcctctctcccttccctcctcaccaatgataaagacaaagacaataggtgcaggtatatattgaagacgaagttccgggagatgtggaagagctggcctggagatagcaaagaggtccaggttatggctgagagatacaagatgctgatcccattcagcaaccccagggtgcttcccgggcccttctcatacacggtggtgctgtatggtcctgcaggccttgggaaaaccacgctggcccagaaactaatgctagactgggcagaggacaacctcatccacaaattcaaatatgcgttctacctcagctgcagggagctcagccgcctgggcccgtgcagttttgcagagctggtcttcagggactggcctgaattgcaggatgacattccacacatcctagcccaagcacggaaaatcttgttcgtgattgacggctttgatgagctgggagccgcacctggggcgctgatcgaggacatctgcggggactgggagaagaagaagccggtgcccgtcctcctggggagtttgctgaacagggtgatgttacccaaggccgccctgctggtcaccacgcggcccagggccctgagggacctccggatcctggcggaggagccgatctacataagggtggagggcttcctggaggaggacaggagggcctatttcctgagacactttggagacgaggaccaagccatgcgtgcctttgagctaatgaggagcaacgcggccctgttccagctgggctcggcccccgcggtgtgctggatcgtgtgcacgactctgaagctgcagatggagaagggggaggacccggtccccacctgcctcacccgcacggggctgttcctgcgtttcctctgcagccggttcccgcagggcgcacagctgcggggcgcgctgcggacgctgagcctcctggccgcgcagggcctgtgggcgcagacgtccgtgcttcaccgagaggatctggaaaggctcggggtgcaggagtccgacctccgtctgttcctggacggagacatcctccgccaggacagagtctccaaaggctgctactccttcatccacctcagcttccagcagtttctcactgccctgttctacaccctggagaaggaggaggaagaggatagggacggccacacctgggacattggggacgtacagaagctgctttccggagtagaaagactcaggaaccccgacctgatccaagcaggctactactcctttggcctcgctaacgagaagagagccaaggagttggaggccacttttggctgccggatgtcaccggacatcaaacaggaattgctgcgatgcgacataagttgtaagggtggacattcaacggtgacagacctgcaggagctcctcggctgtctgtacgagtctcaggaggaggagctggtgaaggaggtgatggctcagttcaaagaaatatccctgcacttaaatgcagtagacgttgtgccatcttcattctgcgtcaagcactgtcgaaacctgcagaaaatgtcactgcaggtaataaaggagaatctcccggagaatgtcactgcgtctgaatcagacgccgaggttgagaggtgagaaccgtttcactctaccagtcgttccatctttagcctcatcccatgcccccttaggaagaggccagagcctcctatgcactgtggcttagggtcaggaattccctcttgttggactctttgtttgtttttgttttgagatggagtcttgctctgtcgctcaggctggagcgcagtggcgcgatcttggctccctgcaacctccgcctcccgggttcaagtgattcttctgcctcagcctcctgagtagctgggactacaggcgcctgccaccttgcccggctaatttttatattttcattagagacgggatctcagcatgttggccagtctggtcttgaactccgcctgacctcaggtgatccacctgcctcagcctccaaagtgggattacaggcatgattcaccatgcccggcccaaatatatttttttaagacagggtcttgctgtgttgctcaggctggagtacagtggtgaaatcagctcactgcatcctcaaacttctgggttcaagtgatgttcctgagtacctgggatgacaggtattaagtgtgcaccatcatgtccagctaacttaagtgggggtttttttttgtgtttttttttttttttttttttttggaaagacaaaatctcactatgttgtccaggctggtcttgaactcccaaagcactgagattacaggcatgagttaccacacgccctgcctgaatatttcttattgatatgtatagatatgtatattcccaatctttttttttttttttgagacggagtttcactctttttcccaggtcggagtgaagtggctcgatctcggctcactgcaacctccgccccaccaggttcaatgattctcctgcctcagcctcatgagtagctgggattacagccacccacgaccatgcccagctaatttttgtacttttagtagagacggggtttcaccatgttggccaggcaggtctcgaactcccgacctcaggtgatccacccgcctcagcctcacaaagtgctaggattataggcgtgagtcaccgtgcccggtctatattctctatcttttatcaatgatgtgcttagcattttaacttatttttaccctctattggatttttgtctaagaagaataggttctttctcctgtgatgcttcttgggtgttgagttgtctgatggtggtgctaataagtgattacatggtccagctttcaattgtactcatttgtcaggggtatatgcccagagaaaccctaaatacttcagccgtgatggacacacatttggtgtaaccctttcttctcttccctatagatcccaggatgatcagcacatgcttcctttctggacggacctttgttccatatttggatcaaataaggatctgatgggtctagcaatcaatgatagctttctcagtgcctccctagtaaggatcctgtgtgaacaaatagcctctgacacctgtcatctccagagagtggtgtaagtagaaactaattcatgaactcaaatccttagggtatgaaaatggtacaatgttaacatcggagcaatattcagattcctgtactagactcttaagtgctcgagacacagggaattgagagagtcctgtccttaaatttattttgtgggataatcgtataaagtaatttctaggggctgggcatggtggttcacacttgtaattccaacacttcgggaggccgaggcagacagatcacttgaggtcaggagttcgagaccagcctggccaacgtgacaaaaccctgcctctactaaaaatacaaaaattatccaggcgtggtggcaggcacctgtaatatcagctacttgggaggctgaggcaggagaattacttgaacccaggaggcggaggttgcagtgaaccaagatcctgccactggactccagtctgagtgacagagcgagactgcgtctcaaaaaaaaaaaaaaaaaaaaagaaaaagaaaaaaagggccgggcacaatggctcacgcctgtagtcccagcactttgggggcccaaggtggggggatcacttgaggtcaggagttcaagaccagcctggccaagatggtgcaagaccctgtctctacgaaaaatacaaaaatttgccaggtgtcgtggcaggtgcctataatcccagctactccggatgctgagggtaggagtcgcttgaatccgggaggcagagtttgctttgcagtgagccgagatcgcgccactgcactccagcctgggcaacagagtgagactccatctcaaagaaaaaaaaaatctgtaaagatggacaaaaatttaaacatggaaaaaatagttcctaaagtttaaatatatcgagcccctggtttccatttaagtacgatacaggtgtacacactaaagatttcactttcgttctcttttccctaggttcaaaaacatttccccagctgatgctcatcggaacctctgcctagctcttcgaggtcacaagactgtaacgtatctgacccttcaaggcaatgaccaggatgatatgtttcccgcattgtgtgaggtcttgagacatccagaatgtaacctgcgatatctcgggtatatctcttaatcattaaaatccttcatcatacaaacataagctaccacaagcttatgtggcaattttgtgtaaataagaaaaagttcgttattctgactagaaacagtactaagggcagatgacccaggatgcagcatgggctgaacttgagtttctacttgccttgaacagtaaacaccctggacaaccatacgtgaggaccctgaatccaaagaaactcccagaatctttatcatctttttttttttttttatgaagtcttgctctgttgcccaggccaaagtgcaatggcacgatcttggctcactgcaacctctgtctcctgggttcaagtaattctgctgcctcagcctcccaagttgctgggattacaggcacccgccaccacgcccggctaatttttgtgcatttagtggagctggtttcgccacattgccaggctggtctcgaactcatgacctcaggtgacctgccctcctcaggctcccaaagtgctgggattataggcatgagccaccatgcccagccagagtccttatgttttggttttggttttggttttttctttttcttttttctttttgagatggagtctcgctctgtcacccaggctggagtgcgttggtatgatctcaggtcactgcagcctccacctcccaggttcaagtgattctcctgcctcagcctcctgagtagctgggattacaggtgcacaccaccacacctggttaatttttgtattattagtagagatggagttttaccacattggccaggctggtctcgaactcatgacctcaggtgatctacccccccacccccaccccaccccgccgtcggcctcccaaagtgaggcatgagccaccgtgcccagcccagaatctttatcttctatcagagatcattcactcatggttcatgcttctcctgtatgatgattcagaataccagctattgacatttttcaagcaagaacccttcaggaacatcaagttgccccttttctgttagtcctctggtttgagagctctccccttgggaagctgtccagtggctgcccaggcgatgagaacctacatgcatcatggggttccatgaagcctcacttggccacactggtgtagtaggtggtcattggcctcaaattattgccctgggccaggcgcagtggctcacgcctgggaggccgaggtgggtggatcacttgaggtcaggagttcaagaccggcctggtcaacatggtgaaactctgtctctactaataatacaaaaattagctgggcatgttggcgcacgcctgtagtcccagctactcaggaggctgaggcaggagcatcatttgaacctgagaggcggaggttgcagtgagctgagatcacaccaccgcactccagtctgggcaacagtgtgagactgtctcaaaaaaaaaaaaaaaaatcttggctgggtgcggtagctcatgcctgtaatcccagcactttgggaggccaaggcaggtggatcacaaggtcaggagttcaagaccagcctggccaacatggtgaaaccccacgtctactaaaaatacaaaaacattagctgggcatggtggcgcgtgcctgtaatcccagctactcatggaggctgatgcaagagaattgcttgaacctaggaggcagaggtagcagtgagccaagatcacgccattgcactccagcctgggcaacagagcaaaactccatctcgaggacagaaaaaaaattgattgctctggctctactgatacaatcttaggctgcttaatgggatcttagttgaataggatgctgtacatcttacaggtattggaaggttgaatgaaaccaagcccatgcattcaatagtggctgctatcattactaaccgttgcaattaccctcttttctttttgcctgagaataatgggatgcagggtgagggggaatattgggtgaattaaagatttgggtcactaatttctttctttttttctcaagatatagtcttgctctgtctcctaggctggagtgcagtgccacaatcttggttcactgcaacctctgcctcccgggttcaagtgattcttctccgtcaacctcccaagtagctgggattacaggcacccacctgtatttttgtatttctagtattttgtatttctagtagagacagggttacgccatgctggtggccagggtggtctcaaactcctgacctcgggcaatccaccacacccagctaatttttggtatatttagtagagccggggtttcaccgtgttggctgggctggtctcgaactcctgacctcaagtgacatccatcttccaaaatgctgggattacagccatgtgccaccacgcccagctaattcttgtatttttaggagaaatggggtttcatcatgttgttccggctggtcttaaactcctggcctcatgatccacctgccttggcctgccaaagtcctgggattacaggcatgagccactgtgcccagccactcatttcttatgaatttattctaacacattttccggatgaacagggcaccttgaaacataggttagtgggctgggtatggtggctcctgcctgtaatcccagtactttgggaggcctaggctggtgtatcgcttgaagtcaggagttttttgttttgagacggagtcttgctctgtcgcccaggctagagtgcagtggagtgatctcggcttactgcaacctccgcctcctgggttcaagtgattctcttgcctcagcctcctgagtagctgggactacaggcacgtgtcgccacgcccatctaacttttgtatgtttagtagagccggggtttcaccatgttggccaggatggtctcaaactcctgacctcctgatctgcccacctcggcctcccaaagtgctgggattacaggcatgagccattgccccggccaaagttaggagtttgagaccagcctggccaacatggtaaaaccccatctctactaaaaaatacaaaaattagccaggcaagatggcatttgcctgtaatcccagctactcaggaggctgaggcgggagaatctcttgaatctgggaggcagaggttgctgtgagctgagatcgcgccactacactccagccagggcgacagagcataaataactccctttcaaaaaaccaaacaatgaaacataggttagcggagtctgcatccaacattagagtcagattgactaagttctgtatttccagctgattcctgggcgatgttggtgccactggtctgaccaccctttgacaactgctgctccagataattcaagtcggggtataacacaaccagtgagatgtaaaccaaagacgattccacggttagattctcaagaatgacttgttctgccgggcgcggtggctcacgcctgtcatcccagcactctgggaggccgaggtgggcagatcacctgagattgggagtttgagaccagcctgaccaacatggagagacccccacctctactgaaaatacaaaattagctgggcatgttggtgcatggtgcatgcctgcagtcccagctactcgggaggctgaggcaggagaatcacttgaacccaggaggcggaggttgctgtgagccgagattgcgccacctgggcaacaagagtgagactcagtctcaaaaaaaaaaaaaaaatgacgtggtcctatttctcccacaggttggtgtcttgttccgctaccactcagcagtgggctgatctctccttggcccttgaagtcaaccagtccctgacgtgcgtaaacctctccgacaatgagcttctggatgagggtgctaagttgctgtacacaactttgagacaccccaagtgctttctgcagaggttgtcgtaagtctctcctctcttacagagcagctgtgctttcgatctggggccacagacgagcaatggtcatgcctgacttggctgtatggaacctctcgctgatgtgaacacctgttcccatgtttagatccaggccgatggcctgtgaattttgttcttctctcattcctattccttcataggatcaccagtgcatgatagaaggtggggagttcacaagaaggggcttttggatgctggcacttgtggagctagccgggaaggttgaagttggacctgtcaaccgtgttgccatttgtgattcttttgtaggttggaaaactgtcaccttacagaagccaattgcaaggaccttgctgctgtgttggttgtcagccgggagctgacacacctgtgcttggccaagaaccccattgggaatacaggggtgaagtttctgtgtgagggcttgaggtaccccgagtgtaaactgcagaccttggtgtaagtccgtgctggctgcctgtgtgcgtgggtgtatatgcacacgccccccacctccgggtttgagtagggtggttatgagaacacttaattcctctaaaagttccaagcatgatgctaatgacaactggtaagacctgggtagatgatggtaggaaaaaagtataagtagtagtagagtagtagtaatattctatagggatttggggaatgtagctggttttcgggttttttttttcctctttatgtatgtatgtattttagagatgggatctcgccgtgttgcctaggctggtctcaaactcctgagctcaagagatctgcctgccttggcctcccaaagtgctagaattacaggcatgagccatgtcaccccatgctgtgttttctcttaatctgtgttcttagaactataactgtaacataaattgcatgcaattggttgtaaatggaattcatttacttattttttaatgaatgatttgcaaatcaggtagtcttctgggccagtgtacgctcagactcccaatggaagctattggaagctacatgctcaatgtgatcctccttttaatactaaaatcacaggacacgtggcctggcatagtggctcacgcctataatcccatcaccttgggaggccgaagcaaggcagatcccttgagggcaggagttcaagaccagcctgcccaacatggtgaaacattgtctctctactaaaaatacaaaaattagtcacgcatggtgggacatgcctgtaatcccagttactcaggaggctaaggcaggagaatcacttgaacttcggaggtggaggttgcagtgagctgagatggcaccactgaagtccagtctggccaatagagcaagactctctcaaaaaaaaaaaattataggacaaatctttagaaaggaattggggcctggcatggtggctcatgcctgtaatctcagcactttaggaggcgggcagaacacctgaggtcaggagtttgagaccagcctggctgatgcagtgaaaccctgtctctactaaaaatacaaaaattagctaggcgtggtggtatggtcctgtaatcccagctacttgggaggctgaggcaggagaatcgcttgaagtcgggaggttgcagtgagccgagatcgtgccagcctgggtgacagaacgagattgtctcaaaaaaaaaaaaaaattgtatctgcactgatggtttctgttcagagattcgattttatgttaacatctctggtattttttttttttttttttaagatggagttttactcttgcccacgctggcaatggcatgatctaggctcactgcaacctccggcttcaaggaggttgattctcctgcctcagcctcctgagtagctgggattacaggcactcaccaccacgccgggctaatttttatatttttagtagagatgggatttcaccatgttggccaggttggtctcgaactgacctcatgatccgcccgcctcagccttccaaagtgctaggatttacaggcatgagccactgcgtccagccatacatatctctggtattctttgtctctaacatcacctccaacagttaggaactgtcctcttcctatgaagtaactaatctaggatatgtacctggcatctgaaaactacccacttaaatttaatgacatattcagttcatggctggagacgatgagtagaaggaaaggattcttcccacacccactatatctaggccctgaaacattaaaaaagaagtcccacaagcagtgagatgtcaccgactcactaactgtatcttcaaatgaatgtctagtttttttggttgtgtgtgtgtgtggtgtgtggtgtgtgtggtatttttttgggggggggggggttttcttttttttttttttttggttttttttttttgatagtcttgctctgtcgcccaggctggaatgcagtggctccatctcagctcactgcaacctccacctcctgagttcaggtgtgattctcctgcctcagcctcccagggattaaggtgcatgccaccacgcccagctaacttctttatttttagtagagacgagttttcaccatgttggtcaagctggtctcgaattcctgacctcaggtgatccacccacctcagcctcccaaagtgctgggattacaggtgtgagccaccgtgccggccccctcaattcaactttttgatccatgcccctattttgctaagttgtcaacttccctttagtcttatgtgggttttcctccattacagtcatggaagtttctagaaggccgggtagggtctttgagaggccgaggcaggtggatcatgaggtcaggagttcaagaccagcctggccaacatggtgaaaccctgtctttactaaaaatacaaaaattagccaggcgtggtgtcggagcctgtaatcccagcttacttgggagggtgaggcagagaattgcttgaacctgggaggcggaagttgcagtgagctgagattgtgccactgtactccagcctgggtgtcagagcgagactgtctcaaaaaaaaaaaaaaaaaagtttctatacattcataaagtttcaagatttgggggtgtgttttcacttctccatcgtcatggactccaatctgccatctatttccaaggcccttccaggtcctgtgtccctcagctagtggtatgcttcacttgggacccagagatacatgggcattatagttcaaattataattaagtttagaactctattgagacagaagaaagaaaacagagctaaggtgaaatatctctgataatctgtgttggttaatatctaggatcctagtaccagatatgttggagtgtgagctggtgtcttctgcctgtaagacactacctctctagcaactgaatttagcaaatacaatcgtaatcccagcatgttagggaggccagggtgggcagatcatctgaggtcgggagttcaagaccagcctggccaacatggggaaaccctgtctctactaaaaatacaaaacttagctgggtgtggtggcacgcgcatgtgtgtacacacacacacccccctgtaatcccagctactcggaaggctggggcacaagaatcgcgtgaaaccaggaggcggaggttgaagtgagccaccgtgccagctgagaatcctttttacttctccaacttctgttggccacctgcattccttggcttgtggcccttcctccaacttcggcagagcatcttcaaacgttgccctggctcccttatcacgtcacctcctgctggctttgactctcagctccctcttatgaggatccctgtgattgctggacctacccaaataaaccaggatataaaccatcttaagatgctcagtcacctctacgaggtcccttttgctcgcaggtgccaggagttgggacttggacatctttaggggaggccattcttctgtccaccacaccaccccatgattccatttccatgtcaccactgtctctaagtgtgtctaacccacggctcaagagtcaaaggtgcatcacagcagtgagaactcacaggttcgggtttgctttcttcctgtggttgatttctaggctttggaactgcgacataactagcgatggctgctgcgatctcacaaagcttctccaagaaaaatcaagcctgttgtgtttggatctggggctgaatcacataggagttaagggaatgaagttcctgtgtgaggctttgaggaaaccactgtgcaacttgagatgtctgtggtgagttaacttataagttcaacttcctatacttacaccttactgaatctgtggctagtgtaaaataatcagtgaagccgacttcccaagttatataattgagaggacctttatagagtcgatcgagcatttactaggatggttaaaggaataagttctagtctatgtctaagtttttgtttttttttttcttgaagttttgctcttgtcacataggctggagtgcagtggcgtgatcttggctcactgcaacctccgcctcccaggttcaagcaattctcttgcttcagcttcccgagtagctgggattacaggcgcccgccaccatgcccagctaattcttgtatttttagtagagacagggtttcgccatgttgaaggttcatctcaaactcctgacctcaggtgatccgcccatctcggcctcccaaagtgctgggattacaggcgtgagccactgcgccaggccctatgtctaagttctagtctgtgtcatgcaaagaacacctgtgaaattttaaggatacagtgcctcaagccattcagccaaaagccactgcccagcaccccacattcagagaggtgggaattgggccaggcacagtggctcatacctgtaatcccagcacttcgggaggccgaagcgggcggatcacttaaggtcaggagctcaagaccagcctggccaacttgaaactccatctctactaaaatataaaaattagccgagcatagtagtgggtgcctcttttttttttttttttttttttgagatagtttcactcttgttgcccaggctgtagtgtaatggcgcgatctcagctcactgcaacctccacctcctgggttcaagtgattctcctgccttagcctcccacatagctgcaaataaacaggcatgtgccaccatgcctggctaattttgtatttttagtatagacggggtttctccatgttggtcaggctggtctcgacctccggacctcaggtgagagccaccgtgcccagccagtaggtgcctttaatcccagctacttgggaggctgaggcaggagaatcacttgaaccctggaggcagaggttgcagtgagctgagatcctgtcactacactccatcctgggctacaagagcaagactccatctcaggaaaaaataaaaaagaggtaggaattagatatcgtgccagaaaatgctggctctatcagcaggtgagtggtctcaacttggctatcttacaaataccttgtgagttagctacaatcagatgcacttgaacctggaatcctatctgggaggcaatcttaaaagaatttgactcgggatgggcaaggtggctcatgcctgtaatcctggcattttgggagtccaaggcaggtagattgcttgaggccaagaatttaaaaacagcctggccaacacaatgaagccctgtctctactgaaagtacaaaaatccgctgagcatggctgtgtacctctgctcccagttactcaggaggctgaggtgggaggatcacttgagcctgggaggaagaagttacagcgaattgagatcacgtcacctcactccagcctgggtgacagtgagatcctgtctcaaaaaaaaaaaaaaaacaaaaaaaacaaaggcgcctttttaatcactcactgacacgtgtagaggagcaaaaagtttgagttgctggttggcccaggaggtcaaggctgcagtgagccaagatggcgttaccacactccagcctgggcaaccgagtgagaccgtgtttcaaaaaataaagtggcagggtgcagtggctcatgcctgtaattccagcactttgggaggccgaggcaggtggatcacctaaggtcaggagttcgtagaccagcctgtctctactaaagagacaggtgaaaccctgtctctctaaaaccacaaaaatcaggcaggcatggtggcacatagctataatctcatctacttggaggcacgagaactgcttgaatccaggaggcagaggctacagtgagccgagatcatgccacagcactccagccctggcgagagagcaagactgtctcaaagaataacttcaaagatggaagttatttaacctctctgctcaaaagcctcagtgcttccctatgtcaatccaggtaaaatcctatattgacgatggcttcagggtcttctgtgagctggccactgcttacctatgacctcatcttgacaatcctccctgtctcactcatgcccgctgcctggatgttctattttacgtgtcagtcacatgtatcttcagggcctctgcacaagctatttctctgcctggagaactcccccccgagctctatgactcggtctcttcaccccctcacctccaaccattgtagccagaacccccagttattccctgtaccccttgcccttcagaacccctcatcgcctccatattttcctgttagcagatgagccctgagggcggagacgttttgtttgttttttgagaccggagtctcactctgtcacccaggctggagtgcaatggcgcgatctcggctcactgcaacctccgcctcctgggttcaagcgattctcctgccccagcctcctgagtagctgggattacaggtgcctgtcaccacgcccagctaacttctgtatatttagtagagacacggttttaccatgttaggttggtcttgaactccttgacctcaggtgatccatccacctcggcctcccaaagtgctgggattacaggcgtgaaccaccgtgcccggcctgagacttctgttggtcatgcagatccccaacacacgagggtgggcttggcttgccggagggcatcgatcagcactggctgcattaacgtgttgatttctgtgtttccccaggttgtggggatgttccatccctccgttcagttgtgaagacctctgctctgccctcagctgcaaccagagcctcgtcactctggacctgggtcagaatcccttggggtctagtggagtgaagatgctgtttgaaaccttgacatgttccagtggcaccctccggacactcaggtatgatccatttacttccccatcaggctttctccagagtggtaggtttaggggaagcataatgacatggacctgctgtaggagactgatctggtagctggattacaggttcccgccatcacacccagccaatttctgtatttcacttggagaaacggggtttcaccatgttggtcaggctggtctcaaactcctgacctcaggtgatccgcccgcctcggcctcccaaagtgctgggattacaggcgtgagcaaccgcacccggccaccttttttttttttttcctttgaggcaagaactcactatgttccccaggctggagtccagcagcacaatgatggctcgctgcaggctcgctccagctcctgggctcaagcaatcctgcctcagttcctgagtaggtaggtttataagcatgaaccattgcacccagccacggctgccgtctacctgctcatgatagccatttgtcactgggctgtgttttgtttgttgcattttgtcagggttttggggttttgttttgttttttctttctttttttttttttttttctgagatggagtctcactctgttgcccaggctggggtgcagtggttgctaactgcaacctccacctcccaggttccagctattctcatgcttcagcctcccaagtagctgggattacaggcatgcaccaccacacctaggtaatttttgtatttttagtagagacagggttttgccatgttggccagggtggtctcaaactcctgacctccgtgatttgcccacctcagcatcccaaagtgctgggattacaggcatgagccaccgcacccggcctgagttgtattttgataccatggcatcaaagaaccaagaagccccttcctaggaatgtgggaacttcagaaattctcacaagcaatatactctactgctggcttaaaataatctttatgtagaagaaacatagattacttgtttatttaacatgaaactcagcctaagatactttgtaagtcaaaagacatatggacactaagggtttttttaagctttaagtttgtttgtttgtttatttattatttattttggagacagttttactcttttttttggggtgcatcttttttcttttttttttttttttttcctttttttttttttttttttttattgatcattcttgggtgtttctcacagagggggatttggcagggtcataggacaatagtggagggaaggtcagcagataaacaagtgaacaaaggtctctggttttcctaggcagaggaccctgcggccttccgcagcgtttgtgtccctgggtacttgagattagggagtggtgatgactcttaacgagcgtgctgccttcaggatctgtttaacaaagcatatcttgcaccgcccttaatccgtttaactctgagtggacacagcacatgtttcagagagcacggggttgggggtaaggtcacagatcaacaggatcccaaggcagaagaatttttcttagtacagaacaaaatggggggctgacccccccacctccctcccggacagggcggctggccggttagaggggctcctcacttcccattaggggcggccgggcagaggcgcccctcacctcccggacagggcggctggctgggcggggggctgacccccccacctccccgcccggccagagttttactcttgttgtccagcctggagcgcaatggcgctatctcggcttactgcaacctccgcctcccgggttcaagaggttctcctccctcagcctcccaagtagctgggactacaggcatgtgccaccacacctggctaatcttgtatttttaatagagacagggtttctccatattggtcaggctggtctcgaactcctgacttcaggtgacccgcctgcctcagcctcccaaagtgctaagattacaggcgtgagccaccatgcctggcctgcatctcctctgtttaactggtactccggggtccactgagtagaagttgccaaagtgggtgatagagcgggtaagcaggtattagagctatagcccagctgtactcagcaattccattttctgtgtatgataatcaacaagcatctcaaactgcacaatggctatataccattacaaggttaacctgatgttatgtttttctctatcagatcaacatggttgagaataagaggaatgaaaaaaaggattaaaaagagaaatgaaagtctttaatattacattttattatttacttcatttattttttagacaaaaatctcactctattgctcaggctggagtgcaggggcccgatctcagctcactgtaacctccgcctcccaggttcaagtgattctcctgtgtcagcttcctgagtagctgggattatagggatgcaccatcacacccaactaacttttatatttttagtagagatggactttcaccatcttgcctaggctggtctcaaactcctgacctcaagtgatctgcccacctcactctcccaaagtgctggcattacaggcatgacccaccacatctggcctcattttatatttaaaaataaaaaataagcaaatcaagccaggtacagtttaggcaacatggtaaaaccccaactctactaaaaatacaaaaattagctgagcatggtggcaggtgcctgtagtcccagctactcgggaggcagaggataggatggcttgaacccaagaggcacaggttgcagtgagctgagatggtaccactgcactccagcttgggcaacagagagactgtctttttttttttttttttttttttttttttttttttttttgagatcgcccaggctggagtacagtggcacgatctcggctcactgcaagctccgcctcccgggttcacaccattctcctgcctcagcctcctgagtagctgggactacaggcgtccgccaccacgcccggctaattttttgtatttttttagtagagacagggtttcaccgtgttagccaggatggtcttgatctgctgacctcgtgatccacccgcctcagcctcctaaagtgctgggaattacaggcgtgagccatcacgccccacctgagactgtcttttaaaaaaaaaaaaaaaaaatcaatgtggaacactcctttgccacctagaataatcaggaaaggtgacccatgccctgtgcctccttaacagactttcaggtacttgggaatttgaaacaaatctccttgatgcacaaagtaaccttttcttcccccattgtaccccaggttgaaaatcgatgactttaatgatgaactcaataagctgctggaagaaatagaagaaaaaaacccacaactgattattgatactgagaaacatcatccctgggcagaaaggccttcttctcatgacttcatgatctgaatccccccgagtcattcattctccatgaagtcatcgattttccaggtgttggtgaactgcctgtgactcctctcctccccggcccctacccctcagggataatgagttcattgctgggctagatgttttagccatgattctgcctctgttttatacctgcacacatccttatctttgttacatatgaaatatctgtatcacgggtatattgagagaaataaaggtgagagcattcacaaatgaagctgttacttaataatgggctttgacaagttagagaaaagatatcttactgggtagaacctggggggtgggggaagtgacagtgtttaattgcattgatttctattgccttgtcaatctttgccttgccttggtatttcctttcttttttcttttctttttttttttttttttttttagactgagtttcactctgttgcccacgctggagtacactggcacgatctcagcttactacaacctggcaggttcaagcgattctcctgtctcagcctcctgagtagctgggattacaagcatcccccaccacacccggctaaatttttttgtatttttaatagagatgaggtttcaccatgttggccagtctggtctcaaactcctgacctcaagtgatccacccacctcagcctcccagagtgctgggattacaggcatgagccactgtacccggcttttttttttttctttttctttttcctcaagcatgagtgttgctctgttgcccaggctggaatacagcagcatgatgatagctcactgcagcctcaagctcccaggttcaagcgatcctccagcctcagcctcctcagtagctgggactacaggtgcacaccaccaaaccaggccaatttttgtgggattttttttgaagacagggtctcactatgttgcccaggctgatctcaaactcccaggcgcaagtaatattcctgcctcagcctcccaaagtgctaggattacaggtgtgaaccactgtgcctagcctgtcttgttacttgttgacctgcgtggatcactgcctgctgagtattacttgccagaggatttctcctaccaatctacaatattttaggtgcttcggtgtagctcatatatgaccatgtcattgctctgattttgctttttaaaaattctaacttaaaatagaatctcggccaggcacggtggctcacacctgtaatcccagcacttcgggaggctgaggtgggtggatcacgaagtcaggagttggagaccaacctggccaacgtggtgaaaccccgtctctactaaaaatataaaaaattagccaggcatggtggcacatgcctgtaatcccagctacttgggaggctgaggcaggagaattgcttaaacccaggaggtggatgttgcactgtgctgaagactgcactactgcattccagcttgggcaacagagtgactccttctccaaaaaaaaacaaaatctcatggtatgcatagtttttcactatagagtctccattatttccttgtgatacagaattccaaattcaacaaagcagcagtgcaagctctacgctgtaaaaccacaaacaaaacgaactgtactataaagacaacactagttggcaaagttgcttctcatggggagactttgttgctgtctgtgtttactggatgagcaaacaaatggacggtaagggggaaaaagaacagtacaaatttttattaaacactaatcatgtttttttttgtttgttttgagacagtttcttcttgttgcccaggctggagtgcaatggcacgattttggctcactgcaacctccgcctccccgggttcaagcgattctcttgcctcgacctactgagtagctgggattataggcatgtgccaccaagcctggctaattttgaatttttagcagagacggggtttttccatgttggtcaggctggtctcgaactcccgacctcaggtgatccaccagccttggtctcccaaagtgctgggattacaggtataagtcaccgcacctggcaacatttttttcttttttttttttttttttttttttttttttggtggcagaatcttgctctttcacccaggctggaatgcaatggcacgatctcgggtcactgcagcctccacctccccagtttaagcagttctcccatctcagcctcccatgtagctgggaccacaggtgtgcaccactgcacccaggtaatttttgcatttttggtagagatagggttttgccacgttgtccagactggtcttgaactcctgagctcaggtgatctgcccaccttggcctccccaaatgctgggattataggcatgagccaccacacctggtcaaaagtagttttaatatttaaatttaaaactaaaaaagttaatctctcttcctactttcatttcttcatcaggggctattggtttattcccaccgactagatccaagttctctgatactacctttaaaccactccatcactttccagttccactgcatacagtgtgggcttctgaggtttcctggttcaaggtgtccttgttcaatgcggcatgggtcattccctgagcatttttttttttttttgacagtctcgctccattgcccggtttggagtgcagtggtgtgacctcggcttactgcagcctctgcctcccaagttcaagcaattctgcctcaggctcccggataatttttgcatttttagtagagacagggtttcaccgcgctggccaggctggtctcgaacccctaacctcaagcgatctgcctgcctcggtctcccaaagtgctgggattacagacataagctaccgtgcccggcctccagagcatctttattctcagtttcagcgggaagaagggggaaggttggtaaaaagagaggcacaaagtttaaaaaggacattgcgtgaagaaactaaaggtttctccttctccacactattgacatttgggatcggatcactactcgttgggaaacgtcctgtacatttccagggtgttcggcaccatccctagcctctaccccctagataccagctcacatcctcacagttaacagtgatcaaaaatgtctctgggcagtagaaaatatttcctgaaatgcaaagttttcttaggttgagaaccattgtaatctagccccatctttagagaagaaattgagtaacggatctacatccattgaggaactatcgacaccccaggggcccatgaaatgtaaactcgcactcacaattaaccatctttctccaacgtgtgtatttcatgtagccacactctcagatgcccacccccatgacctacaagtcctaaacagggaaacctgtggcacatgggttcatgtgtgtctgaatctatacgttcagagatgaacaagtactgctctccctatacctgtgaccactcgcctccgcccatcactgaattctgaaaatgtggcctcaggctcacagcagcattagcacttgcttgctctggatctcatcacattgatgatcaagaacaaagtattcactgggttctctgctaaggatacaaaaaaaaccattccacaattccacggccatgtttgcacccaggaaccacgagggctgggttagcccagatggtgggcttgggaaatgttcctggagcaaaaaaaagagccagaagtcatgagagcctgaccccctcccccaacgcgcacacacacacaccactctctacctccaagcctcattttcaggcttctcaaagctaaggtcactcccatgagctaagccgcgcttttctcaatcctcagctcttccacaagaataggaagaactctctcctgttcaagatcctgtggctcagctgcagctctggaagaaagaccccggtgagggtcttgcttttcacaatccccaatcccagaccacatcctgtgccccaaaacaacttccatggtaaccacatccttcaggaagtgaagtcaggcaggaagtcaagtcagaagacggaatgggctgggcatggtggatcgcacctgtaatcccagcactttgggaggcagaggcaggtggatcacatgaggtcaggagtttgagaccagcctggccaacatggtgaaaccctgtctctactaaaaataccaaaagtagccaggcttggtggtgcatgcctgtaatcccagctactctggaggctgaggcaggagaatcgcttaaacccggaaggcggaggttgcaatgagccgagatcgcaccattgcactccagcccgggggacagaaaaaaaaatgtagctgagcatggtagtgcacgtctgtgatctcagctacttgggagtctgaggcaggagaatcacttgaacccaggcggtggaggttgcagtgagccaagattgtaatagtccaatgtgttcaccttgcccactgcctagacagagctgattcgtcaagacagggaatcgcaatagagaataattcatgcagagctggctctacgagagaccagagttttattattattcaaatcagtgtctcccagcattcaggaagcgtttttaaggataacttggtgggtgggtgggaagccagtgagccaggagtgctgtttggtcagggatgaaatcgtgggagccaaagctatcttcttgcactcagttcctgagtggaggccaaaagataagatgggccagtttattgatatgggtggtgccagctgatccatcaagtacagggtctgcaagttaaacgctgatcttagaagcagtttagggagggtcacaatcttgtagcctccagctgcatgactcctaagtcataatttctaatctcgtggctaatgttcgtcctacagggccaatctagtccccaggcaacaaagaggtgtgctttggaaaagggctatcatctttgtttaaactataagtttctcccaaagttcagcctatgcccaggaatgaaaaaggacagcttggaggttagaagcaaaatggagtcagttaaatctctttcactgtctcagtcataattttggaaaggtggtttcaagctggcacaactgcactccaccctaggagacagagcgagaccctgtcaaaaaaaaaaaaaaaaaacaagaagtgaagtcaagataggaggtaaattcggaagacaggaagtggtggtagaagacaagaagtgaagtcatacaggaagtaaagtcagaagacaggaagtgaagtaagaagacaggaagtggttgtagaagacaggaagtgaggtcatacaggaagtaaaatcagaagacaggaagtgacgtcaaaccaggatttgcagtcggaggcaggcaagaagtgaaatcagaagacgggaagtggctgaggggaacgtcttttctctctcctgctcagcccgaagtgaacaggtagcatcaggtgtgccatttcagtgactgggcacagcccaggcacccacatctctctgcagcgcctattcttggaacaccagagacctctacactattttctgttgcttttttccttcattttcagagatgagatcctggattgaatgactactatggaaagtgattgaccaaggtaagtcacaactatcttgttctttaattttggtgttgtttgttatgacttgttagccgtctagcactcatagctttgcatttccactctgcattacttgtatttttattattttgtgatattcgtaataatttattataaaactgtgttatttttggatatttttaagttaaaatgcgattttttaactaagtggcagtatgcaaagcaagtggttcagaactctcccccattaataagtcttctctcctgaaagaaacaattttgagacttcctgttcttaattctgtttaacagcatacttctaaaagaaaaagtgtatactgttattatttattgtgttacaaaaatatacacgcacctttcatgcacgtccgtgtgaagagaccaccaaacaggctttgtgtgagcaataaagcttttaatcacctgggtgcaggtgggctgagtctgacaagagagtcagcgaagggggataggggtggggccgttttataggatgtgggtaggtaaaggaaaattacagtcaaaggggggttgttctctggcgggcagagtcggggtcataaggtgctcagtaggggagcttttgagccaggatgagccaggagaaggaatttcacaagacaatgtcatcagttaaggcaggaacaggccattttcgcttcttttgtggtggaatgtcatcagttaaggcacgaaccggccatctggatgtgtacgtgcaggtcacaggggatatgatggcttagcttgggctcagaggcctgacattcctgtcttcttatattaataagaaaaataaaatgaaataggggtaaagtgttgggacagcaaaaatttttgggggtggtatggagagataatgggtgatgtttctcaaggctgctttgagcaggattaggggcggcgtgggaacctaaagtgggagcgattaagctgaaggaagattttgtggtaaggggtgacattgtgggattgttaaaagaaacatttgtcatttagaattattggtgatggcctggatacagttttgtatgaattgaaaaactaaagggaataaggaaaggagaaaaacaggtattaaaggtctaagaattgggacgactcaggacatctaattagaaagtgcctaaggaggttcagcatagccttgccagcaaagattatttatttattttaagagttaacagtggcggtatggggatagtaccaggagataccagctgtgctggcttggagaaacagtgtaaactggcagtgtaaacaagagcagggcatgtgtgagtagttgagaacggtgaataggagtatgactagacagaagatagtagggatgacaagttttttggggcacaatctaagttggtctggtgtctggaatgagactggggcctaataaaaaggagtgtctacacaggagcttaaatgggctgtatcttgtagcattccaaggacaggcctgaattctggaagcgaaaatggtaaaagtattgtccagtcctttttaagttggtggctgagcttggtgaggtgtgtttttaatagaccattagtctgtcactgaatactaagagcctgaaaaaatgcttggctgatttgactaataaaggctggtctgttagcagactgtatagaggtgggaaggctgaactgaggaattttgtctgacagaagggaatgacaaggctaaactgaagaattatgtctgacagaagggaagaaatgactgcggtggccttctcagaccctgtaggaaaggactgtacttacccagtgaaagtgtctacctagactaagaggtattttagttatcttactcggggcatgttgagtaaagctaatttgccagtcctgggcgggggcaaatccttgagcttgatgtgtagggaagggagggggcctgaataatccatgaggagtagtagaatagctgatgcaacactgagaagtgatttctttgaggatagatttccacaatggaaaggaaatgagaggttctaagaggctggctagtggcttgtaccatagcatagcctgcctttgctggtgtgtggcgattaggcctggtggaaccgccatcaataaactaagtgtgatcagggtgagaaacagggaagaaggaaatgtggggaaatggggtgaacgtcaggtggatcagagagatgcagtcatgggggtcaggtgtggtatctggaataatgtgggaggccagattgaagtccgggccaggaacaatggtaattgtgggacttaacaaagagtgagtacagctgaaggagccagggagcagaaagtatatgcatcaggtgtgagtaagaaaatagattttggaaattatgagagctgtagagagtgagttgagcatagtttgtgattttgagggcctctaaaagtattaaagcagcggcagccacagcacgcagatatgagggctaggctaaaacagtaaggtcaagttgtttggacagaaaggctacagggtgtggtcctggctcttgtgtaagagttctgaccgcgctaaccatgcctaggaaggaaaggagttgttgttttgtagaaggtgctggggcttgagagatcagtcagacacgatcagcagggagagcacgtgtgtttttatgagaattatgccgagataggtaacagatgaggatgaactttgggcttgactgaagtaatgggggctgtctgtgaaaccttgcagcagtacagcccaggtaatttgctgagcctaatgggtgtcagggtcagtccaagtgaaagcgaagagaggctgggacgaggggtgcaggggaatagtgaaaaaagcatctttaagatcaagcatggaatagtgagttgtggaggaaggtattgaggacaaaagagtgtaggggttgggcaccacagggtgcataggcaaaacaatttgataaggcgcagatcctgaactaatctgtaagacttttccggtttttggacaggtaaaatgggggaattgtaaggagagtttataggttttagaagcccatgctatagcaggcgagtgataacaggctttaatccttttaaagtgtgctgtgggatgggatattggcattgagcagggtaagggtgattaggttttaatgggatggtaacgggtatgtgatcagttgccagggaaggagtagagatgtcccatacttgtgggttaaggtgggggaataggagaggaagacgcgaaggaggctttgggttgaggagaagggtggcaatgagatgcggctgtagtccaggaatagtcagggaagcagataatttggttaaaatatctcggcctaataagggaactgggcaggtggggataactaaaaaagagtgcataaaagagtgttgtccaagttggcaccagagtgggggagttttcaggggtttagaagcctggccgtcaatacccacaacagttatggaggcaagagaaacaggcccttgaaaagaaggtaatgtggagtgggtagcctccgtattgactaaggcgacggacttaccttccaccgtgagtgttacccgaagctcggcatccgtgatggtctacagagcttccgaggcgattgggcagcatcagtcttcagccgctaagccgagaaggagtcagagagccttgggccagagttccaggggctctgggagtggctgccaggtgagttgaacagtccgatttccagtggggtcccgcacagatgggacacggcttaggaggaatcctgggctgcaggcattccttggcctggtggtcagatttctggcacttgtagcaagctcctgggggaggaggttctggaggaacgcctggccgctgcggttcagttcccttcttgtgtgctggagatgtggctggggtttgtctcacagtggaggcaaggaattgcaacttttttctattattgtacaccttgaaggcgaggttaattaaatcctgttgtggggtttgagggccggaatttaatttttggagttttatttaatgtcgggagcagattgggtaataaaatgtgtattaagaataagacggccttttgacttttaagggtctagggctgtaaagcttctcagggttgctggcgaacgagccatgaattgggctggatttttatatttgatgaaaaagagcctaaacactatctgatttgggataaagaaaaaggagcattaaccttgactatgcctttagctccagccacctttctaagagtaaattgctgggcaggtggaagagggctagtcactgaacgaaactgtaagctggaccaggtgtggggaggggaggtgataaaaagataatacggtggaggagcggaggctgaggaagaattgggacctagctcagcctggggaggagggagaggtcagacgggtctgtagaaaaggaagattagaaagactcagcgacgcttggggttgagactgaggggacaggcaggagggaaagaaggaagatttgggacgagttgcactgggcacagagactaggaagggactgatgtgtaaaagaatgcctggacgtcaggcacctcagaccgtttgcccattttacgacaagaattatttagatcttgcaggatggaaaaattgaaagtgctgttttctggctatttggaactgctgtccagtttgtattggggtcaagcggcattgcagaagaaaataaggcatt

SEQ ID NO: 448 - DNA, 99297 bp, Homo sapiens
ttctggaggcagatgagggagagtctcttgggaggctgcaggcctggcgtgcgtgggggtgtgtcacgaaggaggtgagcagtgtaggggacaggctgggttaagcttatccattgaccatatctatcgagtgccacctctgggcccagagctgagcccagacaggcgcatgggtcagacaaggcccagggacacacaaattgtagaagagaagctttacacaagcttgctttaacagagccttttcattgacaaaaataaaaggacgtgaaaagaaatttaagactcaatgggctgaagagtgatctcttattaccgcaacatttgagagctgatgtcagatggcagcctggctgcagagaaggtacccaggccctgggctcagtggcccttccccagctggtgcccccagccttactgcctggccctcctgcaccttcttttccttgtctaggaactgggctcatccccctctatccccagtggttgtggggatgaaaggaaggccaacccctgcaaggcctggtgcctggagctggccctgggtagacgcctccctccccttcttcctgagcccttcatgcagagcccaggacgcaatggtcacaatggctaaaatctctttggaggagggagagatcagtgcaggctgaagccattggtgagagtggaagaattcagctctccagcggaaggcagcaatatgcagagagccctgtgatggggctgctggagccgaggcctgggggttcagtcccctgagaagcccccaccagcttagcctgggggacgagttatgggaaggacagatgagaaactgctaactaaacaaggccaaaaggaccagggcaagctgggggagaccatggaggctgtggaaggaacaggctgactaagcctcaggagaggccaagagaggctaagcagggagccaggtcctaggaaagaaacagcacccagctctggggccatgccggggaggctgtgggtagagggctagggcaccaggccatattgagaaccttcattgcaggcccatgccaggcacgtgacccacagtgacccggggcttcacagagcaaccaagggaggaactgccgactccattctgatgaagggaaaagagcctctggggggctccctacatcactgctattggaggagtctgggtaggaatgcagcaggctccaaagtccctgctgtgtcccgtgggccatggagccaggtggcgggtcagggagaggagtggtgcatggttgggcagtggcaggacctaggctctgtcaatatttggtgtgggtcaatcattagccagcctcagacttgtccccccacaggttcctcaggtgggttctgggctaggccctgccctgctgggggctccacagggcttggcctagattggacgagtcgggtgggcagcccctggtctctccactcaggagactccccacccacagggctgcagtcctgcctcagggctcagcaagcaaacacgtaagagcactgcacagttgaaaaaatgagttttaaaacaatctgccaagaaaaaagatgtcaaagtagtcatcacgggaaaagtcagaattttggtggacttcactgcacttattctgtggctattaattttaaattatgtatgtgggggaggggagcacaccataatctttctagtgccctgaggctcttaaaccaggctctgttcacctggacctgtgttcatgggcaggaaactgttctaggccctttatatgcattgtttgatttaatcctgtaagtgattttttttttttttttgagacagagtctcactctgtcacccatgctatagtgcagtggtgtgatctcagctcactgcaacctctgcctccccggttcaagtgattctcacgcctcagcctcctgagtagctgggaccacaggcgtgcaccatcatggccggctaatttttgtatttttagtagagatggtatttcgtcatgttggccaggctggtctctaactcctggcctcaagtgatctgcctgctttggcctcccagagggctgggattaccggtgtgagcaaccatgctggaccctctaagtgatcttaagagatgcctgctcttgccttcccatgttagccccctaatgtaaccggctcagagatggacacagcgaatacagacagaatggggatgtgcctccaaatctgcctgactccaggaggggtccctttagttgacattggccctggagagacctcagtggagtggggaactgggcaggagtctagcggggctgaggtgggaggcaggcttcctgccagttctggcagagggtggggctgagtggggtgggccatgggccagcagggtcctcatggctggctgcagatggagttctaggtctattatcagggtggtggacgagggagggacaacagctctctgggatcaggtgtgtgtgctataacatgggctccaggccacctggctacagagaagctatgctgtttggggggcgtcacctcaccccacaattggcctcacattcatcaattgtccctcatttgggcaagaaaacccaggtcacacacaacttggtgggagagctaggcctaaaaccaggtcccctggcttggtgtccagtgttctttcctgtgcacctgtcccgccaccctggacagtaagtgtgagggccacagtgtggactctgaggccccaggagccttcagcaggccacagcacacacacatgccaaaaacaagttatacatgcatgtggtaaaaaactcaaataggacagaggacttcatatgagtggttgtacttggctatcccatccctccttacccttactctttttgctctctgtatgctataatttgagtactttctattatctttcttcatcaattctgtcttctcatgtgtccaaaccctgtgaaacttggccaatcagttaataatttcagatgataaacccttcaattctagaatgcccacttgattcctctctacagattccatttctctgtaaaaattctccatcttttcacctattttccccatttttcttctatcttctttaatatattgctatagttgttaccttatccaacatttggatcatctgtgggtctatgtctattggctttttttcttttgactattggttctattttcctttttatttgcctgtcttgtaatttccacagtatgcagaagacaatttataaaggaaccatagcaaccaaatattatattattttcttgtcaggaaagtctgccctttcaggtttaattaacaacaaaactgggatgaagctgggctgcagttttagttataatcagtccatatcaggtttcaaatgcttgatgggacagcctgagtgcctggtaagtctgtcttgtcaatcccaaagatgtaggagagtcattcttccctttggcagttttaaactctgctccttagtttcctatcccctgctgcttccaaatttcacaaatgtcttgagaaggagactggcagtttgttcaagactgtcccccttcctggggaggactttgcttaccaattatccaagactaaaggagattaggctctagtttaaaaactccctagtatcttgtgaagcttccagatgcagcgaatcagcaaatgaactgggggacggagggcagcatggttgtcacgctttaaaaaaattaacagattttaggtcgggcatggtggctcatgccttaagtaatcccagcactttgggaggctgaggcgggtgaatcacttgaggtcaggagttcaagaccagcctggccaatatggtgaaaccccgtctctactaaaaatacaaaaattagctgggtgtggtggcatactcctgtaataccagctacttgggaggctgaggcaggagactcacttgaacccaggaggtggaggttgcagtgagccaagattgcaccactgcactccagcctgggcaaaagagcgagactccatctcaaaaaacaacaacaaaaatcaacatattaacatattttatttttcagagcagttttaagtttatagaaaagtgaataggtggctggacgcggtggctcacacctgtaatcccagcactttgggaggccgaggtgggtgaatcacgaggtcaggagttccaagaccagcctggccaacatggtgaaacccccgtctctactaaaaatacaaaaaattagctgggcttagtggggggtgcctgtaatcccagctactcggaaggctgaggcagaagaatcacttgaacccagaggtggaggttgcagtgagccgagtttgcaccactacactccagcctgggcgacagaatgagaattcatctcaagaaaaaaaagaaaagaaagaaaaagcgaatagaaggtacagagagttcccatatgccttcctaaccccaatagagtttctcctattattaacatgttgtattagtgtggtacatttgttataagtgatgagtcagtattgatatattattaactaaagtccacggtttacatcagagctcactctgtgttgtccattgtataggtcttgacaaacatatgacatgtatccaccatcacagcatcataaagaataatttcactgccctaaaaatatcttattctctccacctatttatccctcccttccttcctgcctccacccaatccctgatcttttttttttcgagacagagtctcactgtgtcacccaggctggagtacagtggcacgatctcgactcactgcaacctctgcttcccgggttcaagcaattctctgcctcggcctcccgaatagctgggattacaggtgcccaccaccacacccagcatttttgtatttttagtagagatggggtttcaccattttggccaggctgctcttgaactcctgaccttgtgatccaccgtctcggcctcccaaactgctgggattataggcgtgagccatcgcgcccggcctgatctttttactgtctccatagttttgccttttccagaatgtcatgtagttggaatcacacaataggtagccttttcagattggcttctttcacttggcaatgagcatttaagattctttcatgtcttttagtggcttgatagctcaattctttttattgctgaataaaattccattgttttgatgtaccccagtttatttattcaactactgaaggacatcttagttgctcccaacttgtggcaatatgaataaagctgctctaaatatctgtgtgggtgcaggttcttctattaacacaagttttcaactcatttggatacaaaccaaggagtatgattgctacattttatggtaaaagcatgtgtagttcttttgtttttgtaaagatgggattttgctatgctccccaggagggtcttgaactcctagctcaagtgatcctcctgcctcagcctcccaaagcactgggattgaaggtgtgagccaccacacctggcctatgtttacttttgtaagaaactgccttccaaagtggctgtgttctattttgcattcccaccagcaatgaatgagagatcctgttgctccccacccttgccaaatttgatgtggttggtattttagatttttgtcattctaataggtgttagtggcatctcattgttttaatttgtaatttcttagtgacatctgatgttggatatcttttcataagtatatttgccatctgtatatcttctttgatgagatgtctgttcagatcttttgcctcttttacattttggattgtatgttttcttactgttgagttgtaagattttgtgtgtgtatctatatgttttggacacccatccaaatatataggtattttgcaaagattttctcccagtctatggcatgtcttttcattttccaaactatctttcgcggagcatgtgtttttaattttaatgaagtccggcttatcaatattttcttccatagattgtgcctttggtgttgtatctaaaaagtcattgccaaacccaaggtcatctagattttctcctacattttctagaagttatagttttgcatttttcatttaggtctatgatccattttgagttaatttttgtacaggtgtaaggtctgtgtacggattttttttttttttttttttgagacaaggtctggctgtgtcccccaggctagagtggaggggtgtgctctcagcttactgcaacctctgcgctcaagccatcctcctacctcagcctcccaaatagctgggactacaggcgcatagcaccatgcccagctaagttttgtattttttgtagagacggggttttgacatgttgcccaggctgctctcgaactcgtgaactcaagcaatccgccctccttggcctcctgaagtgctgggattacaggtgtgagccaccacacccagcatggattcatttttgcatgtggatatccagcggttctagcaccatttgttgaaaagactatcctttctccattgaattgctttcgctcctttggcaaagatcagcaaactttatttgtgtaggtctatttctgggctctcttttctgttccattgatctatttgtcaattctttcaccaataccacactgttttaattactgtagctttatagaaaggcttgacgtcagtatcagttcttcaatttgttcttttccttcaatattgtgttggctatcctggcacctttgccttttcatataaactttagaactgctgggcgcagtggctcacgcctgtagtcccagcactttgggaggctgaaatgggatgatcacttgaggccaggagttcgagaccagcatggccaacacagcaaaactcgtctctactaaaaatacaaaaacttagccaggtgtggtggtgcgcacctgtaattccagctactcaggaggctgaggcaagagaatcgcttgaacctggaaggcagaagttgcagtgagctgagattgcactactgcactccagcccgagtgactttataaataagactctgtctcaaaaaataaaaaataaactttagaatcggttttccaatatctataaaataacttgctgggattttgactgggattacattgaatcgatcaaattgcagaagagacatcttgacaacactgagtcaagatctctgtgatgggatggatatctctccatttatttagatctttgatttctttcatcaaagtgttgtagttctcctcatatagaacttttacttattttgttcaatatatacctaagtatttcatttttgggggtgctaatgtaatggtattgtgtttttattttatttttttctttttgagatggagttttgctcttgttgcccaggctggagtgcaatggcacaatctcagctcaccgcaatctctgcctcctgggtttgagcaattctcctgcctcagccttctgagtagctgggattatgggcatgtgccaccacacccgcctagttttgtatttttagtagagatggggtttcgccatgttggtcaggctggtcttgaactcccaacctcaggtgatctgcccgcctcagcctcccaaagtgctgggattacaggtgtaagccactgtgcctggcctatgttttatttcaaatttgacttgtttattgttggtatagaagaaacaattgacttttgcatattaaccttgtgattaatatgcaaccttgctataatcacttattcatttcaactaaatgaaaatgaaaattgcaatgctgaattgcaagctggctataatcacttattcattccaggaggtttttgtttttaattcttcaggattttctacatagacaatcacattatctgtgaacaaaaacagttttagctcttccttctcaatctgtatgcctttcatttccttttcttgtcttattgcattaactaggacttccagtgcaattctgaatggtggttctgagaaaggacatcctttaccttgttactgatcttggtgggaaaacatctagtttctcacaattaagtacgatgttaactgtagggtttttgtagatgttctttattcaaattgaagaagtctattcctagttctctgagagtttctgttataaatgggtgttggattttgtcaaatgcttcttctgcatttattgatatgatcatgtgggttttcttctttagcctgttgatataatggattacattaactgattttcaaatgttgaaccagacttgcctatctggaatcaatcctatttggccatggtatataattccccttatgcattatgcactgttggatttgattcacatatatatgtgtgtgtgtgtgtgtgtgtgtgtgtgtgtgtgtgtgtatgtgtgtatacataaatatatatataaatatatatttatatatatacacacatacacacacacacacacacacacacacacatatattttttgagatggagtctctctctgtcgcccaggctggagtgcagtggtgcgatctcagttcactgcatcctccacctcccaagttcaagcaattctcctgcctcagcctcccaagtagctaggattataggtgcacaccacaacacccagattttgtgtgtgtgtgtgtgtgtgtatttttagtagagacagcatttcaccatgttggccaggctggtctcaaactcctgacctcaaacgatccgcctgccttggcctccgaaactgctgggatgacaggcgtgaaccacagcacccagcttgattcactaatattttattgatgatttttgcatctatgttcatgagacatatcagtctgcagtttcccattcttgtaatgtctttgtctgcttttggtattaggctaatgctatctttataaaatgagttcagaagtattccttctgcttcttttttctggaagaagtgtttgttgttgttgttgtttttggtttttgagacagagtctcactctgtcacccaggctggagtgcaatggtgcgatctcagctcgctgtaacctctgcctcccgggttcaagtgattctcctgcctcagcctcccaagtagctgggattacaggtacctgccaccacacctggctagtttttggttggttttttgttgttgttgttgttgtttgtttttgtttttttgagacggagtcttgctctgtggcccaggctggagtgcagtggtgcgatctcagctcactgcaagctccacctcccaggttcatgccattcccccgcctcggcctcccgagtagctaggactacaggcgcctgccaccacgcccggctaatgtatttttagtagagacggggtttcaccatgttagccaggatggaatcagtagtgatgatttctttttcacttctgatattagtgatttgggtcttctctttttttttcttagttaacctggatagagttttaacccttttgtgaatctttttaagaactagcttttggttttgttgatttttctctattgatttcctgttttcaatttcagtgatttctcctctaatttttattatctttttttcttccctacttcgggtttactttgctcttctttatctagtttgctaaagtggaagcttagattgctgattttagatatttctcattttctaatatatgtattcagtgatctaaatttccctctaacactgcttttggtgcatcccacaaattttgataagttgtattttcattttaattgaaaatattttaaaatttatctggaaacttcttctttgtcccaacatgtcataagtgtgttgcctaatctccaaatattttggggttttctagctatctgttattgatttatagcttaattccattgtggtctgagatcatactttgtataatttccgttcttttagatttattaaggtgcgtttcatggctgagaatgtggtctatcctggtgaatgaatgctccaagtgagcttgagaatgtgtattctgctgtcattggatgaagtattctatagatgtccattagatccagttgattgatgatgctgttgagttcaactatgtctttgctagttttctgccagctggatctgttaaatagaggggtactgaagtctccaacataaaaatgagtttgtttatttctccctgcagttctatcagttcttgcctcatcttgggacactgtgttgctaggtgcacacactttaaacactgttatatcatctttgacaactgacccctttatggctatgcaatgcccctcttcatccctgataacattccttgctctgaggaagtctactttgcctgaaattaacacagccactccagctgtcttttgattagtgttaacatagtatactgtatctccatccctttacttttaatctatttctttatatttaaagtatatttcttccatttctattcattgcccttgatttgttttgttctttctagccttttcaggttgtgtgtgtgtgtgtgtgttgtgtgtgttttgctttctctggttttaatcgagcattttatattattccctttttactcctctcttatcatacaaattatacttgtggggttttttaatgtgtgtggtttcccgtgactttgcagtaaatatttacaactaattcaagtcttctttcataaaacactttaccacttcatgggtagtgcaaataccttatgaaaaagtattctcaattcctctcttccatctttataacactgctgtcattcatttatccataagctgtaatcactattaactgaaaaaactttacctattagttaaaaatgagaaagctaaatttttattttaccttcatttatttcttctctaacactcttcctttctttatgtagatctgagtttctgacctacataatttccctttccttctgaagaatttaacacttcttgcgaggcaggtctactggtgacaaattctctcaatttttgattgtctgataaagtctttacttctccttcacttaaaaaaaaaaacaaaaaaacctttattgtatttccagtatctccttcacctttgaaggataacatttggtgaatacagaattctaggttgatgggttttttttctttcaacgctttaaatcccataaaccactctcttcttgggtgcagtttctgatgtgaagcatgatataatgcttaccattgttcttctacagataagatgtttttcccctctggcttctttctatattcttcccatgtctttgatttttgcagtttgaatagatattcttaggtgtagattttttggggtattcatcctgtttggtgttctctgggcttcctacacctgtggtttggtgtctgccattaattttggaaagttctgttattacttcaagtatttcttctgtttctttcttctctgtgtggtattcccattatgtgtacactatccttttatacctttggtatttgtcccacagttcttgaatattctatcccatcatttccattacttcttcctctctgcatttcaattttgggagtttctattgacattccttgaagctcactgattcattccttggccatgtcccatctattcatgactccactaaaagcattcttcacttcagttacagtgtttatttttatttctagcattttgttttgcttttttccttttttctttttatagagacaaggtctcactatgttgcccagcctggtctcgaactcctgggctcaagcgatcctcctcagcctcccaaagtgctgggattacaggtgtgagccaccgcatctggccattgcacctgattctttcttaggcatttccatctttctacttacattactcctctgttcttgcatgttagccacttttcttatttgagtccttagcatattaatcaattatttaaaattttctgtctgataattcaagcatctctgccatatctgtcttattctgatgtttgttctgtctattcaaagtgtatttgtctcttataaaacatgatgtgttgggcaaaagaaactgaggtaaacaagccttttgtgaggctttctgtactttacttctccttcacttaaaaaaaaaacaacaaaccttgattgtatttccagtatctccttcacttttgaaggataatttggtgaatacagaattctatctggctaggagttgggctgtgtttaccgtttgctctagctgtaggtgtcagaggataacatttactttggtgttcttgtctgtggcttccctgttgtctttgggtttccctagagtcttcttcataaatcaggtctgagatgtgcagttcagttgtattctcgttattacaggagccctgttgatgtgttagtgaggggtggagggacgaagcattctataggtctcagtcttttaatgaacctctgcaggggctgtgaccaacacaagggcttctcatttgtctttccccgctggaggtgggcaggaagcctagaggagggtagagttgggtatttctcttcccacatgtcaggctccggtaaaacagtttcccctgaggacagaccttgttaagaagagaatgctctgggttaccttttcttttcctctaccagaagcagcagggaatttttctctgatctttactgtgacaacttggtaaagcaaaacaaaacaaaaaactgtgtggggccctgtaagactggctcccctggtatttttaactctctcatggagtgcccagcaaatcatcaattaagttttaagtttccctaccccggtactggttcctgtggagttttctactcctaggcctctgctcccgtaagttctggttctctgtatgtgcttctctgtctctccattttgaggacagcagtttgccctgtggcctcagatctctggtggatcaagaaaagttgttgattttcagtctgttcagcgtttttcttgttgtgaggttgggggtgatgactgctaagctcctcacatgccaactgaaaatgaacagtgtcttttgaagaatgacagtttttaattttgaaatagtccaatttattttttcctttatagggttttttgtgtcatattttaaaacccctgacaaattcaaagtcacgaagattttctcctagaagtgttacggttttagctcttacatttaggtctgtgatccatttatttctttgtgtgtggtgtgagctaaggtcagaggtttaattttttatatatccagttgtaaagatttcttgtgactatcatcctttcctcattgaattgccttggcatctctagcaaaagtcatatgtacatgagtcttacctggacacctatctgctccattgataatccgctccattgatttctttgtctctatgccaacatcacattgttttcactgctgaagctttataaatctttaaataatgtaattcatgcagcttttaaacttatttttcaaagttatcttggctagtctagagttttttgcatttacatatacattttagaatcagcttatcaaattttacaaaaaagcctgctagtactttgcttggtattacagtaaatttgtagatcaatttgggagaactgatatcttagcaatattgagtcttctgaaacatgaacatagcatacctctctatttatttaggtctttaatttctcacagtaactgtatctttcaatgcagaggacttacacatcttttgccaaagttattcataaacatttcaaaattttgatgcattttatatatttaaatttttttcttcagcctgtctccttgctgagatgctattttttaaacatttaatttccaattgcttgttgctagttcacagacatatgactgaattttgctattgacattgtatcctgcaactatgctaaactaacttattagttctaagaattcttctgcaggttccatattttctacataatcatgttgtttgtgaataaagactggtttattcctcatttccaaaccatatgacttccttaaacgtttagaattctctagtagagacatcttggtttgtagttttctttgtgggaaggtttttagctacaaattcagtttctaaaaatacatataggcatattcaggctatttcttcttgagttagctttagtagtttgtgttttataaggaatttgtttaggttgtcaaatttactggcataaagtttttcataatattttttgtccaatatatacagaatagtgatattccttctcttattcctgatcttttgttttgagacagagtctcgctctgtcgccaggctggagtgcagtggtgcaacctcggctcactgcaacctccgcctccagggttcaagtgattctcctgcctcagcctcttgagtagctgggactacaggcgcccgccaccacatccaactaatttttgtatttttagtagagacggggtttcaccacactggccaggatgatctccatctcttgacctcgtgatccacccgcctcggcctcccaaagtgttggtattacaggcacatgccaccacgcctggctaatttttgcatttttattagagacggggtttcaccatgttggccaggaggtctcgatctcttgacctcgtgatccgcctgcctcggcctcccaaagtgctgggattacaggcatgagccactgcgcccggcctcctgatattgttaatttgtgtcctctgtttcctgatcaggcagtgctgtattaatgagtcagatagcttctctgtgttgcccctctattgtttacttcttcagggcagatttcaaaaatccacaggcaccaaactcaaagtttgacacatccaatagcttcaaacgtagcccatataaactaatttttagccatttagagcctgtctgctttgcatgccccatgaaactgcacccaacatctgctagccacagacaaaataaacctggtagtacaagattccaagccgcagctgcccttcagaaattggatccagatacatggtgctgctcagtcacgtcatctgacacataagcccctccctggcagtcccctcctccttgagtcccctaccctccggtacttctgagtggctatcctggggctgtaacctctggatggcctcgtccctcatgggacttcccttacatgccaccctgtcaaagtgttgccaaataaagctcatcgtttgctattgctaagtaatggtcagatctttttttcttggtcagtcctgaaatccccctgttgtttctgagacagagtctcactctgtcacccaggctggagtaccgtgacatgatctcagctcgctgcaacctctgcttcctgggttcaagcgattctcctgcctcagcctcctgagtagctgggattacaggcgtgcaccaccatgcctggctaatttttgtatttttggtagagacggggtttcaccatgttggccagggtggtcttgaactcctgacctcaagtgatcctcctgcctcggcctcccaaagtgctctgattacaggcatgagccactgtgcccagccagtcccaaaatcccttgaactcgctacaaggggtggtgaagaaaggggagggttttggaaatggttaagaaattgatatgggggccgcccagccagtaggacaatcaattggcaaaagaatcctggacagtcccaagtggttggaactcagaatttggaagctttccactcagtttgtatagcactgctgtgtgctctatggcactctatatttgtttggtttcccccagacactcattagcttgggcaagtggtagcaccagtatttgaatgaacccacacactggaactgatctttggggcgggaggtttggggttgcccaggagggaggtcagtccacccgcctgagtcctccactaggcagttgctggacattataagacatttgggcttgaatagtaaaaggggaggatggcatgtacctgcactgagagcagactacccctgactccctaacagtgtcctgttggtttagggaactcttagagaagaggatgccctcatccctggagactgtgatagcaggtgaatgaactgacaaggcagagacatcaggccaaggctggtctcctaagcacagctggagcgatacctctgctgctgggacctgctgtgcccaacccttgtgctaagccagctaaagcattacttaaagtgactaaagacaaggaaggtcatatccctgaccctcgcaggactctgaagatggtggctgtcctactgaacaggtgctccaaaccacgaaacacgggtcaagctctattgcttcttaccaggatgccgctggacaggaggcaggggcttgaactcccaggaaggaagagcctgagggtaggaccctgtggaagaggactggtgtcctctagaggaaaggcagagtgacagcaccatgacagtgataagtggcaatcaatccaccatctgctttgccggtgaccacagcaaagtaataacaactgagaagacaaaaagggaggaccaagaaggaggggacaactcttgcctggaggagaaaacatcttctctctcgccctgtggccctgtttctcctaacccaggaaccaaagacaaaggggctggctggctgtctagagtgttctggcggggagggagctccacctaaagggctgaaactcaatggctggctgccccagtatggaatggaaaaatggtgtccctgcaaaagcatcctgcacaattagtgaggaaggtgggaatgacccccagcgaaggctttggaccctggcccacagataccttgttgatggggatttttaaggcttggaaggctgctgaccctatgttagcatagggtcttaagggtttgggcagactgtcaatggaaaatgttagctgaggccaaaggtcttggtcagctggggatgtagaagtgggcttatcagacgacaggctgaatgcaacacaatggtgtggcaagccctgagcagcttaagggagtcctgactccatctgcttgtttcttaggagagcttccgacaaagtcctcttcaggggcaatgatactaatactaagacaattcaaggggccatagctgcctggacttactggaaacttagaaaagacaaactcagagtgctgcccatgaattctacaaacaacaccctacctggcctaaatccaaattactatgaacagtaagacttcccctctcctaagccagacaagcttcctacagccaggcatctccttaaatgtgaaccctgcaatgaacaagaaaggttactttggatcctaaggaggggggcgctcaagattggatgatctctagtaaattggtttaacagttccaataattactagggttagacgacaattctcagcaggtgtctcctctggaaacagcccctccttcatatctggccgtgtcccccatacggatccagtggtccatgttcatggaaaacagacccttctggtagacaatcgcccttttacctttctccacgttaatagtaatctgggcagggcgcagtggctcatgcctgtaatcccagccctttgggaggcagaagtaggtggatcactggaggtcaggagttcgacaccagcctggccaacatggtgaatccccatctctactaaaaatacaaaaattagctgggtgtggtggcaggcacctgtcgtcccagctactcaggaggctgaggcaggagaattgcttgaacccaagagcggaggttgcagtgagccgagatcacgccatcgcactccagcctgaatgacaagagcaagactccgtctcaaaagaaaaaaaaaaatagtaatctggactccaaaaaataaacaacactgggtgaccaaatctcatattacaggaaatgctcatgctttaaagggatccgtggactttgtacccttgcttgaactaagtcagcgtgacaggctgtaatccttccaaggggaatggtttgggaggattaattaaagggataattacccacttaactgttagtattggcctggttttgctacaatgtgcaccccattattggaatggatctcctcagtcactatgtaactcacggaacaagcccaagtctttcacgctattggtgggtgccaggggtgaactttcccctcgtggtgcaggtggtaaacatgctaccttaccgctgaggcggggcatggaaggattactgcctgtcacagctcacttagttcaagcaggggtgcgaagtccacaggctcacccccaccctttctcagagagctggtttcatatggctggattcttttgtcacagtctgcatttcatcctaggattgtcctgattccctaaatgaattgtatttttttgagacagggtctggcagcctcgaacccctggaggcttaggtgatcctcccacctcagcccccaagtagctgggaccacaggctcagctaatttttacttttttttgcagatatcaacctctctatgtttcctaggctggtctcaaactcctggactcaagcaatcctcctgccttagcctccacaagtgctgggattacaggcatgagcaactgcatccggctaaacaacctctcttcttgcaacactgtttccttgtgagctcattaacatgctaattaccacattccacaggaagatggattacagagcaataagacaggctgggttcaccctggaacgtgaccagtagtgacagcctctaacaatgacacaggtggggaccactatcggaagatggagattctggggaactgctaccagctgcagggctgagagtgacatatctgacatttgttcattgttcatctgttcatacagtcattcttgcatgagtttactggacacctgctgtgagcaggcactgagtggcataaaaattcctagaacagtctcatcagagaaaagacacacacagaaagagaaattatactacaatgcagttatggaaactcattcaacaaaattttactgaatgcttactatttgtcaggtaccgttatcgatgctgggagaagagaaaaggacatcattttgccctcagggagctcatggtctaacggagagagagacatgtgaacaactacaacgtctgcggtctaagaaaacactaaattggagacgtgttcaaagcagtgcaggggagggagcggagtgagacttccggggtcacccagaagggcttcccggcaggtaagttgcagctaacccacacagatgttaattacagcaagaaaagatctttcacagtgctccctgtgcgtcaggcaggctagaggtcttgtcaaaagtatggcatatgtatcacatgcaaaatgatttgaagtagaatgtggaccaatttttaattttttacttatgcatctaaatgtgcattacaaaaaaatataatgagaaaaccaaactttcaccaatatgattgctcagagtgaggctaaaggaatgagttttaaaactgatttgaatcacaaatagtgcttagatgtggagagcatcttaaatgtggcttgccaatgactggattttggaaagcaccgatatgcgcatctttttttttttttttttttttttttttttttttgagatggagtcttgctctgtcgccaggctggagtgcagtggcgtgataccggctcactgcaatctccatctcctgggttcaagcgattcccctgcctcagcctccccgagtagctgtgactccaggcacgcaccactatgcccggctaattttttgtattttagtagagacaaggtttcaccacgatggccaggaaagtctcgatctcctaaccttgtgatctgcccaccttggcctcccaaagtgctgggattacaggcgtgaaccaccgcacccggccacatgcatcttattttagtgagatgagatgtaggagttagcgaggtagggaaagggaagaacagtagacacaaggaacaccaactcaaagcacacaggagagagtgcacgggctgcctgagaacaggtggtggtgaagcacggtgggctgcggggcacgcggagggctggaggagtgtgcgggagcagaacccctgcttctgtgttccactgcctgtgtaaacttctcaggtcggttcccatggtcatgtctctccaggaagtttctcaatggcacacaccatgttaccctcccttatgtcaagcttgtccaacccgtggcccaggatggctatgaatgcagcccaacacagatttgtaaactttcttaaaacattatgagatttttttttttttagctcatcagctatcattattgtattttacatggagcccaagacaattcttcttctaacacggcccagggaagccaaaagattggacttcgccactttaagataagcggttgttgactttaagacaaaaaaggacactttataatgactaaaaaaatcaatccatcaggaatacacaccattataaacataatgtaccaaacaactgagcaccaaaacacatgaagcaaaaactggtaacactgaagggagaaacagacaacttaacaaaagtagttgaagacttcagtgcccaactttcaataatggacggaacagctaggcagaagatcagcaaggaaacagaaggctgaacaagctacacctacagaccactgcagaacacccaatcacagaacacacattcttctgaagagcacatgaaacatttgccaggaaacatcaaatgctaaaccataaaacaagcctcaataaaattaagaggactgatatcacacacagtctgttctgtgatcaaaatggaatgaaattagaaatcgataatagaaggaaatttgagaaattcataaatatgtggaaattaaacaactcctaaatacaaatgggtgaaagaagaaatcagaaaatttaacagtacttgaaataaatgaaaacacaatatacagaaatttatgggatgcagtgaaaacagtacgtacagggaaatgtacagctataaacacctatattagccagacatggtggctcatgcctgtagtcgcagctacttggaaagctgaggcaggaggatcatttgagtccagaagtttgagaccagcctggacaacatagcaagacctcattccaaaccaaaaaaaaaaaaacccccaaaccccaactatatttaaaaagaagaatgatctcaaatcaggaattgaaacttccacttaagaaacagaaaaaaaaagtagcaagcaaaatccaaagtaagcagaaaggaaataataaagattaaagcagaaataaataaaacagaatagaaaaaaatcaaggaaaatcaataaaagtaaaaatagattattttaaaagatcaaccaaatttctgaacctttagctagactgaccaataaaaaggagagaatgcaaattactaaagtcgagaataaaagagagaggccaggtacagtggctcacacctgtaatcccagcactttgggaggctgaggcaggaggatggagaccggcttgggcaagatagcaagactccatctcttaaaaaaaaaaggaaaattagccaggcatggctaggcgtggtggctcatgcctgtaatcccaacactttgggaagctaaggtgggaggatcacttgaggccaggagtttcagaccagtgtgggcaacatagtgagattgcctaaggaggtcaaggctgcagtcaagctatgattgaaccactgcactccacccagaatgacagagtgagactctgtctcaaaaaaaaaaaaaaggcgggggggcgagggaggccaaggcaggaggattacttgaggccaggagctcaagaccaggctgggaaacatagtgagaccctagctctacaaaaaagtaaaacaaaaatgagctgggcgtggtggcttatgcctgtagtccagctactcaggaggctgaagcaggaggatcacttgagcccaggaattcggggctacagtgagccatgatcaagccactgatttctagcctgggtgacacagcaagaccctgtctctataaaataacaactaagaaagaataaaagagagggaatcaatgctgaccttacaataataaaagggataataggggaatcgtttaaattgtatgccaacaaatccaataactaagatgagatgcagaaattcctacaaataaacaaactatcgaaaaactttccacaaagaaaatgtcagacacagacggtttcaattgtaattccaccaaatgtttaaagaattaatacaaattcttcacaaacttttccaaaaatagaagatggaacatttctaactcattctgtgaggggccaatatattctgatgttaaaaccagacaaagacatcacaataaaactgcagatcaatagcccctaaaaaataaagatgaaaaaatcctcaacagagtactagcaatccaattccagcaacttttttttttttttttggagatgaagtcttgctttgtcgccaggctggagtgcaggggcgcaatcttggctcaccgcaacctctgccttctgggttcaagcgattctcctgcctcagcctcccaagtagctgggactacaggcatgtgccaccacgcccagctaattttttgtatttttagtagagacggggtttcaccatgttggccggatggtctcgatctcttgacctcgtgatctgcccaccttggcctcccaaagtgccgggattacaggcatgtgccactgaccctggccagcaacttatttttaaaaagattatgcactgtaaccaagcagaatttaccccaggaatgcaaagttggcgtaacactaaaaaaaattaattaatgtaacatgtcaatacaataggataaaaaccacatgatcatctcaatagatgcaaagtacctgacaaaattcaatacctcttcataataaaataactcaaactaggaataaaaggcaactcctcaacctgataaagggtatctatgaaaaatatcacagctaacatcatccctactagtgaaacactgaaggctttcctcttaacttcaggaacaagattaaaatgtacgtatgtgcttgttatttctgttcattgctatactgaaggttccagtcaactaggcaagcaaaagaaataaattcatccagattggaaaggaagaagtaaatttatttctatttgcagaagatatgatcttgcatatagaaaagcctaaagaatcaactaaaaaagtattataattaataaacaagttcaggccaggtgcagtggctcacacctgtaattccagcactttaggaggccaaggtgggtggatcacttgaggccaggagtttgagaccagcctgggcaacatggtgaaacgtcgtctctactaaaaatacaaaaattagctgagcatggtggtgcatgcctgtaatcccagctacttgggaggctgaggcaggagaatcacttgaacctgggaggcagaggttgcagtgagaccagattgcacctctgcactccagcatgggtgacagtgcgagactccatctcaaaaaaaaaataattaataataataataataaacaagttcagcaagcaagcaggatacaagatcaatacagaaaaaccaacagtattttatacaatattgaaaaatctaaaaatggaattaagaaacaacatttacaatagcatcagaaagaatacttaagaataaacttaacaaaaaatgcaaaacgtgtactctgaaaactacaattgttgaacaaaattaaagaaaatctaaataaaatggaaaaacattccatattcgtaagtctgtagacttaacagttaagatggtgttgggcgtgggggcatgcacctatagtcccagctactcaggaagctgaggagagaatcgcttgagcccaggagttcatggctgcagtgagctatgatcacaccactatactcagcctggcaacagagcaaggcctcatctcaaaaaaaaagtatatattgtcaagatggcaacatgccccaaacccaaattgatctatagatgcaatgtaatccctatcaaaatcccagttggcttctttgcagctatcaacaagatgatcctacaattcatatagaactttgggggactcagaacagccaaaacaatctgcaaaagaatgaagttgaacgatttacacttcctgatttcaaatcttcttacagtgttataataatcaagagagcgtgtcgctggcaaaaggacagacatacagataaatggaataaaatggaaagtccagaaataaacccttacacatatatgttcaatttatttttaaaagttaaacagactatttttaaagcaattttaggcttacagaaaaattgatggccggacaaggtggctcacacctgtaatcccagcactttgggaggctgaggtaagaggatctcctgacaccagcagtttgagaccagcccggacaacatagtgagaccccgtctccatctctacaaaaaatggaaataattagccaggcatggtggtgtgtgcctgtagtcccagctactcgggaggctgaggtgggaggattgcttgagcccaggaagtcgaggctggagtgagctgtgattgtgccccagtacttcagcctgggtaacagaatgagaccctgtctcaaaaataaaaataaaataaaataacaactcagcaggaagtacagagaatttccatatgtccccctctccatgcacagtttcctatagtattaacatcttgcactagtgtggtacatttgttacaatcaataagtcaatattgacacagttattgctatcaaagttcaattaaattttgacaagggtgccaagaccattcaatgaaggaaagagttttttcaataaatgaagctggaacaactgtatagtcacatacaaaagaatgattttggacccctacgtcatgccatatacaaaaattaatgcaacagtgctgtaaaatctcttagaagaaacacaggagtaaatcttgcattaggcaatggattcctagttattacaccaaaaacacaggcaaataagaaaaaaatagatacactgaattccataaaaattaaaaacttctgtgcttcaaaggatactatgaagaaagtaaaaagacaatccatagaatgggagatcatttttgcaaatcctttacctaaggagcttatatacagaatttataaagaactcctatgctccaccagaaaaagacaaataacccaatgttttaaatgggcaaataatctgaatagacattggtccaaagaagagatacaaacggccaaagagcacatgaaaagatgctcaacatcattagccatcagggaaatgtcaaaaccacaatgagatgctacttcacatctactgcaagggctgaaacaacaataacagaaaacaaacctacagaaaaaaagtgtgaggatgtggagaaatgggaatcctcaaacgtttgccggtggacatttgctggtggaaatgtaaaacagtgcagctgctttggaaaatggtttggcagttcatcaaaaggttaaaaatgcagttaccatatgatctggcagttccattcttagttataaacccaagagaactgaaaacatgtccacacaaacacttgtacatgaatgttcatagcagcgttattgatcacagccaaaaaagtgtgaacacaaatgtttatcaactaatgaatgcataagcaccatgtggcatatccataaaatgaatattattcagtcattacaagaaatgctacaatatggatgaccttagaaaagcttatacaaagggaaagaacccggacacaaaaggcgacacattgtaggattccatttatattaagcgtaaagaataatcaaatccataaagtagatcagtggttgctgaggactggtaggaggggaaatggggagtgttatgggacttctttttggggtgataagaatatttaaacatggattgtggggatggttacataactgtgaatatacaaaaaaaaaaaaaaccatggaattacctctttaaaatgactgcagcatgtgaattaaatctcagtaaagctgttacattaaaagaaaaagctaaagtaaaaacaatatctttcaagaattgtattgcaatcatattacaccacgtgatgaaatcctcaaaaacgtggggcaggtggtaaatcctggccaaggctcctcgagccaggccggctggcagtgctgcatcgtgctgaaggcgctgaggttgcagcggatgcattccgggccagtgatatgatgtggacaggaaaagtcttttgttctgggaaaatggaggactgaaacctcttcatgtctttttcccaggccctgatttaggaagaccaaaacagggacttctacagtagcagcttaatcagcagatgctgggtggtcgcctctgcacatggcctggggggcggggcgccttaccgcgtcacactgggtggatgggcctgtgtgtggcctctctccagctgtggctgacagtactcactcagcccaggcttccaggccctcctgggccctcctatccactgaaggaaatgggagatgagtgggtaatggaaaagcctttggagtcagatgtaaatccatgacttgaccacttattgctgtgagaccctggacagctggatatagagttcttgttctagcatccgccctgggaatccccggaactgggcctcttaccgacaccattgcctgtaatccacaaacctaggaggtaggagtggctttctttcgcagatcctccctctccctgagtcccagagttactgggcaaactcggttgaccacaggcatccaggcggtctcaacctggttttgttgttttgacacagttgtcatttttgtagttacccttgtaatgtaaaaggttttcttttttccctttttcttccccccaacccgcccattttcttttctctcctcccagtctcctgccttcctttcaccctccaaaagaagtctaactattagagttggcagcaaaatttgaagaaagtggtttaaaactcagagagccagggctgggggtagtggctcacacctgtaattccagcactttgggaggctgaggcaggtggatcacctgaggtcaggagttcaagagcagcctggtcaacactgaaaccccatctctactaaaaatacaaaaattagctgggcatggtggcgcatgcctgtaatcccagctactcatgaggctgaggcaggagagtcacttgaacccaggaggtggaggttgcagtgagtggaggtcatgccattgcacgccagcctgggcaacagagagatactcagtctcaaaaaaacaaaaacaaaacaagtcagagagccagaaaataggaattttagagtaaggaactggggcaattacatgctctggcagcgtttaagaatctgggggccccaaagccagccctgggcatttcttgggtatcatgtacctctctgtgggggcagtgcttcaaagcctcccactcaggagatctttgtcagcagtgtgatgagtgggaagagaaaggcgtacagcagtgtgcatgccaggccccatatgcttttaaaaagggactttatagctacggacagtcctataagagagcagaaactgatttcctccctgtggtagggagatttttcttacccttttgaactgtttctttttttaaccatgaggaggttactttccatctaaaaagtaataatgtaaaaaccacatgggggtgaatggtatagagccgagaagtgcctgctccggaggctgcaagctcgggctcccgcagcacagctgctgcccactctgctggaggcctcttctgggtgcatcttcatgagttacaagaagcacattactttgaccccaaaggtaattatcttgactcactaattatctgaatcagcatatttggcttggaatcacatagctattactccaaacctgctctttcttgaaagagcaaaggtttttggctagttggttgttttaccatttatagacattcaaaagactcttaaggcaatgttaagacttgttaactggatgggtgtggtggctcatgcctataatcccagcactttgggaggccaaggctggaggagcattgcttgagcccagaagttggtgaccagcctgggccatcatagtgggactaaccttgcctctactaaaaaaaaaagacttgttgatatggtttggctgtgtccccaaccacatcttatcttgaattgtatctcccacaattcccacgtcatgggaggaacccagtaggaggtgattgaattgtgggggtgggtctttcctccactgttctcgggtagtgaatgagtctgatgagatctgatggttttaaaaacgggagttttcctgcacaagctctctctttgcctgcagccattcatgtgagacgtgacttgcccctcctgccttctgccatgattgtgaggcctccccagctatatgtaactggaagtctttaaacctttttcctgtataaattacccagtcttgggtatgtctttatcagcagtatgaaaatgaactaatacatttgttacatattttgagccatggaaagtgctcaatttggaataagtatatgcccttgaagggtggcaattttcaccaagatggataccacaatatttgaatgtttaccatatgccaaacaattcccacacataatatcttattttcttctaacaacacctctataaggtaagtgctattattactcccacagagaccaattagggaaatgacttattcaaagtcaaagagttagtaaactattggagccaggatctgaggctaggtctggttaaactccagagcctgagcacataatccttacactactgtgaactgtgggaagggaaatacaagttcacacatcaccaaatccagtgccaagttaagcagatcaaaaacataacagtcacttggaggataaccacaatgagggagccctacctattaggcacctactggatgctgggcatcctgctgggcacatccatccccatggcctctctgtgcactgacatctgacgtctttctcagggagaagaaaactgaagctcatgggggtgaagtgacttttgccctaggccagatagcccataggtgcagaaaggataagactcagggtcacatgaccccaaagcactttcccttgctacttctattcttgctcctgttctctactcttaagtgatccggatgggctcctgcatgagtagacgataagaccaccctgaagaatgttcattccttcctcattgcaatagtgccacggccctgcttggccggaggtggggtgtggtctggggcaaacatgttcttcccctcccttcccaaaccagaagctgggactgtactgatctagaacgggaggacaaggacagtgagtcgctggggctctttctcttccctcagccctgtttcccagttcctccaggaaccttactgacggcaagctttgtgctggcttccattctgaagtggaggctcctggctgggtgttgcctggacactttgttcctggtgggcactgtgcactcagaagaaggctgggccaaaatgggtctgtactcgtttccagtggtagttcatcaataaggaagatcactgaggctgtgatcttccagacagggttgtgaaaataactaggaatgaaaaaagtagctggatcaaaggttacaaagggttggatacattggctcacacttgtaatcccagcactttgggaggctgaagtggaggatcacttgaggccaggagtttgagactagcctgagcaacatagtgagattccatttctacaaaaaaaaatctagtaagactatattttaaaaaatgcaatcaaggtattaactggggggaaaaaagaaagaaagaaaaaaaagggttacagagaaccctgcttgactgaagggacttcgcacactgccattttacccacacactgatagaagaaaatgcttcaaggagaactcatttacccagataacttcctttaattaggaaatttcaaaaaattccctgaatggtttagataatatgtttgtccaatcatgacttcacaagggatctgaagcaacgtagttctggtccagaactgtcagtgctgaggagattcccagtgtccacagctgctgctcccaagctcactgctggtctttctctagactctcttcctgggcattaacttgaaagaagctgaagtttgttagctctgtgactctacctggagctccagccttacacatcccaatcaggatggggcatctccctggctcgacaagccacaggggctccaaaactgcctgacttttcatctcccactcccatggaacgttctcatacacagtgttctgttactggcactgttgctccaccactcacccaggcctagcctcctgcctctctaacagccaatggcgaccaagtcctagcagtcctatctctaaaggtcctcgctatctgtcatctccccttcattttcccagttactccagttactgtcctactgaaggacccccatcccatctgggctactataaccacatggaccatcccttgcttcaatcatagaattctttcttcagatcaaagtatattcagacactcgatacagtaacaaaagcaagctatcctggaaggaagaaggaatcaggaggcagaggtatgaaatatctgtggcctgtatctcaccttctgggtgaggtagactcctgcctcatctcttccctggaattcctggggttccctgaatacacaccatgaagtttccatttttgagatggattatttcttctgctcacagtgtctttctttcttgtctgcccagcacatggttaaagcatgagatgtgaaaccaggaagaaccaggtctgaaccttagctccaccagtggtagcttcaaaccttggtcctttctgagcctgcttcttcaaccgtaaggtaaaaataatatcagtacttatgttatacacctgttcacggcgttaaataatgctatatttaagttgcttagcagagagatggtaagcactcaacaaatgttcacacatcataattttcctcacccttcatgagtcaactggacagcaactcctccacgaagctttccccaatctcctccagctgtgtccccagtgaaatctaccacactgcatttatagtcaggaggcaccattctgcctccctcctcacactgtgacctctttaagggcagaggctatcttgttcatctttggttctctgctattcagtagtatccatcacttagtagagctcagtgttcactgaattagttaattaacaaaaaagggaggaagtatgatcattcattaatgaaatgtatcgaacatgtactgtgtgacagacaatgtgctggctgctggggatacatctgtgaataaacagagggagttcttgccctcatggggctcccattctaatgaggaggatacactcaataaacaaccacatgtatagtatactagataatgcaaagtgctttgggaaaaaataaagcagattaggggtaacaaggcaagaagcagttgttgctctttttttattttatttttttcaaaatggagtctgactctgtcacccaggctggagtgctatggcgcgatctcagctcactccaaccttcacctctcaggttcgagtgattctcccgcctcagcctcccaagtagctgggattacaggcgcccgccaccatacccggctaattctttttgtatttttagtagagacggggtttcaccatgttggccaggctggtctcgaactcctgacctcaggtgatctgcctgccttgacctcccaaagtgctggaataacaggcgtgagccactgagactgaccttgttgctgtttatgttaggtcagggaaggcctcacagaaaaggtgacgtctgaacagagagctgaagaaagtgaggaagaaggcacatggacattagagggtgggaagatagggaagagcacaacccagatcaagggagaagccaagtgtaaaggccctgaggggagagcgtgctgcacgggaggccagccagcgggggccggggctggagtgctacgagatgagggcagagaagcagtggggcgggggtcctgtggggtgcagatcgtgggtcatgtggggctctaccattccttcatgaagatgtgcatgattattgcttgattactttcttgggcatcttgaaaatcctgtcctcctacctatgttaaaatgcagcagaaaggaaaagtcctagccttactcagtcttaatgagtacaaatgaagttgttttacattaatatctaaatctcaatggtttgagttctcacctgtgcaaatgtagaatgtcccagctccgggaaaatccttttccccttagtatttctaggaatcctaggggcatgtgcatggttgtatgatcctaaaccagttgccagggctggtcaggtcatgctttggcagcatcaggctccagtggtcctacagacacaccacagtagggtgctccactcacctcaccagcccctaggtcatccagaggatttatcattattctgagactccacagggccttgcctgtggatccagaaagctaccactgtgcctcaatacaagacactactcttggcaggtgagaacattccgtctgggtttggatgagaagggccgttccacagcaacattttttgaactccagtgttacagtgtctatggacacagcttttagttcacacctagagcccttctctccccagggagcaaacttaccttcaagttggctggtttgggacatacctggacagcagcttgcctccaaccttctatcttcttgggaagctgggcttgctatcagactggtccttttcttatggtagattttctcttgaggctcccattagtctctgcaagtgggcctccgcctgggccactccagcacattagacctgtcagtagtcaaagccaagagtgcacaaagttcccaactttttcccaggatccccaggcccaacaaaaatcaatgaatgtgatgcctgaggaggattattgcctaactacgtaccagtactgttgaatcccatctcctactcagctgggacccactgaagttcttcctcaggatattagctttatcaacatcccaaggttttccatttcttattcaaggtgtgactacactgagcagtaacagcaaaacctgaaagagaatggatacaggtgttcatttcagatggtacaagtttaacaaagtacaagagcaacttaaggtttgacacaaaaactctaagcatatatttaaatcctagtatttcatccagaaaacaccacagcataactgagagcactggaggcagaaataattcagtttagatccatggattgcttgctatttactgtgtgactctgggtagccacttactttaaatctatttttcccacttatagaaaggtaatgatgaccacttgttggaaaacttgagggtaatacttgtaaaggtcatagtaagacccaacaacttgggcccaacacctggtaggcacaaagtctgttctgcttcctttccctttctgtagagaaatgcacaggatattccttatatgccacttatgttatgggattgacataggttttgtccctcatgctatgggattgattaggttttgctctaaaaagctttaaaaaagaaaattcattactataagatcaactcgattccaacttaatcttatagtaactctaaggtatgattatgctgcaattctagtgtatttgatttttatttcatattgaatatcattatattctcaataaacccttaacaggctttaactgtctcatagctttctctctgatttcctcgataaaaacaaaatagcaataattaagaaagatcagaaaataaaagccaaggaatgaaaagtctgaataaaagctattgcatactctacatagaaaagatctagctgatatggtgatcaggaaggcacacaggatctggaatcaggagacctgagcttgaattgactcagccactctgtagatgggaggcatcttggtctctatgggacattttcctcatctaagatgcaaatatcatctcacagaattataatcggtgtcaaatgacaagtgctatatgttagttcagttcaacaagccaaatagagacaatcagacagacctggtccctgccccagggagctcacagtctctttgacctgggccctactttttccctgatctggtttttagtagaggccagcttggaattgctgctcatgactacattgattgacttccaggagagccttcgaaacaccagtgctcactgacctaaccttctctgctggtcttacatagaactggtctggggaactcactcaatttccatgctatctctagccaaaatacttaacttcttgcacaaaaatcataaaataaagaattacaaataaatcactccccctgcaaactcaaagatcaggctcatcccctctcctgactgtgtggcaatatcatcctttgcccaaaagagatcctctcatactggagaccaaactccaggtcactttattgccagtcctgtgtgtttacatgccatcataataaaatttacaaagtgttttccctaaagcctcgcccactgctacccaggtcaagtagaaccaaaggatatctagctgtctgtccttgggactgacacaccctgaatctctcctctcgcatttttaagcagttatgacacagaaagaacctttgggcccaggaccctgggttttgtaagaaccagtctttgggagaacagacctaaaccctcttcttctaaagtgagtggtgtttttactagttgcttcttcaaactttgtaattcgagtccttctttaaagtaacaaaaatgtttttaaagtcttctgctgaatctcttaccaaacaataaccttcaagttttggtgaaaccattacttttatatgttgagcttgcttaaaacaaggcacgcaagtaatcctgtgacatactccattttcttcaaaaactgatgaacaagctttgcgcagtggcagtatcatagccaatgaggtttactcaaggagtgattattgctaattgaaaaactgatgaacatatgaagtgcatgtctgtagcttaatagtacaaagtcagccaacttgagaccttggctcaggtatttttgcaacatttctagcccatgactacactgggtaatcctacccctttggacttaccaaacatctctgtaatcctttaatgtacaagtaatagacatctacatcactccaaacaacactctacctgctccagggggagtcttacgtcagaggacttctgctgctgcaataggggaagatcacagaaagagacagtatggagtttgattcaataatttctgcctgtctgagaggaacagtacacaggcaggtggggaagacttggtttataaacagtggttaccaatgccttccaaaaaactgtacagtactttactagtagtctctctctacccctgccaggacaatctaagcagaaactctgcagttagaaggcaatagaatgatatatttaaagtgatgaaagaaaaacctgtcaaccaagatttctttcttttttttgagacagggtctcactctgtcacccaggctagagtgcagtggtgtgatttcagcccactgcagtactacactacctcctgtagtcaagggatcctcccacctcagcctcctgagcagctgggactacatgcatgagccatcacattcagctaatttttctattttttgtagagatggagttttgccatgttgccccggctggtctcgaactcctgagctcaagtgatcagcttgtctcaggctcccagagtgctgggattacaggtgtgagccaccacgcccagccaagaattctgtatctggtaaaactatccttcaaaatcaagggagaaactaagatatccctaaataaacaaaagctgaaggaattcattaccactagacctaccctgcaagaaacgttaaaaggagtcccttccttcaggttgtaagtaaacaacactagacagtaactcaaagatgtataaaaatatacatttttcctttcaaggtaaacacatagacaaatataaaaatcagtattattgcaattttggttcgtaactccccttattattttacaggacttaaaatagaaaagcataaaaaactataaatctttgctagtgggtacacaatatataaagatgtaatttgtggcagcaataacataaagaagagacggagctgtaaaggacgtcttttgtatgcaattaaagttatcagtttaaaataggttgttataacattaggatgttttatctaagtctcatggtaacacaaaggaaatatctacagaatatacacaaaaggaagtgagaagggaaccaaacacgccactataaaaaaatcaactgaactcgctgggcgcggtggctcacacctgtaatcccagcactttgggaggctgaggcgggcggatcacaaggtcaggagttcgagaccagcctggccaatatggtgaaaccctgtctctattaaaaatacaaaaattagctgggtgggcgtggtggcacgtgcctgtagtcccagctacttagggggctgaggcagaggaatcgcttgagcctgggaggcagaggttgcagtgagccgagatcatgccactgcactccagcctgggtgacagagcgagactccgtgtcaaaaaaaaaaaaaaaaaaagaaaaagaaaaacaaaatcaactgaactcaaagaaacacagtaagggcgtaaatgagggacaaaaagagcctataagagatacagaaaacaacaaaatggcaacagtaagtccttccccatcagtaattactttaaatgtaaatgaattttaactcccaaatcaagacagattgccagaatgaatttaaaaaaaagagtccatctacatactgtctacaagagactcactttagatctaagcacacacaggttgacaaagaaaggacagaaaaagatattccatgcaaatagtaatgaagacagtaggggtgactatactaatatcagacaaaatagactttaagtcaaaaactggtacaaaagacaaagaacattatatatttttaaaaggatcaattcaccaatgagatatagcaattataaacatacacaaacacacacacacacacacacacacacacacaccgcaaacataagagctcctaaatatatgaacaaacactgacagaactgaagggaggaacagatggcctactgtaacagtaggcttcaataccccactttctataactgatagaaaagcaagagactagatcaaaaaagaaacagaggctgggcgcagtggctcacacttgtaatctcagcactatgggaggctgaggcgggtgaattgctcgagtctaggagttcaagaccagcctgggcgacatggtaaaaccccccccatctctactaaaaatacaaaaaattagccaggcatggtggtgcacgcctatagtcccagctacttgacaggctaaggcaggagaatcacttgagcctgggaggcagaggttgtagtgagccaagatcgcaccacttcactccagcctgggtgacagaagtgaaaccctgtctcaaaaagaggacttgaacaacatgataggccatttggacctaacacatagacaaaaagcataccacccaacaataagcagaatacacatattcctcaagagtatatggaacattcgctgggacaggctattaggccacaagtaagtcttaaaacatttgaaaagactgaaattatataaagtagctttctaatcacaatggaataaaattagaaatccatagcagaaagaaaaccctaaaatccacaaatatgtggaaatcaaatggtacattcttaaacaaccaatgggtcaaggaagaagtcacaagggaaataagaaaataacttgagacaatgaaaataaaaacaccaaagcttatgggatgcaacaaaagcaatgctgaaagaaatttgtatctacaaatgctcaaattttaagatctcaaatcaacaacctagttttataccttaaagaacaagaagaacaaactaaacacaaagcaagcaaaaggaaagaaataataaagattagagcagagataaacataacagagaatacaaaaaaagagaaaaaaaaatcaaagaaaacaagagctggttcctcagaaatatcaacaaaattgacaaacttttagctaggtgaagaaaaagagaagactcaaatgcgaggacattatgacccattttacagaaacaaaaaggattataaaacactactatgaacaactgtatgccaccaagttggataacctagacaaaacggacaaattaaattcctggaaacacaacctaccaactctaaatcatgaaaaaataaaaatctgaacagatctataactagtaaggaaacacccaatgaacaaaagttcaggaccagatggccttactggtgagctctaccaaacatttaaaaaagaataccaatcttcctcatacttcaaaaaattgaagagaaacacttccaaactccaaactatgaagtcagtattatcctgataccaaaaccaaaggcactaaaactacagaccaatatccctgataaatatgttgcaaaaatcctcaacaaaatactagcaaagaaaattcaagagcacactaaaagaattacaccccatgaccgtgaaggatttattcccaaaatgcaaggatggttcaacaacaacaaatataaatcgatcaatataatacaccacattaacagaatgaagaaaacaactcatgatcatctcaattgatgcagaaaagacatttaacaaaatccaacaccatttcatgatttaaaaaaaaacactctacaaacaaggaacagaaggaaactcaacataataaatgtcatatatgaaaagcccacagctaatatcatactcatactcaggactgaaagctttttatcagaaacaagacaagaatgcccacttttaccacgtctgttcaacatagtactggaaatcttagccaaaacaattaggcataaaaaggaaactaaaaagccatccaagctggaaagaaattaaattatctgtttgcagacaacatgatattacatgtagaaatgcccagagtccacaaaacacccccaaagccaaacaaaactgttagaataaacaaattcagaaaagctgcaggatacaaaaatcaatacaaatcagtcgcatttttacatgttaacaatgaacaatcctaaaaggaacttatgaaaacaaattatgatagcatcaaatacaataaaatacttaggaatatacctaaccaaggaggcgaaagacttctacattgaaaactacaggccatcatggtggctcacatctgtaatcctagcactttggaggccaaggcagggggatcgcttgaggccaggagttgaagagcagcctgggcaacatagcaagacctcaactctacaaaaaaaattatccgggcatggtggcacacacctgtagtcctagctatttggaaagctgaggtgggaagactgcttgaagccaggagtttgagacaagcctggacaacaaagggagaatctgaatcaaaaagaagaatgaaaagaaagaaagaaaaagaaaaggaaaaaaggaaaagaaaactacaaaacattaaggaaattaaagaagacaccaataaatgaagatattccatggtcatgattcaaagacttaatattgttaagaagtcaatactacccagagcacctctacagattcaatgcaattcctaacaaaataccaataatgtttactgcatatatagaaaaatccattttaaaattcacatgaaatctcaaatagccaaaacaatcttgaaaaacaacaaagttggaagactcacacgtcctgacttcagtggggacagacacacagacagttctatattgcaacatgcagaccaatggaaaagaagaaagtccagaaatcaactcttacacatatggtcaaatgatttttgaaaagacttgcaagaccattccatggggaaaataagtttttttcagtaaatgttgctggggaaacttgatatccatatgcaaatggataaagttggaaccttattttacacaacatacaaaaaatcaactagaaatggatcaaagacctaaacataagaactaaacttacaaaattatagggtaaaagcttcataatattgaatttggcaataatttttttgatatgacaccaaaagcacaggcaataaaagaaaaaagtgagatacagcaaaatttaaatgtgtgcaacgaagaacacaatcaagagtgaaaaggcaatctaaagaatgaaagagagtatttgcaaatcatatagctgataaagcattaacatgagtacacaaagcactcctacaactcacaccaaacaacccaatataaaactgggcaaatgacttgaatagacatttctccaaggaagatatataaatggtcaaaaagtacattaaaagatgctctacatcactatcattagggaaatgcaaactaaaatcacaagataccacctcacatcacttaggatggctaccatcaaaaaataaaaataacaagtgttagcaagcatatggagaaattggaactcttgtgtactattggtgggaatataaaattgtgtagccccttatggaaagtgtatgtatggcactttctaaacaaatttaaaatggaattaccatatgatctagcaattctacttctaggtatataaccaaaagaattggaaaaaaaaatggttgttttttaatatctctaaaagtgaagaaaaaaaggtcttgaacaaatacttgtacacccatgatcacagcagcgttattcacaatagccaaaggtggaggcaacccaagtgtccattgacagatgaatggacaaacaaaatgtggtatatacacacactggaatattatgcaaccttaaaatgcaaggaaatttggacacatggacaaaccttgaggacattataccaagtgaaataagacagtcgcaaaaagacaaatgtatgattccacttatatgaggtacctagaacagacaactcgtaagagacagaaagtagaatggtggttgccaagagcttgggggaggaaggagagttctttgataggtagagttaaaattttgcaagatgagaagatttctgaagatgaatggtggtgatggcgatacattgtgaacatactcaatgccactgagcggtaaaactgtttaagatagtaaatcttaaaaccggaaggggaagaaaaaaagccaagcatgagagtgcatgcctatagtcccagccacttgggaggagactgaggcaggaagattgcttgagcctgggagttcaaggctgcagggagctaggatcacaccactgcacttcagcctgggcgacacagtaagaacccatctcttaaaaaacaaacaaaatcccccacaactctgtatcatcatagccaagttgtcaaagttagtatcatcaattctgggacaaaactaaagtctatgttcttggaagaaatatgctgaagtatttggggctcaaggggcaagttgtcggcaagttactctgagtctgcaaaaatagctctatgcatatacaagatgacagagtcaatgacgtggcaaaacgttaacacttggtaaatatcagtgagtataccggagtttatttactatttttgcaactactataaattggaaatatcttcaaaattaaaggtttttctggccagctaggtttgagctgccataaaaccaacaccaaggatcatttatatagaaactaattttttccttcaaacacagtacaggagaatctcttaccattttgaattccccgggtatggtttaaaactttttacttgccaacatcgttaaagttttaccctgtaatagtgaaattttcaggtaattggagcttaccccattaaatgacaaaattgtgtaacttaaaaatctttcttaaatacaacctttgttgtctttgtttcaaatttattttttaatgatcagtgtaaggcttcactagatgcctctgctttttccttctcaagtgtttttgagggtatttgtatgaaacattgcagaaaagcttaggtttttgtctccatctagtggctagctattaccttctaatgcctttatgcacctgctttttacaaagcactatatcccactgtgcttctgcgtttgctggaagtaaatagtttgagagtttcttgtgagcagtgttttagtatctaaacttcattattttagctgttcaaaggcttttttggccaaaagtagttttatgtgtttctgaagatcaaggtgccaatccgtatcagaataggatttctgaaattaaaataatctagttgataaaacgttcttgggcctcgtcatcttgaccttaagagacctctcataattaagtctatagagactattatcacaaaaatagagcaacaagaaacatagctacaagctataatttttctctctcctctaactgctcaactgctctaagctttcggcatagtgattttcagttatatccatatttccttgaagacagtagtatttcttgatcttttctctgttataagcccccatcccagagaaaaatgaaaatcaaaataattatcccaaataagagaaacacattaataagattttgttggtattccatttccaccccaactgaggtactgcaattcaattctgatacgacacacccagagctggcatcagactccacgggtttaagaggtcagtcctccacaatactgcccccacttcagatgcaagccacaagtgaggcatccaggctactgtcgcttctgaccagctacaaatttggggttctcataaacctctcaggtttaagaacttgctgaaatgactcacagaactcaggaaagcactatccttccctagaaaacactatgattagttttactacagaagatatgaattaggagggccagtcaaatgaagggatacataagggaaggtctgggagggaaggcagagcttctgtgcccctgtcctcatggaggggaatcctctccctcccagcacaccaatgctttcaccaaccaagaagcgtcattgagctgtggggtccagagctcttcatcaggtcccatttggcaggcatggttgattaaatcaaacaggtcactgactgcgtctcaatctcccgggtcctgctggcccaaccctctgtagtagctgtttctggttaccagcctccaccctaaagcccaccatacagtcacctcgttagcataacaagagacgctctatcactcaggaaaccacaagtgttttagacattccttgtcagcaaccaggggcaaaggccacacaaattcctcattataccacaatgagggaggattgaacctctaagggtcacaaacccctataatatcataagattttttcccacacaacaagaaacaatctttgcccctattaagaatgtatcctctaagaaatgaagagacagccccccaaaaaccagaatgaaattttattgtgtaaagtttatagaagtatgactagtattcctttgtacaaagtacacaacggttttaaatataactgagagaaatgtgagtcctatgacaacatctgatacacgctgaaccatttacagacacactaaaaatgttttaaaatatcttctttctccaaagagtccattgcgcatttcttagagtagagatggggacacattccaggcaaggtcacaatggcattttgttgccctcaatgctgattttcactgcgtgtgcagatctgctttttttccttatatctgtgaactttctcatctgtttatccagtcgactgatacccttcttggaggtcgcctgaaactaagagtaagggaaaaattaaagagcaaactactgaaatacgtaagtctagttatgtctttcatcttcttataactgagttagcaaccagaagagcttctagctctggaataaccagaatgtgtgttgatgacctcaagaacaacaaagcaagtatagatggtgttagaaacgcatattaaactctctcagtgaagaataattctgttgtctgtgctttatttttaattttgctgcagtccatggaggtctcctagatgggagaaagggggggggaaactgagactatgatcctcccaattccatcatgtacattacgttttaactgcatgcgtttccctttcgaagaccaaatgtggagctagccgcttgacatgcactttcaaacagtgctggcataaaaaagaatgacctaaagcaaagtcaggtcagctgagaaaaagccttaagcataataaatgaggttagatgattagtgaagtaaacccctaagtgcaggagctcttgagtttttacacttggggtgaatccctgctctaattcagtaacttctgtgaccctgggcaaagcatacccagggtaggtactccttccagaactgctgagagaaggaaatgagatagtgatgtcagatccaagcacagaggctgagcacatatagtcagtgctcaaaataataggagctattactattttactacttcacaagcaactagatttacattaagtatacttgacacaaaaagaatattaagtctttacccatttgcccttcatgtttaaaggtttggtttgggggctattttatattttgaaaatactgccttgcaaagatgtggtctccaagaaactgccatcttttagaaatgctagaaaggtttgctgactctgttgtaaaacaattcagatgtttaagaatgatgactgcttaaaaagagatgggtttttctaattcttctccccatacatttactactgaatcacctctgaaactcaattcaaaagaatgctaaaataaggtagggcctgggagacactctggggtcagtaccagcctggtgagctttggtggaatcttatcccacctgtggacccagcctcaactatgacatgaagccagctgagcactaggcaaggaactctaagtcattcttgaccaagagccatgttgacctgtctttctaggaatatctcaattcaaatattattctgtatcgtctcaatacttggcattcgtactctgagtaagcataaaaagtgtcagatgagaaagagctatgccaccatcacactatctcccagatttcctggacagtcccaaatatctgacttccttttagaggatgtgccgtgatcttagtacttgtacttggtccacatcggaagctttacctgctcaaatctctgccaactacacaattcccagcagcttcacacattaactggacttcccttcgcctactcccaggaccctcactaactgtctaagccctgatggatctgtctagcctcagcaatcagggcacacacgggccagtgggttacaaaatatatgactggtagttgcagatgcctacttaccccaagcttgaaaagacagaccagagtacctcatacaccaagttcaatgatctctctcctgattcatcaagggaacgctacacttccttagaaattaagagtgtgtgctacactgctttaccagagcaaggccaaaagcagcttcaattatggtacaactgtgtgaagacacaatgcaaaaccactcaagaatgctcactcaaatggatttttaccatggtaagtaaaaaacaaacccaataaggtataaaagaatacaatcacaatgtcgcttgaaaaaaaaacaaaaaacaaaacaaaaacccagtaattgtctatgcatatgtatgaaaaaaaaagaaataatttaaaatgttaacattaagttgtggtgggattacagatggcattaattttatttatgctttctgtatttttaaaagttcatgaaaaaataggcattcctttgtcattttactgttattttagaagtattccacggagtaaatgaacatataaaaaatacaatgtagcacaggttactacattatttaggagtaaaaaatcagaaatcataaacgaacgaataaacacattatattcatggccgggtgtggtggctcccgcccgtaatcccagcacgctgggaggtcaaggccagaggatcgcttgagaccagcctgagcaagatggtgaaaccatctctacaaagaaagaaaatacataataaaaaaaaaagcaaattatattcaggatagaccattatgcagccattaaaaatgataaatcgactaggtggtttaatgaaggaaaataaccaaaattataatttggtcggggcggggggtggtggggtgggggggttgggctgtgtgtgtgtgtgtgtgtgcgtgtgcgtgtgtgtgtgtgtgtgttttctagagatagggtctcacctaggctggagtgcaatggcatgattctagctcactgcagcctcaaactcctgggctcgagtgattctcctacctcaccctcccaagtagctaggactacagatgtatgccaccatgcccggctaattttttaattttttggtagagatggagtcttgctatgttgtccaggctgatatttagtataattttaattaacgttatcagtagaaaaaagacaacaaatacatcaaactgcttttgaatgctaggaccatgaataatgtttctctttgtacttaaacattttctataattataaaaactaagttcaaggcatatctggaaatacatttaaaacctcaaattgttagccgggcatggtggctcacacctgtaatcccagcactttgggaggccgaggcgggcagatcactagaggtcaggagatcaagaccatcctggctaacacagtgaaaccccatctctactaaaaatacaaaaacaaagttagccaggtgtggtggtgggcgcctgccctagtcccagctactcaggaggctgaggcgggagaatggtgtgaacccgggaggcagagcttgcagtgagcagagattgcaccactatgctccagcctgggcgacagagtgagacaccgtctcaaaaacaaaaacaaaaacaaaaaacaaaaaaccctatttattttttatatttatttacataactttgaaaacaaaaatgatacttaagacaaaaagtgtttcattggaaacccatttccatttcttttcctggacatgtcttttctaatactgctcattagcgtctacaatgtggaagcaagtcctgagtgaatatgcaaccctgctccacctatggggaagtgggaccagaaccagaaacatcagcacacagggacacagccctggaaacacaacctctgctttcaaagcagattggccactaagagtttttattacctattttctttgccatattgtagttcccaattctcaaaaataaaaatgttaagagaaatatgaaagacggctaaaaagagagaagaaacaatgaaaaaggagatggctcatgcctgtaatccctttgggaggccgaggcgggtggatcacgaggtcaggagatcaagaccatcatggctaacaggatgaaaccccgtctctactaaaaatacaaaaaattagccgagcatggtggcaggagcctgtagtcccagctaactgggaggctgaggcaggagaatggtgtgaacccaggaggcggaacttgcagtgagtggagatcgcaccactgcactccaacctgggcgacagagcaagactccgtctcaaaaagaaaaagaaaaagaaaaagaaaaaggacagaagggcaaaaaagaaacaggtacaggggacatggagaggtggtcagggacacggatatgggcacaagaaagaggagggagagagagaggaggaagttcttggcacagaactagtccttctctaccctcgatttattctcaagaaataagaaagtacgttttgttttgatagtcacttaatagcaacatgaactggcaggtaggagagtggagtcagtggaaacagctgccaaagcaggggtcatggagaagaaccataggcaggcaacacacacacactgtgtgtgctccgcaacaaaggtgccattagtctcaaagcatagtggatcagtgagttgggcttatgaatgttcccaagtcttttccacttctgaccacattttgagtatgtgttaatcaaattcatctcctaaatatttagtataaggctttatgtaatgagttctcaaatgcatgttgctgagccactgacagcaggaaacaagctacctcccaccaggaaaccactaactagtttatatgcctgtaacacatatcactgtaattctgggtcctaacaaaaacctttttcataaaaacgggtaccagtcaggaagacccaaatgcatattagggaagtaattatctattactctctaggatactgataaaggaagggacttccatgtcaatttctaaatattcaagaggccttgaatatcccaaggtgcctgttagggtcattattttgaaactaaaagcagacctggcctcttctgattaagaaagcacacacacacacacttttcactctgactgttgacaattcaagcccatgcacagtacatgcttccttgggaatacctctcgtgtatatactctggtagggccaggcctataggggcatcctgttgccttcaatgctgaacttgacagcacgatgcactttgctgagtcgtttctgttctgcaaatcgcctcttatgcttttccaatcggcttaggccctttttaagaataccaggctagaagtagtagtttgattggagaataaaaagagattactgagaaacactgaagatccactgagcagtatttacaatgataacagaataagtgtctaccctaatcatttgcaatggaattgcttaaaccgttgaagagaaagggagaggtaggtctgctgaagcacgtaagctctgtttctcatggttattaaaaaaaaaaattcactgtatcagaatactccaggtttcaatttcaagccttgcttgaagtaaagggattaataagaagaaacttccctacctgataatgttgaattaagactgaagaaaaattcatcagcaataaactttaatcctgggtaatacttttcctttctctattgctcaatttgtggtttggctagataagcgaccagaaaacagtcctctctgaatcagacaaacttcaagagctacaagggttattaacacatgaagtaaagagtcaaacagtaatctgcaggtgagatccaccttgccgatcctccgcttgcttaccctggatgactccatttccacattccatttgggcctgacaacatagtccttgtttgaaggcattgggacccttgcacgggcacagaatccaggatctccaggtctaagagccctgaaaaagggaagaggaagagcatgcttcttatgtggccagccacagtggggcacataggccatttcacactcctgttcctacatccacccattaagctgcaatgttcgaaactcctctactccccaccaaaggtcacccaatccaccctcctgccgcctcccagctagcctgtcatcacacacactacagtatgcattcctcacttctcttccaaagccaacttgctctgcatttgcatgaatccttttctcctctcctcagcttcagatatactcatgcccctctgccttccaaggctagtcccgcccgcatgacttggaatccccttttctcttgtatagtggagtcactcatgagttcacttgtgagatgaggaattgtgaagaattgagtcgtcaaatgacccccaaaactcccagtatgcctataaagtagtttttcaatatacaactcatacatcaatttttaatgtttatttttgtaaaaatcttttgaagataattacagattcaaatgaagttgtaaaaaatgatagagagagagatccaatgtctctcccaatagcaacaacttgcgaatctacagtatagtatcacaaccaggatactgatgttgatacagtacactaatcttatttacacttccccagttttacttgcactcatttatgtgtatgtatttagttctatgcaaatccgtgggtaaccatgctagactaaaataagattactaaccttccaaagtaaagcctatctatggatgcctgggcattcaaaccattcagcatttaggtaactagtaaagagtggatctatgtgtgtctgctggggatggggagagaagggtaaaaaattctcaattgtttctattctcttgtacagtttaccccatttttaaccctaaacttgaatctcgctctgttgcccgggctagagtgcagtggcacaatctcagctcaccgcgagctccacctcctgggtttgtgccattctcctgccccagcctacaaagtagctgggactacaggcgcccgccaccacgtccagctaattttttgtatttttagtagagatggggtttctccatgttagccaggatggtctcaacctcctgacctcgtgatctgcccacctcagcctcccaaagtgctgggattacaggcgtgagccaccgcgcccggccaaccttaaacttttataaccttcatatatatatgaacagactaattggcttgccaagaaaattccctgtaactcttactttccttctgaagccacggtctcatcaacttccttcctaaacaaacttttcctctagctcatcccctattctcttcttgcaatcgggatgctgcctgactaccaacacacctgcacaaagccctctgcagcacctgccactggcccatgcttttgtcattgccacctccagctcagcctcattcccctccaggctctgctccaacgcacaggaccacaggtgctcattccccttcgctggctgctctgcctggctatgccccctttcaaaattgtttagttcgtttcttactctatactctcttgattgaacaatcttttctatggagagaaccatcaaatctaggtctctagcccaaacatctctttacaagttctagacccataatatttatagggctatctcattaggcatgtcacatttaatatgctcaaaagagaacttgcctggtccctcaaatctacttctccctccattttggtgaaaggtaataaacactgtctcagcactcaggttaaaattttggctgaggtcttcaactctagccatcttctctcccactaagtcaccaacatatgacagctttgcctctgcaatgtcttctcacccctctgtttcccaactaccacctctgtttagctgtatcactgcctcagtcccactgccctccaatccatcctacatgatgccattggcatcagcaccctaaatcaaatcaaaccagatggcttcacatccagcctcaaaaacttcctgtggaatcacaagacgtgaaaattcctcatcttgattcaaagcccttcaccggtctattatttccaaccttatcttctaccacctcaggccccatactactgtccaaccccttcagtctacttgccattccaaacacagacctggcacacttagcccatggctttaccaaagacctccctttgcctatcatccttgtaaagacttacacttttgagagcatagactatttttaatttgtttttatattctcagagcacaacaaggagtctagcacttagcaaacagcaataaaatctttattgaatgaattattttctcaattttccttacatccccagagtacccaatacaatgctttgtagatactaaacgttaaaatgaaagtcacctcccacaaatgagagcataacatcatttcatttactacttttcttaaagcagcaaacggaaattctctatatagtctaggaagaaaaattaacattaaaaccttacttctcctctcctgtcagcaccttttccaggtctcttctgggtgtctgaccaccagtgctgaaaaaaaagtaaacaaggagataccaggaatattagaacctaataactcagaaaaagagcaaactaaaaatcaaacttagaccataactattaatagctcttttacgatggatcagggaaaataattcctaatctttaaaaagtactactcattttagtattcatttgcataacaggtttccttgtggatgagccgtaattgccacatttgtaactaatgaccctgtcctcctggatgcaactgtatccactattatcaatacaaactaaaactataacattttttcttctaggaactcggaaacgggacccagaaagttgttttctcaagtggatggaacaacacaagcaatcagtatcctgaaacaggccctgttccaacaaactgacccagaaaggtctggttaggaggacaggaccctcactatacactatcacatttaaactaaaaggatattatgaattatgtacacatatcaagctgagaggaaaggaaatcctatcatcttgcaggcttcctaatgatcttacttaaaactgagttactgcaacaataacgtgtattccacttactcatacctgttccctcatacctgttcattcttcgtcgttgaggcatctgttctagatctctctgctccctttcttctcttgtcattcctttgtagtttgaggtaagaccaaatataggcctagaccactcatctgtagtaagaaaaaaatcaattattttgtccataaaattgcatttccatttttttcaaataattgcaccccagtgtgaggggatattctagacatttagaatattctttccttgaagagtccattatttcagagtaatttataggataaacaaagcataatgccagtgtactgactgactctggctgattcagaaaatttaatgtaaaagatcaccacagagatttaaagaaagtaacatgtgatacactttaatagtcaacaattagctggattgacatttcataaaagacatttatttaaaatttttatttatttattttaaaaggcagactaatttctaagtttacgctactggaaataaaaaagtcttgaaattctgctttcttatcctaacccagaacaaactcctttacaactaccttacaaaatggtctgtacctttaaaaattacagtttaatagtgcgggtggagactttgtacttcattaagtctaacatagctgctacaatgaccatgaaagaaagtatatgccactgttcagtcagtcaaagtccaggagccaactgatgtctttgttctaagacataatgtagcttactgctacatttaatacactataaaaacaagaaaggacctttatagaccgaacatgggtgctgtcacacaaagaaggaagcagggattctcagggggtccacgtatcttttaaaaccaccccattgaccccacttctggattcagaatcactgctgtagtaagtcatggaaaccagtggggatattctgcttttctcagtctagggcaaaaaaataaagttgcaaactactgcataaaagcaccaaaagtttattacttaacaggcagtaagctgcagtttactgacaagatcaaagatggtagtatatctctggtttatagaagaaatttacatttctctaaaagcttttgataaacttaacaattcaaaagaaaaataattattctattcgaacgtagtagttactttttcaatctagccttgaagttctaaaaattccttttcaacatggaggacaggaagagttaaggaggacaacaaaaacaaacacgggtttcattcgtaaaactgaagaatttcacaaacatggcgcttgattacataaattttggtttagacttctctggatttctctggcatcattaaataagaacatgcaaaaaggttttgaagaccattgtgcaagtaacaacaacaatggctgtttcttgagtacttactatgtgctaagcaccgtgctttagacacaacctctcatttaatctttaaagtcacccaaaagaaaacacataattatctcaactttacagagcacaaatcactagctaaggaaatgcagtaaggtaggtggtggattcatgatctgaacccaggtaatatcaactccatggcctgcaatctaacccctctctttctccatgctctcgacccatgactagaaaatgcatactttttacttgcaatttttttttttttgagacggagtctcgctcttgttgcccaggctggagtgcagtggcgcgatctcggctcactgcaacctccgcctcccgggttcaagtgattctcctgcctcagcctcccgagtagctgggactactcgtgtataccaccatgcccggctaattttttgtatttttagtagagatggggtttcatcgtgttagctaggatggtctcgatctcctgaccttgtgatccgcccacctaagcctcccaaagtgctgggattacaggcgttaagccaccacacccagcctcttacttgctatttttaatactgaatagcatacttaattatattgaggtttttttttaaagtctaagagaaaatgctagtacctgtaagaagttattcaaaaatttctattccactttaccgactcgtttaaaacaaatactggtaaaaatacagcttttatatatacgcatctctctcttatctatacacataaacacaacaaacaaaaaggaaaatttacatactgattaatttccctgccatgtccttgttagaccttgactccttggggtgtttatagagatacatcactgctcgtccaatcccactatgcttcagggtctcctggctcacactaggcagctggggaacataaacacatacacacatattaatcactcggaagctgggggtcttgctagtctattctagagacctggcacattcacaacagaacaaataaaaaattccattttcaggatctacagacatagaacacaaagatactttgtgtccacatcaaaagttcagagttcaggccaggcatggtggctcacgcctgtaatcccagcactttgggaggctgaggcgggtggatcacctgaggtcaagagttcaagaccagcctggccaacatgtggtgaaacccatctctactaaaaatacaaaaattagccaggtgtggaggcaggcgcctgtaatcccagctactcgggaggctgaggcaggagaatcgcttgaacctaggaagcggaggttgaagtgagccgaggtggtgccactgcactccagcctgggcaccagaagcaaaactccgtctcaaaaaaaaaaaaaacaaaaagaggttgagagctcagtattacagctgagttgaagtaaaacctaacaatgtgagaaagtatgaaccaagcgtactcagaggttagcagtttaatacaggagccagcacaggcctcagaatccaatagacctaagactgaacccaagcacagccaccttctagctatgtgaccttgacgagtcgtttaacttctctgcatcttaattccctcatctgtaaaatggaaataatacacctaccttctcagtttactgtgaggaaaaaacgaatcaatacatatataaagcacctggcacagtgcgtggcataggaggtttccttgggaattccttcagaagttaaatagcttacccaaggtgtcacaactacgtaaggtggcccagctcaagattcaaatgcaagttcatatgattctgaatttggtgttcattctgcgtcacatttctccctggaacttgcccactactgtactactcttctcagacacattacagctactctaagattttttcccttcaatgcgatagttacatgaagttttataaggtcttccctttcacgctcattttattagatatgttccttttttccaacccctcttctggcaggctgtagcagagataacatataaaaacactgtaaactacacaggttatgaccatacagaccacattagataattaataaagaacagtcagattatctgcctctaacctcttgcaggatcttcagcagctcctcccggatcttgagtgcaggcaaactcctatctggtagaggtgagagccattctttgatggcagacatcacaccactgtcaatgaatgtttctttaaggtcctgcctgcagtaacaataatttttaaaaattctgtgaaccttggttctactgtatcttccgacttttcttacatatttagtgatgtttctaaaaactgcttttaaagcgttactcatataaatttgacatttactgaacaccattctggtttcgaaagcagtatgacatttagttcttattttccagaaatgcatatacttgacaaagatgatttgctgaaaacaaaacaaactcaagttacacaagataaattaatgctgatatgaatggtacagacagtaagaacaattaactccaatcttttcaactaaaaaaaaaaaacgttcaatctatcaaaatagtgattcttgaacagttttacatggtggtgaacccagatttgctcttctctgcaggacaccaatgagactagcactccactggcaggacaaaaaaaaaaaaaaaaaactcaataaaataatacttaaattccattttatgtactggaatcagttatgttaatagaaaagataacattatatacataaaacctgccacagatagtttcccctgttagaatagagggagaaattttctagttacagatgctctaggccatgctggtggcagctcactgatgcaccaatacatttcctcagtcatcaaaagtaggctgtggcttagttcaaagagaaagcaaggttgctcagaaatataagcaaatcagggcccggtgtggtggctcacacctgtaatcccattccagtactttgcctttggggtgttgagacgggaagatcggctgagcccaggagttcgagaccagcctgggcaacacagcgagatcctgtctctaattaaaaaaaaaaaaaaaaaaaaagcaaatcaatgaaaaaagttagaaacaaggatctactcaaaaagggcatcattacttcagaaggatcaataattgtgacacattagagtcatataagccttgtacaatgcagccttcaggtaggatcttccaagatttactattttccatcacacggagaaaacagatgcaattttaccagaccaaaaactgtctataaagaacaaaattagtggccaggtgcagtggctcatgtctgtaattccagcactttgagaggatgaggtgggaggattacttaagcccaggagttcaagacaagcctgggcaacatagcaagatcctgtctttaccaaaaaaacaaaaacaaaacaaaaaaacacaaaattagtagtttccaagtttttctttcgttagtatcaattttttatttgttctgtttgcaccaggcatcaaggcttaataaaaatttatgaagaaatataatttaggaaattttattcattatctttctgtgaaccgatagaagtctatcattatttaatattcctagaacaccagtacatcatttgaattatcattccatgaaaaggaaaaagacattttaaagaaaacaaaatacttacttcttaaggtgcataactacagcaggcagtaaagttaattttttcagtgctggctttttttgattgttcaactgtctgtcttcctattcagaaaaaaaataaagatttttttttaaaacagtactttttattaatattgaattcactgtaattctgaaccttaaaataacagtttttcaaagaaacaatttttcctacaagaaagaataatttaagatggatcttctgcagagcaccaagctctgtatctgtctatgtcagtcaaacccaaaaaactattagaataattgcctttaacaactacaaattgagagaaacaattttaatgtagaacattagcataactgtcaaattttcagagttcattaaaggtacaaattaaaactgggaaattctggtttattatattaggaacaattttccaggtgtgaggttatatgatattggaatatactatatcaaagaagagtttcagtattacttgggcagttttttctatttttttaaattatgaaaaatttcaaattctacaaatatagaataatatacctgttgcatatatttcaacaactgaatacacatagctagtcttcttttagctactttccctccattcttgaattgttttgaaagaaatcctagacacagatcattgaatccatgctgaactctcaacaagtgtctccaaaagatctgaacttgttttttaaacatactactgggccaatttttataagttgagcagatttttaaaatgcaatgaaagaagccgtgtcttgatcaggagcaagagaacgacacatgaatttgtaacaccttttatatatgaagaaactaaactttgtggtgaactagccaaatctgagaacaaaaccatttcccatgaaactagcaaagccattcacctaaaacgtttcattttactgaatacctcatattttcactttttctaaacgtgtgactaaaaaattaaaatatttccatgattaaaattgagaacagtaaatgctttattacaaaaagcaaagcatcttaattgtagtttaagggttaagtatcaaaaaaagggcatccaataaactcagtgggaggaaaaaaaggtgaacctagaagcgacccagctcacctcagcagcttcattcatcttgacgatcatggcactcacgacgtcgtctgcatcactaataaaggtgccaccatcgcggttccgtctgcgcttgccactcatgctcttttttcgctgcaacatcatctcaaaatctgacagaaagtccatactaaagcagtaaacaaaagcaagtgaaatacaagttgtcttttaaatacacatttactttcacaacaattaagaacaccaaatttcttaattctaactcaatgaagtgctaccttcttttaaaagtgcaaatacagtcatgcgccgcataacgatgtttcggtcaatgacggactgcaaatacgacggtggccatccagtaagctaaggttaactttttattgaagaaaaaaatattttttataaatttagtgtagcctaagcatacagtgtttataaagcctatggtagtgtacagtaatgtcccaggccttcacattcactcatcactcacccagaccaaattccagtcctgctttcattcatggcaagtactctaaacaggtgtaccatattttatcatacacacacacacacacacacacacacacacacacattttttaaagagttggggtgttgctctgtcacccaggctggagtgcggtggcacaatcatagttcaccgtagcctcaaactcctgggctcatccttccaccttagcctcctgaatagttgagactacaggcccacacaacatgcctggctaattttttaaatgttttgtagagacagggagggcctcactatatgtcacccaggcttgtcttgaactcctggcctcaagtgatccccctgcctcagcctcccaaactgttgagattacaggcataagccaccacgtccaactatattgtattttaactgcaacttttctatgtttagatacacaaataccattgtgttaccactgcctacagcattcagtacaataacatgctgcacaggtttgtaccctaggtgcgataggttttaccatacagcctaggtgggtagtaggcaataccatgtaggtttgtataatactatgatattgatacaacaacaaaatcacctaatgacacatttttcagaatatatccctgttgttaagcgacgcatgactgtacttagaacctgctattaaaagaacggttgatcctagactttatttcaattcctgtactaccctgttatatatacacatataaatcgctaatagcccggaacttttcatgcactatattcacacttgcatctatcagtttgagaaagtacattttaagttccaatgcaggggattcattcagctttagtggcactgccctttcttggactaggaaggtgttcaattatttgaatgttgtggtcttatatagcatgagtagaaaaaatgaaaaataaactgctgcttttcagtgataggaagtataactctcaaaacataatgagagatacacatggaaaactacaggcttgctaagcgcctcaaacctttatggctttcatcagaatcattacacttaaaaaagagggagttaagttattgtctgccactatcctatcaattcaatttccaaaagtactgccaaactcattcagtttaattactgcatgccactaggaattaaaaatgaaactattttttaaaagcatctttacgactgaaaacagtaactaatccttctattaccgtatgacatcttttaagatatcagatttttctgaacatagattccaactagctcaactaaagtaagtgaaatatggtcaagtaatattttgtagttaagatgttagactatttcccctgccccacaacatcagcttgtctctcaaaaaggtatttttaaaattaggttatttttcataagagtttacttggtgagccataaattaagtctggtgccatataaatacaactccacaaagtaagacatctgagcacagggtaaatgaaagacaagtaacaacagcaggtaattcactgacaacaccgtaaatggagaaaaacaggaatagacccactcctaaacttaatcaggaaccaaaatgaaaaacaaaagagagtttaatagtctctaccttgatttttaaacttctctttaacaaattccttaaaaacaaacttactgttttcctctctttatgttatcatcagaatctgaatcttctgcttcttttacctgtgtttcacctttttcttcttccagatcttcttggttaaaaccctaaatgcaaaattatcacaacctccttacagattttcttctgtattaagtgttcttaatattttgcatttttaaagtaattcattcacaaagaacaaaaattcaatagatatcaaaaggtacataacaaaaggtccctctccagccactagtgttactaggtttcttgtgtttccttccagaaatagtctgtttatataagcacttctacacatacttcatatcctctcttattacacaaactgaagcatactattcagagtgggtacaggataatgctctgcatcttccaaatttaagaaaagaatctagaggccaatccatgtcagtattaagtcttgtcatttttttcaaggctttagactatttcacaatatggctgcaaccacaatttgtttacttatttgcctagtcacatttagttttatgtatatgaaattgcgaaatacttgccaaactgtattccacagaggttataccaattatctctccagcaagtatgaggactcctgtttccctacgtactcactactacagcaaagatatcaaacattgatacccaccaatctctggatggaaaaacaaatctcagggtaggtttatttgcattttcttactatgggggtaacgttgggcattttttccatttacaaagccatgtgtcattctttctctgtgaactctgaacattctatgcccattttttgctggactgttcatctttttcttatcagtatgtaaaatctctttgaaaattagatatagccccctacaagtgacaggaactgtacaatccccacatttgtacagtctgattttgtttatgctaatatttgccaggcataatttttctttttctttttttttttttgagacggagtctcactgtgtcgcccaggccagagtgcagtggcgtgatctcggctcactgcaagctccacctcccgggttcatgccattctcctgcctcagccttctgagtagctgggactacaggcgcctgccaccatgcccagctaatttttcgtatttttagtagagatggggtttcaccacgttagccaggatggtctcgatctcctgaccttgtgagccgcccacctcggcctcccaaagtgctgggattacaggcgtgagccaccgcgcccggccaatttttcatttttatgtaaatgaaatggcctgtcttttctttatagtgtctaccttttgtgttatacttagaggctttctcaatggttcacctagtacaatttttttctaactgaactgaaactataaccaagttgatgttaagtctccaaaacaggtaagtataccttattcttacaatatggtgcttaactaagtatgagctccatgaaggcagtgtccagtctctgaaacatttgttgaatgaattcttcctttatatttttctcaggtttactttcttatttcactattgtcctgaattagattctaaattcatctaccttcactctctattgcattggttaaaaataagtattgttttttttttgacccaagaactatttaagcagggtttaagtttctgagcggcaaacagattggaaaatatatacagacacttgatatatgacaaagatggcactacagaatagtaggaaaggatgatcttttcaataaatggtgctgggtcaactggatacttcaaataaggaaaaaaatcttgactcttacctcataccacatacgaaaccaattctaggtgaattatacaattaaatgtgaaagactgaataatcaagcttctagaagataacttgtatcttcacgaccttggggacaggcaaaaattcttaggcagaattcagtcttcaccataaagaaaaagattggtaaatttgatcctatgttaaaattaagcacttttgttcatcagaagactccatgttaacggaatgaatttaagatattctaaaaaaatttttaaagaaagactccattaagaaagtgaaaaagaagtaacaaaatgaaaggtatttttaacattcgtaattgccaaagaggattatacgtggattatatagagactgttccctggttttttcgatctgcttcttctgtcagttacatttctcttagattatggacttgtccatttctcttttcagttctatcaatttttgatttttaagtgtgcatatatctataaagccatgttattaggcgcaaacaattttaaaatctttttatcgatataaagtgacctctttatcttaagtacttttttttgccttaatgtctacctccctcttttataatattatagataccacaacaattttcttttggtccatgtttacacaaagtcccctttcatacacctttattttcagctttaccttctgtttcagacaaatctcttgacatcagtatatggctggtttttaagatcctgtctggcaattgttgtcctttaactggaatatttactatttacatttaatttaatttctgatattatcaaaatttaaatctactattttaccatgtaatactttctaattgtcccttgtcctatagttctttctcttttcctgctcattttcgactgattagttctagttgttccactttccccccctattagtttagaaattacacattccattttagtcttgttagtggtcactttagagactacaacatgcaccctaacttatcagtttactaatgtacattcatacacatttgcaaaggcctatgagcacttcaattccacgtatgctcccaatttactgctgtcatgttttaattttatatatattccacattaaatacatttcattttgtatagtcaatactcatttagacttatacacatacttttgttgctcttttctccctcctgcatctctaaccttccatctgagatcattctttcttgcatttctttccttctgtatttccttcagctggtacactgttaattaattccctccttatttcatcttcattcctggaaagtatttttgctaaatttaacaaaattctaggtttgcagttagtagattctattgtttctgttgtgaagtcagctgttagtctaatcattacttttctgaacgtattttttttcccttgtggctgcttttagactttcctattttcgttggtttcttgcagttttattacgatgtagttaggtgtagatttctttttgtttatcttccttgcaatgtgtacaacttcgagaatctatggtttaggtatcatttccttttaaaatactgcttctgctatacatgtaactttccctctcctttcattattccaatttttgcgaaaacttttcgatgtatagtctatatcttttcctttcttctgtaatactgtatcttgaagcttcattccagatctctccttctaagccatcttccagttcacttattttcaagtatgtctaatctgatgctaaactcatccactaagttttctgttttccccaccccctcccaccccatttttcttttcaaacagggcctcactattttaccctggctggtttcgaacttctgggctccagctacccccaagcctcagccccccgagtaactgggactaccagctacttgcacctacctacctgtacatcgagtttttaatttcagttactgtatttttatagttctaaaatttctacttggttcttttccaaatttgccttctttttgtttgctctgacattttgaatcttgtttcttatctccctgaacatatttaaggtggtatctaaaattcctatatctagagccctaagtctattactattgtcatcattactgttaccttttaatgttatttttgtgtataataagtacatatgaaaaacttaaaccactgtaatcttatttctgagactgagattctctagtctgccagaagattcaaagatggcctaaaatctgagcaaaggctattttatttccccctaaatcttatggtgctgctctctgaagtctcaatccagggtatggggtttacaaagccccctaacctcaataggccccgaactctaaattttgtccccaagccttgaggctgtcaaaaatatgagtagcctctcagcctgacaggcaaacacccccacagaaaaagcacttctaaacactgaattaccactttaggtttctcttggcttagtaattctttgctactttgttcctagataatgagcagatttctatatatttttgtctagcttttctagttgtgcttggcagaggggttagtccaaatcacctagaatgccactgtgaaaatcggaagttccctaattattgtgaatcttgccctttagcattataaagtgactttctttgtctcaaagtgtcccttcccccttaattcaattttgcccattagcttccttttatgtctttgtatatacgctttcattttacttcctgaatccctcttctagatttttatcttgaatacatcataattgtttattcctacttattagaatcatctataatggtatcactgccataaaaacaccaaaaaaaagcacaatcaaggaggaaatatttccatcttatacttactgtaaattcttcttcctcttcatcaccagattctccaaatatgtctgcaataagatttctagaaagtagacaaatgtaaaaacattcatttgctttatcctcatttgcataggaaccattttttaaaaaatagaatttatgtacagtaaaatgtgcagatcttcagtgttcagttcaatgagttttaacaaatatatacactcatgtaaccagcaccctatacactcatgtagcctccccagaaagtcctctcatggccccttctagctggtccccaatatcaacatcctagaaacaactgccaccttgacttccaacaccacagataaattttgcctactgaacttcatgtaaatggaatcatatatgtcctctttgctttctttcacttaacatgttaattctgagatgaattctgagattcacccacattgtagtgtgttcagttcaggaactaaaatactaaatccccaaagacatgcaattaggcaggacatattgtattataacacagacccctctctactgcctaattaagaacccctgaaaactcatgttatactgtcacttactcttcttcattgcctgactcactgtcactcccaaacagatccttctcttcatttttcttatcagacaattctttcccagcttcttcctcactgtcagatgctatggtcttctctcttttgcctgacttgtctgatacagcatcactgtcagagtcatctgcatcagagacaacacgactcttctttgctgctgttgaaaaagaaaatcatcattaattttattttatcacagccattgtattactaagcataacaggtgctttaagatggcagtatacagcaaaaataaataaataaataaataaataaataaataaataaaataaaatcagagggcctcctgacacatggtttagaatttttaaaataactaaatggctcattcagagtcatcttacaaattatctgttattttgcttaagaaaaactggccaaaagatgaagaaagatatcatcaatataaaagcagccacctttccttttgggaaatcgagaaaattaaaactagattgatgggcaaaactggcatcctttctatgttgcctagtagtaactgaactaaaaaggactacatatttctttctaggaatagtctccatgttcctctatcattgctggtcagtttgaaatttctcatctcccttaacaaattgacagcatgtctggtaccttttccttctcctataagaactgtgaggttataatgaaatatgtcttttccaaaaaagataagtttcataaaaaagtagacaagtaatactatctgtgcaaatggagtcttagatagcagagactgaaacactctggagagagatggtgtctctaaatagaatcctctcaaagcttccctgtatctgaatattcaacaatgtttaacaaatgaagagatgtacctgtgggagctgttactgtttggatgggatctagtgaactaagtgtcaaagagacccacagctaacaattaatacagttaggggtttttatgtaaacgtatttctttgaaacattacctcttccagttttaaaaaaaaaaaacagtattttatattcctattgacatgtggtttatcactttgaggcagtcagagattaatatgtgctaatagaactccaaggaaacttactattaagcttagctaatgataaccaggggaaatgagtgtcctactgatattttagaatattaagctgaataacagaacacagatctgacataccaagaggatacaatgttccacagttacaagcttagacaatgaataaagccattgataaacagcccaaggtaactccttacatgctttctcttcatcttcactatcagaaagcacagcagcttttctcttcgctactttctcctcctcaccctctttttcatcttcatcactgtccattttttgctttttgtgttcttcctcctcactatcagaactgtgaaacttttttctgtccatatggctgtctgaatggaaggagtcattctgcatttctgtatcctctcccttattctccctgtcgctgtcatcatctgactctggcttctgtttgtgtctggacgcatcctcagtttctgagtcactggcaggccccttctgaggcccctcactctcagagtcactgactcggggtttgggtagctcctcattttccgaatcactggcctggttccttgggggatcctcactttccgaatcactgattcggggtttgggaagctcttcattttctgagtcactggcctggtgcctcggagggtcctcactttctgagtcactgatacgaggtttgggaagctcctcattttcagagtcactggcctggtgccttgggggttcctcactttctgaatcactgacctgaggtttaggaagctcctcactttcagaatcactcattcgaggtttgggaggctcctcattttcggagtcactggcttggtgccttgggggttcctcactctcagagtcactgatttgaggttttagagcatcttctgtttcagagtcactagcaggactcttctggagctcctcaatctcagaatcactggcgggatgcttcccaacatcttcgttttctgagtcacttgcatgcccattaagaagttcctcattttcagagtcactaccaggtaatttcctggtctcttcactctcagagtcgctcccatgctgattgacatcctcattttcagaatcgcttgcaggaggctctgcacgttcctcagattcagagtcgctgtccttttgcctgtgaagctcctcactttcagagtcactagcattaagatttaagggctcatcgttctcagagtctgtcacatgatgtcctttggggaggccatcttctcgatcactagtttcattctgaaaaataaagtgagaaaaaattaggaaagtgcaaaaaaaaaaaaaccattaataataaaacattaaattttttctgtgatttttttaaaatacaggattatgtgcacctaaatggagaattcttgtcctatacccatatagaaacacccccacagaaagccaatcagtgaaatggttttatttggatccccaaatggggaaatataaccagccttcatcaaaacagatttgtaaagcatgccctcagattactacagaaaactgaccgtgaagagctagattttttcttttttaaaaggcgaattttctcatacatacttctgttttgtaaaaatataactctaggctggacaaggtggctcacaccttttgggaggccgaggtggtggatcacctgaggtcaggagttcgagaccagcccggccaacatggtgaaaccctgtctctattaaaaatacaaaaattagctgggcgtggtggtggacacctgtaatcccagctactagggaggctgaggcaggagaatcacttgaacctgggaggcggaggttgcagtgagctgagattgcaccatcgcactccagcctgggtgacagagtgagactgtcaaaaataaaaataaataaataaaaataaataactctatttttcaaagaaatacaagcaaacatgtaaccaagttcttttacacaggaacattcttgggttttataaggttaagattatttaagggaaaagaactataaaatttaattttatttaaagggtcaaataacatatgggcaccttctcccaagataatttaagcaaacaaagaaaggagaagttaacatttcctaagtacccactaagagccaataccacaacaggctctctcctgttagttcatttactcctcataatggtacttctcatgataacaaaattgaggcttacagtagtcacggtcctgtgtctagtaaccctagaaacaagaaagcttaagttttagggagaacatgattcatctaactataccaacacataatgttacttgaaataattactctgaaaacatgccctggggtacaaacttgatatgtgcatattatagctatggctttaaaatgcagagaaaaatatacaaaattaaacatgccaaaatactaacaagtattttaggatccggtgaattttttctcccatctggtagctcaactttaaataacatggcaataatattctagcttaaaaagtgaaagtatttccgtgtttgagtataccctcttaaaaatttactgagccaaatatttcttgttagatatatgacttaagctatgtgaacctaccacagaccaattttcaaggaccaaagagcctttaataatatatatgcccaacatcatgctatgaaacagttaagtgacaagattattcttgtcaatgacaagataaatggcttgaaaatgttctcataaaacccaaacttttactaacccaagtatgctgtgtctacaaattcaaaaagaatatgaaaaattataaaatagcctacaaagccaatgtttgaagagtttttaaatattttatcaccattatgacagcacagcattgcaaagagtcattgctatacacagtcactgaaatatagcacattcaggtaagtttccaaaatcatacacttttcaaaattcctaaatacatttttcttgagttctcactgggcactcaacacagtactgtattagattccttgtcagtcacaagctctattatcccactgaaacaggcacttatctattaaaacggtattaggacttgagagatatcatagaatcttacaattaccgtacaatagtctgtatgttgcctaaagtttactttagccacacttcataatttaaaagaatgcagatggaaaatttaactatctagattgtaagctctaggaaggcagacatattttggtttgttttcctgaggtatcctcagagtgcagaatggtctccagaacatacacacactaggtagagttcgagcattcctaatctgaaaattcagacaactccaaaatctgaaacttcttgagcactgacatgacaccacaagtggaaaattccacacataagcacccaacacaaactttgtttcatgtgaaaaattatttaaaataatgtgtaaaattaccttccagctatgtatataagacacatgaatttcgtgtttagacttgggttccatcgccaaaatagctcactctgtataagtaaatattccaaaactcgaaaaaattctaaatccaaaacacttctgatttgaagcattttggataagggatactcaacgtgtatttgttaaatgagtaataaaggccttaagtgggaataacataaggtgaggaaaaattaatccaacaagaatgtatttcatgtctactacgtgcaagacaccaagaatccaggcggagtatgtcacagggcctgaccttaagagctgctgtctgatgaggagccagccaagcatactgtaacagtatagtgtgacatgcactattcacaaagtatgtatatgatatttcaaaagtgtactggaagtgcatctatatgaaactgagctgcaaaaaaaaggtgtgcagacaacaggcatgtttgcatgcagtttgtgatggctgagttaagacgggagggtggggagaggcatacagtaccagcagaggcaattaaagcaggaggcaaaaaggaaaattataattggcttttggaatgctctccatgatatatccatcacataactctaacaccatttctatgtgtgacttgatttattttagttgaaactacagaaatcatctctagctaagtccagaaaaaaagaacaatcttctcaggatcaaagtcagttgaatgactaaacacttgggaaggttaagtaccaacgcagcacagagagcttagaaaagggaactcaaggatcattttactagagtaccatcagtaacatgactcagctataccctgtctagaacctaaattataaatccccaagagagatgacttaactggccaaggcaatattagaaactgtgactcaatcagttacagctggatcggggcacagcactgggagtcactcccaaagaagtgagagacactgggcagtcatccaaaactcacccgctacactctaccccagatttcctgacacatggtgtagcattccaaaacaaacccttacaaggacactgcataagacaatgattgtaaaatttaggaatcctcatgaattttttatgagtttcacgaaaacatagcattatgtatggcatgacagggcaaaaaaggggagaaatcactacagtaaagaagtactagtttaatagactcgagctaaagaatacacttagacaacaccaccacagaatttgggacgagtatgctggaaattatacagttaagcttaaaagttatcaaaacaatatccaaagtttttagagtggttttggcaattaaattgcaagcttaaaaaaaatccaaaagacagttttttaaaagtcagatgagtacaacaaaccaacagttgaaactgacatttaatgtcatttctaaaataatgtaacacatttcctagttgtaatggtaaaagaaattgagcactcagaaggtccttagatgctttagaaacatctataatgccgccgggcgcagtggctcacgcctgtaatcccagcactttgggaggccgaggtgggcagatcacgaggtcaggagattgagaccatcctgcctaacatggtgaaaccctgtctctacgaaaaatgcaaaaaattagctgagtgtggtggcgcactcctgtagtcccagctacttgagaggctgaggcaggagaatcacttgaacccaggaagcggaggttgcagtgagccaagatcgtgccactgcactccagcctatgtgacagagcaacactccatctcaaaaaaaaaaaaaaaaaaaaaaaagccatcgataatgcctcatacctccttcttagccatcattcacactgcagttataaatcactggttatccatcataataaacaatcttgtttatctcagtctacaaagaataaccacacttcttatgaccagggccacaatacacagagagataactgacattcttaaactgcaaagtaaataaaactgctataaatcaaataataatttgtaaagtattcaaatttcaaagtattatatcgtcaaatggaaacgtgtatagacccaaataactcaggacactttgtttcttctttactggtgagaagtgtcaaactcaaagtacttgatgttgcatactactctaccattataaactggtaaaatgctcaacactaaaccacacagtacattccatgaggaaatatctataggaccattttcaaaaacatgtttcacgggaccttagttccagaagatatagctgaaactatcatactggactttgtcaatgcgtatcagtttaatgagcatgaaagaatctgagaaaccctgcagtaaaatacataatgctgtcaatccaatgtagttcctggagtgttgcaacactctgagaaactcccaagcacacacttaatataatgaagctataaaccagaatgtcccttgtgtcccctgtctatcaaaagttggttgatcttagaataagagtcagaaacaaaggcactcctgatgaataccagaaaaaaaaattctacacaaagcttgttttttgtttgtttggtttgttttgtctttttgagacaaggtatcactctgtcacccaggctgaagtgcagtagcataaccatagctcagtatagccttgaactcctgggcccaagagatcatcctgcctcagtctcccaagtagctgagactacaagcacacgccaccacgtccggataattttttttttttttgtagagacagtctgtgttgcccaggctgttctcaaatgcctggcctcaagtgatccttccgccttggcctcccaaccaagtttaagattttataataatgatgcaaactcttgcctacctctttagactcacttctttccactcaccatcaaccctatgtgttacaccagcagttcccaaacttcagtatgcttaagaatcacttggggaactttggagaaaaccatacaaacttttgtgcttctcacctccagatattaattcagtgtatctgggaaaggtgtcacagaatctgaattttgacatgtggtccacatgattctgaccacattttagaaattctactccagttccagcagagtggaaccactaactttgcgcctttacaaatgctgttccctttaccaagaatatctttcttctaccttgtctttttcgtgcctaaaaacttgccaaaaatactcgccccatgaagtctcttccatctttctccctaggtagaatggatggactttgtgcaacataatgtgacagttaaggctgtggaatttagagtcagaaagacctgaggtccaagccccagctctgctattttctactatgtgatcaaaggacattttcctaactcttcaaagcttccatgtccttgatctgatggaattaggaatactatctataccgtagagggcagttctgaggactaaaagcatgcaaagccgttagcacagagcctgtgaatattcaataaatgttatgcaccatcagtaacaaaatctcattaattattaattacaaaacattcaccccttcaagactcagctcaaatacatcctgtgacgtctgctgacctggttagccattccctcccttcatatccccatggcatcttgtacgctcacacttcactgaaaggtgatttacacatttatttacatttatctgatacactgaccttaagatcagaggctattctgtaaaaatgtatcttttacctgcagcataaaaaagacactcaaaatacactcactaaaatgaagaaaccccacaagcaatgcttaacataaaataaatggaaaataatgtttgcattaaacattattagaatcaaagacaaagactgaaaactaaaacaggaaaatgtagacagaatcaaaagaactaataagaaataggacagcaatggccaagacaaatcttctagttgttttgatgtactcccccataaggatgctttccttatactaacacaacctcctggtggaaagatccaaacaagagcagactttttcttttactcaattcaagtaatgttggagctaaaggagttgtcactgacttcaagggcagatggctgggcccactgtgctttgcttacagtcagagaaccatgagaagccaggttccattcccaaacaacatcttcctcaatgtctcacactccattttttcctgtgggacgctcaggagggtacttctatatatagataaaatctacaggcttctggatgttaagataagcatttcctttgatacattttccatgaaacagaaaccagctgaatcaaaaccacacagctaattggcaaaaatactgtctaaaagaatatatggtaaaaataacaaaaactagaactggcaactagttacaactaggtcacatttgacggccacccctcacttggtgctcaaattgctttattaaaaagttacatttccagtgattactattcgaaaagatttttacagagttttcccccttcttccctatctgtcctaccacaaaaggtgtgaagccatctaacccaaacttaattattcagcattaccttccattaagctattccattttctagccacaacaatcattcctgaaatatatcaagtccttcttaatgttaggccctgtacctgttgctcttctagctagacagaattaccaccacccctatcgccacccctaacccgtttctccaactggcaatgtctctcattcttctgtcagctgaaatatcttggctactaagcccatcctcccttcctctcagtgcttggtatgtatcctttctacaatgacgcactatatagtagtcacctatttataggtctgccgcacccacatggataccttaaagttttaagtttgcattgctatgcctagtaaacaataaacattcaaaaatgtttattgaaagacatgaataataaattatcacacattatataaacttaagcaagagtgccaattttttgggaaatgcattccaatctaaagatttaattatctggtggggcaccatggctcacacccataaaacccagcactttgggagcgcaaggtgggtggatcacctgaggtcaggagttcaagaccagcctggccaatagggtgaaaccctgtctctactaaaaatacaaaaagtagctgggtgtggtggcgcatgcctgtagtcccagctactcaggatgctgaggcaagagaattgcttgaacccaggaagcagaggttgcagtcagccaagatcacaccactgcattccagcctgggtgacagagtgagactgtgtctcaaaaaaaataaaaaacaaaaaaaaggtttaattaacttgatttggaaaccatataataacacagttggggacagagaaaaaaatgtcaactatccaggctgcacatgaggtacggggtaattgggaatacaaaatattcaaagaaagatgtgtaaaacttctataggcttctggattgagaaatctaaactgcaataccttttcttcaaatttaagaaactatctttccatgtatgcttccaactaatctattaggaaaagacaatttgatacctaattgttataattttttagtaagggaatataaagataaaaacagaaaaaaaaacagctagtaaagaaaggtttatctttattcacatgaaagggttcttcgcaaggttcttctaaatcttgaattttttagtacattttgagttagctcttgcatgcttataaaaatgggttaccatataaaatggcatagtattctaccaaattattttcttttttatttgaaacattaatgagcactgcagaaataagacgaatgcaaatcacacccaaagatcaccatcatttacattttagtcctttcaatctcttctatgtgtaaatttactttaaaaaaattaaactaggacctagaatcacaataatagcctgtatctttcaaataataacagcaggaagcagacaaattcctaggcagataggggtgggtccctggtgaaatgtgaccttcaagccaaagacagcttaaaccctgaaaactgagctgctaaagcacctgaccggaatgagaacctttattcccgtttgcctgctctttcctgagtggttctttctgaataatgctaatttttaactaatcaaatgttgcctttcccaaggctacctacagcccatactccccaattctgagcctataaaaaccccagagttagccacacattggggacaacccacctttggataggggctgcccacttcaagtccccttgctgctgatagctgttccgtcactcaataaaactcttccctaccctgctcactctcggttgtccgtgtaacctcattcttcttggatgcaggaaaagcacttgggacccgccaaacggaggatgcaaaaaggggtgtctaacactgtacccctccctcccgcttacccagcaatgggggagaaaaagtcgctgggcatggcataccaccgttcaccaacgccgtgggcagcaggaacaaataagagctgtagtgcttcttgagagcccagacctcgagactctccaaaacagggttgtaatatgcccctgctcaccaagcccttggcagtgggaactgagctgtgacatccttggggctctgcagttcctggcatctccgagttttcaggcaccaccacatccccctcgtctggacaccggtgccttctatggaaattgctgcggcacactgtgtccagctgcagcctcacacggagccagcgcctgtgtcggtgcctggagctgcccgcccgctgcagcagctgacccgcctggctgtgtgctgtaaccagaccctgcactcactcattcacacaccccttgccattccatacctgtcttgcctgcagaggccggtagcaaaaaccaagtgcagcctgccaggccgagtgggcagggtgagtccaggcaaatccaagtgagcccagagcccagcaaggcccaagcaggggcactgctgaccccagaggtttcctgccaaccggaagtggcactctccaaaaaaatcctgcatcacaagtaacatgttcaattctccatgtcactaaatattctttgaaagcaattccaatagctgcattgccatttttataaatgttctatttacagtttaatcactcattttctacattgttgagtatttgtttcctttcttatgtttattacacctcatttgtccatttcagtgttttcaacccaagggcggctctgggtcttcacccaaggggttagtgggaaattcgaggggctgtttttggtcatcaatgatggggaggatgtgttactagcatttcatttaatgcccagtaaccaagatgctaaatgtcctgttaatatacaggcatgcccccaaatatccacaactggcttgctaaaaatctcttgttcaggaaagcaacacaaggctgctctctctggaggtgtggccacaggcaggacccggaggtcctcacccatacacacatagaggaaactccatgagatgaaagagctcaatgggcccaatacagattgcgctaacagacaagagaagcataataggtccctttgggatttaaactggggaatatgcaaaagcctgaccaatctgtaagagataaacaagaagtcaaacaaggacttttggcatcacagaatgagaagctctaccgacctccccagtgaaaattattaaaaacaaccacttaaagcctctacaaatggtcctaacggcaaagggcaaatgaagaaacgcctacacaaattccacaagagagattacttgaaccaagatcaatccctccttccaacctcacaattcagtgaggctgactccactccagattgctgcagccagaaatacagagttccttctccatcctgcttcagttagagggcttccttcccaggaagagcagggcatcagcatctctcatccggctccccagtgcctgctgctgtggctaagttccgaaagactgcagttgagaagtggagattcccatcttttgcccaaccctcacttgcttaaagaaggctctaccttgggtggaccacactgagaatactggggccctaatcacccttgggccggcttgtgagaccatgccaagagatgcaagctgaaaggatttcaggttactaactcattcccactcctccactccctacccagagctcagtgtttaaaaaaatacagaaggcagcctaggcaacgtggcaaaactccatgtctacaacacaaaaattagctgggcgtgtggtgtatgcctgtggtcccaaccactaaggagtctgaggcaggagaatctcttcaacctgggcagtgagccgagatcgcgtcatggcactccagcctgggcgacagtgagactccgcaccccgcccccgcaatacacacacacaaaatagaaaaggagaaaacagctgaatagaattactagacataagctcaatgagaaaaaaaagaggacttcaacaatactataaatcaactaaatcagatatctaaagaaataggcctggcacaatggctcacacgtgtaatcccagtactgctgagaggccagggtgggaggaaccacttgaggtcaggagttcaagaccagcctgggcaacatagcaaaatccctctccacaaaaattttaaaattagccaggcatgatggtacgcaactgtagtcctggctactcagaggtatgaggcgggaagactccttgtgcccaggagttcaaggttacaatgagccataattttttcacatgcccgctgtgtcaaagtgagccacaaatacaccactgcactccaacctaggcaacagaagagaccttttttaaaaacaaaacaaaacctttattcaacaatatatattcttattaagcgcatggaacattctccaggatagactatgtgctaggccctaaaacaaaccctgacaaatttaaaagaatagcaatatacaaggtttgttcccccactacaatgaaataagattagaaatagtaggaaaagtgtttaggaacaatatgaatatgaaattagtaagataattccatttactaaacatcaaagagaataacataaatttaacaaagaaatcgaacatgtatacacggaaaactataaatcactgttaaaagcaattaaacacttaaatagacatcccgtgttcttggatgaacagactttacactaccaagatggcaatattccccaaactggtctacagattcggtgcaatcccccatcagaatcccagctaacttctctgcagaaatcaacaaactgattctaaaatacacaggtaactccacgagacccagattggctaaaagaatcttgaaaaagaacaaattaggactcatactctccaatatcaaaacatactacaaagcaatagtagttaatacactagtacaggcacaaggatagatgcagacatgagtaagtttttaaagtccagaaatgaagccatatatcctatggtcaacagattttcaacaaggatgccaagaccatccaatggggaaagaacagtcttctcaacaaatggcaatgggataactagacagccaatgcaaagaataaaactacaccccaaaaagtcaggtaataattgccgacaagagtatggagaaatcagaacacttacactcagctggtatgaatgtaaaatggtgtaaccactgtggaaaatagtctggcagttcctcaaatgatcacacagaattacgttatgagccagcaattacctccctaggaataaacccaggagaactgaaaacatatgtctacaaaaaatttgtacacaaatgtttatagcagcattattcataataccaaaagaaacaatccaaatgtcatcagctgatgaatggataagcaaaatatagtatatccatataatggaatattatttaccacaaaaaggaatgaagtactcatgtgtgctacaacatggctacaccctgaaaatattatgctaagtgaaataagtcacaaaagaccatattttaccattccatttgtaagacatgtccagaacaaggacttctatgagacagaaagtatatcagtggttgctgaggactgtggggtggggaggggtaggcaaagggaagaggaggttagaaaggtaacagcaaaagcgtttcttaggtgatgaaattctaaaaccaactgtggcgatagctgggctactgtgaaatactaaagatcactgaattgcacaaattgtatagtatgtaaattgatctcaatagagcccttttttgggccaggcacggtgctcatacctgtaatcccagcactttgggaggccaaggcgggcggatggcttgagctcaggggcttgacatcaccctaggcaacatggcaaaaccccattgctactataaatacaaaaattagctgggcatactggcgcatgcctgtggtctcagctacttgggaggctgaggtctggatcacttaagcgtgggaggttgaggctgcagtgagctgtgattgtgccactacactccagcccgggcgacagtgtaagattctgcctcaaaaaagaaaaagaaaaagaaaagctgctttttaaaggacaggcgattcttttttttttttttttttttgaggcagagttttgctctcgttgcccaggctagagtacaatggcgtgatctcagatcactgcaacctctgcctcccaggtacaagtgattctccggcctcagcctcccgagtagctgggattataggagcctgtcaccacgcctggctaattttttgtatttttagtagagacggggtttcaccaccacgttggccaggctggtctcgaactcttgacctcaggggatccacccacctcggcctcctaaagtgctgggattacaggcgtcagtcaccgcacccggcccaagacaggtgatctttttaaagatcaacgttggtgcaaaaaaacccatgacgaacaaaatatttaaaatgtgaagacaggataaccagtactggtttttccttttccctctggctcaaatatagaccaacacagcattgttactgatcctaactttaaagattttgatattttgttcatttttttttgcattcattttgagttttaaaatatcatttatcttgattactgagtgtttttcaaatcttggagaaaaaaataaagccaaccatacaagaataaacagagatgttattagaaatggccattaggcagggccatcaatgacagatggacagaacaagctacctagacagaaagatttacagcccattacatacatgtgttacagtaaactcttgttttcttaaggtagtctgatatgagacttgttctgtcacctgtctgagattatttatagacatatacaattactttaagaaaaaataagttttttttttaataactaaaggagctttctaataaagtggttaagaaatctgcaaaagttactggtcttcaaaatcttatcagtatttcctatactgaccactatcttaaagattgtgtgtgtgtgtgtgtgcgtgtgtgtgcactgagtaaatactataggtgaaatgaatttaaaaaaaatactagcctaaattctaaaatacagatgaggggtttaaaaaaaaaaataccattattgggaaaattatgctgtgagtaccatcttatggtagcaaaataatggcccttcaaaaatgtccacgttctaacccttggaacctgtgaatatgtcactttacatgcaagggactgtgcaaatgtaattaaggtaaggaccttgaaatagggacattaccctggattatccaggtaggcccaattataattacaaaggttcttacaggagggatacaggaaggtcagagtaagagagagatatgatgacagaaacaagaggtcagaaaatgagttgtgaagatgctatgctgctggttttgaagatggaggaaggagcctcagccaagaaatgcaggtagccactacaaactgaagaaagcaaggaaatgtatcttccctcagagaagaacacagccctgggacaccttgattttagtacagtgtgacccattttggacttgacctccagaattataagataataatttttcgttgttttaagccaccaagttgtatcaagttgttacagcctcaagaggaaactagtatctttcaggctttggacctgtaatttgtactgccccattttttttgttttgtttttatttttgagacatagtctcgctctgtcgccaggctggagtgcagtggtgtgatctctactcactgcaacctccacctcccgggttcaagagattctcctgcctcagcctcctaggtagctgggactacaggcgcaaaccaccatgcctggctaatttttgtatttttagtagagacggggtttcaccatgttggccaggatggtctcgatctcttgacctcatgatccacccacctcggcctcccaaagtgctgggattacaggcaagggccaccacgcccggcctttgcactgcttcatttaatgcaaccgtactcttttaacatcccattacttctaaaaaaaaatgtttaatgagaaaacaaaatgtcttcttaaaagccattttaaacaggcaaaagaacattaatacagaactcaacacttatacacagtacaactggcactcttgaagtactagtggtttagcaaattaccataaccttcctggagaggaatttctatgaagagccttaaaatgtcttagtctctaatctcgttaattctcctggcagctttctaaggaaacaataaaaaatgatcacaaatgtttatgtacaaaaatcttcagggcagcttcagttatttaatacaatagctaaacagcataaatgacaacaattagaaaattgctgaataagtgatgctgcatccatattgtgaaaccattaaacattacgcttattgagaatctttaatgacgtggggaaacacttaaaagtatcatcttaagtgaagagataaaaaataatacataggctgggcacagtggctcacacctgtaattccagcactttgggaggccaaggccggtggattacaaggtcaggagtttgagaccagcctggccaacatggtgaaaccctgtctctactaaaaatactaaaaattaggcgtggtagcgcactgtaatcccagctactctggaggctgaggcaggagaattgcttgaacctgggaggcggaggttgcagtgagccaagatcatgccactgcactccagcctgggacagagtgagactctgtctcaaaatatatacatagaaagacacaaaatatatataataacatctcaagtaaagttaaaatatatagacgtcatatacctgggacagaatgaaactgcaggataaataatgtgaaaaggctcatagtcatttctgtagttggactatgctggttttaatttttttctttaaacttcacagatgcaggagtgcctcaacttattatggggttacagcctgatacacccatagtaagctgaaaatataattaagccaaaaacgcatttcatacatctaatctaccaaacatcacagcttagcctagcctaccttagatgtgctccaaacacttacagaggtaagacctacggttggacaaaatcacccaacacaaaacctattttataatagaatgttgagtatctcatgtaatttactgaatacagtgaaaaaacagaacggttgtatgggtactcaaagtatacatacagcacttgcaacatcgcaaagttgaaaatttttaagtcaaattatagtttaagtctgggacagtctgtgatttccaaattttcaaaaacagccacacttatttatttagaatccatattataaaaaaacaaagatgcttagggtaacctgaacttgtaactgcaccatgaggccatgagatgactaccctactgggctctaaactgaccatgattaatctctgaatgctgtttccaaagaggaaacttaaaatatcatgcactaaatgcactggctgtaacaacatatacattattaagtaacttccaactatcaattaaaatattggaatttattctgaatgtttaaaagcacagaaaaaacctgagtgacatcaaaatatataaaagatgagccttttccacacccgcatttagttctctgacctcccctaccccttaatgaccccatttcagttccactggctccttgaagatatcaagcacactctcaccttggggtctttgccagggatgttcttcccctaaacgtccatatccacacggctattcctttgcctcccttcacaccttggttcaaatgtcactttcttaataaaagacctatatggtccctatttaacaccaaagcctgccctccatcctttgttctaattatctgttttcttcacagcatttgttatcttctagcagactacacaattaaaaaaaaatgtttattgcttaatgtctttctcctcctactggaaaaacaaacctaagaagagaaggattttaacttctagtcactgataagtccaaagcacctgcaaaaagtctgacacatattaggtgctcaataaatacctgttgaatgtatgatatgctaatgttgctgtcaaaggacagagtcaatataatctctaatcacacctactaaaaattggacaattttctgcatatgtgtaatcaagaaaaatataaggcatagaaagttcttaaatctttgcatctttatcattcctatttgtttcagtcgtatctaccaaagacttacggcgaacttattgaaaaatttcccaattttatcttgttaacatgatgtataaacagaaaggaaaataaagcagttctgaaatatttatgtattagagcaaatacgttaaaatgtacacaaaacccaatactattacatattattaaacaaaaacagctcttaaaattatatttgcaggccaggtgtggtggctcacgcctgtaatcctagcactttgagaggctgaggtgggcagatcacttgaggtcaggagtttgagatcagcctggccaacatggtgaaaccccatctctaccaagaaaacaaaaatagctggacgtggtggcctgtgcctgtagtcccagctactcgggaggctatgaggtgggaggatagcttgagcccagaggcagaggctgcagtgagccgaggtctcaccactgtactccagcctgtgttacagagtcagaccctgtctcaaaaaaaaaagcattattattacatacattatatacaccgtaacagttcaaaatcagaagggcaaatgctgacataaatgttgacaggtgataacccccataactttctatttcaagtggtgtttcttcagattgcaaatgctcaatgccccactatgacattattgcagaatagggaaacttagtcaaatatcaaaggccgggcccattttctgaatcaatatgcacagttgaaaactgcctaacatttgaaatgtgacccaatcagaacatatttcactgtgatttcaacagtaaccagaccatccctatttatttttcaagcggttttctattaacttatgctcctttactctcagagattaaaccctaaactctgtcacagagattctgtaactcctataatataacagatctcacagaacgcaagggaaaagccctcccaaagatgttggttagccaatacctctgaatgacgttctacacttccagtgtctgatccggagtgttgctcatttacatcatcctcaccgtctgaccctgaatcccgttcatcctgtactggggtagcaccaccatcatctgattaaaaacaaaacaaaaaccaacttatggtgtaagatgaatgacatctacagtgaaatgaacacactgaatcaagaataacgtaagtgcaaaagttaccactgaggaagcattaactaaagttgctaatattttgaataaggtaatacaatactcatacaaacaccaacaagcataacatgtactgtgaaatacgtggcagcaaaactacaccataaaaacaatttgtagcttaagaaacaacactaaacaccaagtcaacaatttatttcaacttcatgttaaaattgggtctttctctccatggcatttatcaccttctaatatactacctgaagttattttgtttaacgtgggtcttcttcacctgaaagaaaatgccacaagaatagggattttggttcactgctaaatctctggagcccagaacactgcctagtacctgatatacagtaagtatttgtttacaaatgaagaacacaaggaactccagtccaaaactagtgaaaatccattcaagaaaagcatatataaaatggtaaatacaaactgttacctaactttcttttatatttttgtagagatggggtcttgctatgttgcccaggctggtctcaaactcctggcctcaagcaatcctcctgcctttgcctcctaaagtgctgggattacacccagccccaatactttaaaaaatacagagtaaaatcgtattttaacctatatacatgtattacatataattactttttttttttttggagacacagttttgctcttttggcccaggctggagtgcaatggtgtgatctcagctcactgcaacctccacccccccgggttcaacaagtgattctcctgcctcagcctcctgagtagctgggattacaggtgcccgccaccacgcctggctaattttttgtatttttagtagagatgggcttcaccacgttggccaggctggtctcaaactcctgacctcaggtgtttgccaccgtgctcggtctactttttaaaaagtaacttaaaaacacaaatgaatggaaaaaaaactattctgaaagtatcaggaaagtgtttttttgtttttgtttttgtttttgttttttttgagacagagtcttgctctgtcgcccaggcttggagtgcagtggtgcaacttccgctcactgcaacctctgcctcccgggctcagggctcaaaggatcctcccacttcagcctcctgagtaactgggactacaggtgtatgccaccacactcggctaatttttgcatttttttgtagagacgaagtaggggggtggggtaggggcgtaggggggtggggtacgggcatggggggtgggggtggtgttggtctcactatgttgcccaggctggtctcgaactcctgggctcaagccatcggccgcctacgcctcccaaagtgctgggattacaggcataatccaccgcacctggcttaggaaagtgtttttaagcagtgcatgcctggaaaacgctttgcagtcattagaattcactgtcctacgtaaggaaaagcaatgaactcaaaacagtaaagggcttaacgcttaaacaattatttaagcactcaagttttctttttaattttcaatttttgtgggtacatagagggtgtatttatttatggtgtatttaagaacttttgtaacagaacgccccaacaggactagcacacaaagggaaagcaaatgcgacgtgtttcccacaccaggttctgcctcacttatccttaatctcaggtgccaagcaccgtgccagcagagtgggccccagtaacagcttacagaataaacaaacagtaaagaaaggagaccaaacttcggtgaggaggaagaggaacgatctcaaggtggaggaaaggcacaaaaaccaccagtaagtgccagaagcgcattccttactctatgcatgcaactgaaacatgggtcctgcacttacgtccggtgttgcaagcaagattaaaccactcctaactagcagtgaaaagtctaggaaggatcccccgccccaacgccccttggattctccaactactcaactactgaaaactctcttaacagaagacacctctccttccctgcacacaataggagcttaacatatgaaagtgacttcccaatttcagcaaaaaccttcgccgattcagaagaaagctttcccaccagaatcccctctccaacgttctagcttcgacgcttgcagctggtcagagggctcttgccctcctcgggccgggtcgcgggagggaaggtttcggggggcctccttgcccccacccgcggggtgccaggccaagccccgccgagtaactgctccgcctcccagcccggtcccccaggtccctgccccacctgactggtcgccgctgtaatattccgagtccatggcaggcggactctcagcggggagtgtccgcgccccgcgccgcccccgtcacctccttccaggcggtgtgaccccggatggcgcggctaagtgttcagagactgccgcccgaccggagaacttaacgggtgcggagggtaagaaagcggtagcggcaaaggcgaattctttgacctggaagccccggcggaaaaggccgtacccggcaggctggcgggcgggcaggcatgcgagccggcgttctacttcctagaagcaccgctggggccaaaatggcgtctgcccacgaccctcaaaggaatgcagcgcgcaggcgccgcaacccgtcaaccggccaatgagaagacgcaacagcaatgacgccaggcacggccggaaaggagactcctgggaaaattgagctggaactcgggctttagttaaataccttcctcgggtggatcctggtctgacccccgtggtaataacgttatcattgattctttatcatttcctagattctgtgtccgtgccttgtttgaagagcttttgagatactcttccgaaaaatgaagacctgctcaaatgacttttccgtcattcagccaaaccactgtctttcccgtcaggcccagaggcgcctggttcccgcccgcagtaggcaagaaagcgggcgttgctcactgggacttgtagtatgacgcccgcgagctgtgatgcgttactaactggcgcgatccacagcgcctcctctcccggcgtcttcctctctttcattctaaacaacgatttaatttccttgttaagaagccatttagccaacagtaagaagtacacgtctttgcttccagaagggttcccctgatgaaacaccggaggaaggtgaagttgaactttacctgagccctgtgttcctggaaaacagcggtgattaagaaaccccctcatctatttgtgtttctggaacggcacactgtaaagaaccacccgtctccatgtgactcagataaaacgcgtgcagatgacccccttgtttgcctgtgacaaggccagagacctttcccctttattctgagcctgttaataaagccaaacagaccttccaaattcccgctgatgatatcgagtgattagttgagattagaactctcctccccccaacttgttagacacagagaacatttcctgttcacctgactgaaacttctcctgattgcaaaacaatcccaactgtcaatcatcccaccttcctccctataaaagtcaaaactacgctgccaagacactgatcatatctggagtgctctccctattgcaataggctgagtaaaatccatttccttacttgttcattttagtcttggacagagaggggaacattcttgcctttggatcggaggagggccagtagaggtttaagcaaagactccccaggaggtgtagacatgtagaaaaagagccttttgttactactgcagatatctgacccttcgttagccagtcagagtatgctggcagagcccaattataggctcctgaagaggacgtgggaagagaagaaaggggagaagtggtttctctctggaaattcccattttcctgcaagagagttcatggatattcctttccgaagtggtggaaacagcattgaatccaaattccttcttttcagctgtgggaatgacatcttctcaggcagtcttgagaatcaaaagaacaaagaattagcaatgcccgaaaccgaatcacttgatagaagatatcaaggctctaagccctcttctaaagagaaggtgagagtacacctgtgtaaatggagcaggattaatagatcaaaattccaggcggaggttcagtggaagagaaccttttagtttcaccagagatgtaagtccaacagtcaggaaagtggttgggttataaacaatgcaattgccggatgaaaattactgaattttagcgttaaaactaactgtactggtggtttggagaaaggatagaaacactctggacacacaacaatgttcttagctctagaagcctgcaaagaagcatcagatctaatttttgtactcagaaagccaacaatttagtgagacaggacaagtctttcaaatgaatacagagccttagttaaagcagtgtggttgtcagtgtaaacacagcttacggagagttcccagagctccttcctaccagctggctgtccctcctggatcctggtagagaaattctgtagtggcacagatgtgtctttctgagtcttggctgccttacattttcaggactgccatctccttacccatcacaccccaccccagtacagttggcccatggcggtggtagggaggcacccagaagataggctgtttcccacaccaagggtgctaatgacagaagaatggagaggcaaacttgcagcagtccacaatgcttcctcccttaacagataacccagagacgctgcattccctaagtgaatgtaagatttatttggagacactctgaagacactgccatctgctgaacatgtcagggagcaagaggccgcataatataaatagcctggcaccatcagagctgtagactgggggcttagagccctaggctgtgggcctatcgctgggcttattgtacttagtaagctgggacaagctaccagccttctatgagcctcagtttccacatgtatcaaatgagagggttgaatcaggtttcaagtactcttagcttttttctacgtcagagaatccaggtctctaagtctgacccagcttcttgtgcttgagccactagcaagccctaccagggaagacacaaatgaaacttactagctgcgtgaccttgagcaagttgctgaacctctctgtgcttcaacgtcctcatctataagttggggataacagtaccatttatgtcacagagttgtcatgaagctaaatgcacatatataattataatgtataatatgttatatatattacttgtataatattatacatgatataaatatatatattatataatgattcctgggacagaatattgtgaaattaaataattcaaactttttttttttttttgaaatgggatctcgctctgtcacccaggctggagtgcagtggcacaatcttggttcgctgcaaccttcgcctcttgggttcacgcaattctcgtgcttcagcctccctagtagctgggactacaggtgtgcaccaccacgcctggctattttttgtatttttagtagagatggggtttcaccatgttggccaggctggtcttgaactcctggcctcaggtgatccacccacctcggtctcccaaagtgctaggattacagacgtgaaccactgcacccagccaaataattcaaacttaaagctgttggaacttaaattgttctgagtcttgagaggaatgtgactatgcagcctgagtcacatggcatgcagctgcaacttctgccttttttccacctataaataattgagactaagtggtgccagagataaaaccccctcagatcactgccccttctacagagtaataatgtcatcttccttgggatgcagcaatctgtaaccaatcaaatcactgtaacatatgcactgtcttgtatggaaaatgttataatcctgctaaaatttttctgtctgtctctgtataagtaaaaccttaacttcttcactttggaacgctgaacccattcgtttggagttgaggtctcctgggtggctatccgcacactcaaataaactctatgtgtaatcatattttatgcatcttactatttaagattagcaatatatatgttagctattatcattattattaggcattgtgaagatacagaaaattaacacatgattcctaccttgagaagcttacaattcattaggaagtacggctttgaaaaaagaaaatgctaagaggtgaattgtgtgatgtgggtaacaagtaccatgggaattaaaaggagggtgaggctagagtgaacaatcaggttggcttccttgggggagggtgcttgaggtgatatttgaaggacaaaggccgatttggatggaaagataatgtttcaatcatggtaagctaacaatctaccatgtagttatgttgttataacaacatcaacaaatttcagtggcttgacttgataatagtttgtttcttcctcttgtcaatgggcagtggggtcagtggtgaggtggaggttgctctctgctcctagcagtcattcagggatccaggctcttaccatattgtggctccaccatttcccagggcctcagaagcccctactggatgctctgcatgccaccagcagatgggagaagagagtgtgtagaaaggtgcaggatattttagtgggtctagcctggagttagagcatatcacttaccctcattccatggccccttctaattgtgagtgaggcagggaagagtatgtccactgtgggaccaagaggaaaaggaaagtgatcttggtggatatgcagcattccaggcaaggttaagaaatccaccccagtacttcttttcccagaaataaagttctcagcaatgagcctaagagctaggcaaagtatcactatcttccaagagctaggcaaagtattactatcgtcataattagcatcattaacttcatttatttagtttattgagttgacacgtaagcaagttttgcttttccttgtcagtatctcaatctcccccagggcaataagattagtcatcaggatatgccattaaccctggtcatgggacagaggtcccatgtttatggccagtgacctaggtttaaatgctagggcctaagacagatttatccactggattgcccaaagccctctagagaggaggaggtgaccttttcattttgtgcccctactttccccctcttgctgccttggacaaatctctgggtagtttcctcagagggcttatggtgacaaaagcaccaccagaaatgagtcctttcctcctgggctgagactgtggatgcctagctggcccatcaggactttggatccaagaccttcccagtctaggagcagctatcttgaagctgctgttcccggaggatgaagtacttgagtttgcctgatgacacagtcatctccttggcatgtcagaaccaagatcctccaggaagcactcatcttccatgcaccctccctctgagccatatcttcctgccattgaaggagcccaagggtcagggtcacctcttccgggaggacattcgttctggtctttgttggcctcctctttctcccagcctccaatggcacctgggcctgtgaactatatattggttcccaactgggactttgtcccccagagacatttggcaataatatctgaagacattttgatttgtcaccactaggggtggggacataaccaatggctgctgctaaatgttctgcagtacacaggacaacgcctctcattccccaacaaagaacaatctactccaaaacgctaataatgccaagactgagaaaccctgaactacaggacagaatgtgccctgtgatctactgtcttgtactgtgcacaactgtgtttccagggaagcatttaagcgttgcttctcttcccagatattcccttgccccagcatctcagaaaccaaggcaacaaaatgggcaaggcctttcaaaccctgggctagggccagcaagttggggaaacaccttttttttttttaaatctctgaagataggatgtctcatgcatcactggggtgaggaaggaggaggtctggtttgtctgagggttggcgtggtataatacatcccaataagcccaggccatggggtcaggtacaccctaattcaaaccgcacctctgccacttttggttgtgtggcctaagcaagtttcataacctctttgactttaacttccttgctatgaaatgaggagaagcacccctcatttgttgaggtttgatgagggttgagtgagatggtacaagcaaagagcccagcacagagaaaatccttatcacatgccagctctttctgagactgagaattcaaaaatgttctaaagagtagttcagtcgcagaggtctgtgctgccaaccttgctgtttcatagggttaatggataatttggctgctgtagcctagatgggaatattagggccaccataagcaagtgacttcagttagctctatgatatgctggtagagctgaagcgaaaggcttgctctgtgtcagtcgctgtgatgacgctataatgggcttggtcactgacaggaatggaatgaaccataggttgtccatgggcgcatttcagctcagctcacaaacatgtttttcaaggttagctgaatatttgcgtcttgggaaatgagcactacgctaattgtggaagtagcactgggctgggagacagccaagcctggtcgcccgtgttaccaggaagagcctgccctgcctttccccaacccatcttcttgatttccagggcttggggtcccttggctatggaaagcctgaggctccaggagaaccatgcctcagggtgtccccctttgcaccaactcacacagcaatcagaccaggtccttgcaatcataggcgcagttttgactgggagggaggacttggcatgccacttgagaaatattagcaaccaaaaattcatgcccactgttcttccatagtggaagatcttcttccagagatcccactggaatcttccataatgacaaaatgcaaacaacgctgagagcacagatatgttcattgcagtattgtgtgtgacagcaaaggattgggtacctcccagggtccatccagggaggatgggtatacaaatgatggggcacttgtgtgacatactgtcacgctgtttctaaagaccaatggtaaaagtttggtacagtgtcagaaagttcttgtgatataatgtgtaacataaaatagagagagacagagaatagcaggtcagtatctaaaatgtgtttctgtcaaattttgcataaggtgagaactggatgggaacatcttacagattgttttggtccacacagattttctgtcccaatattttcttacatgagggcagtagaaaaggtccgaagaggactcagtctcagccccagagcaaggggttcaccatctctgggagctgccaggagcagcagcgtcagccctagaggagctaaatggtatctttctaaacccgagaaaccatgtgcagcatgaagctcaaaaaggctgagtgtggacccagaaaccgaaccaaattttagggagcaggaggctagtcagagcaagggcagaacttggggggctgttctagggggaacaggcgggacagggggccgcctgaaagactcggaacatgcagctccctccaagtggtccttcaagggatctcccagcttggttccctgtctttgggatgggccatttggttttaagatacagaaactccttcaagccatgtcaacaaagagaacatttaatagacggaaactggggactccatggagcccacccacaggaggcacaggaaaccctgaggcatcgggggtctcctcctgtctctggagccactgggtctccacctctgcagcttgtccacctctccttttctctcccaccaccgcttggtctgtgtccccacgaaaggtccatgttcagggttgccaccctgccttgacctcagttctaaaagacgatggctcattcccacatttctgcctgcagttcccaagtccctccaagtccaaggaaaagaaaggaatctgattggctctagttgggccaactgtaaggatgaccagaccccttttttacccaacacaaggcctgtggctgaccaggtaactacctgcccctattatccacccgccttcaaagccttgcataaatgagctcccctcgccctcctgctcacttccagggactgcctggcccctccagtctgaccccacccagggcccactgcggttgcacttcccttctaaacagtctgtatttgccttaagcccaaatcccccttgatcaagtgccagcccaagcctgcccaatttgttgccaggtaccctcctgggaaccttgttgtctgatggcctttgtctctaaggcttcctgatggccccagacatgtcccaggtgtatgctcctttcacactcaacacagaacactctcttgaccaggtgtccaagcagttctccagcagactccgtctggatgtcctataattcaattcaatcagacactgtcaacctggagtcatagatcccacaggttaagggctcagtcccacaaaactgccccacttcaaatgcagtctcaagtcctaggttgccacctatacttctgaccaattggctataaatcggggttcccatgccccacacctgaggttggatttgctagcatagctcatggaactcaggacggcactcatattgaccagttcgtgggaaaagattttacaaaggattacagatgagcagccgaataaacacgcacaggtgagttgtgtgggaaggtcatggagcttccatgccctctcccgcatgccaccccccagggacctcagatgtgtggaagcttgtcaaatcttgttcaagagttttaccttcccagaggtcagtaggcggggctgaaagttccaaccctctattcactaggtctttctggtgactgaccccatgctgaggctaggtagggcccccacatggtcacctcctcagcataacttcaggtgttatcaaacggactcattatgagatgatcacttgggaaattttttgtttgtttgtttgtttgagacggagtctcgctctgtcacccaggctggagtgcagtggcccgatcttggctcactgcaagctccacctccccggttcacgccattctccttcctcaacctccagctgggactacaggcgcccgccaccacgcccagctaatttttttgtgtgtgtgtttttagtagagatggggtttcaccgtgttagccaggatggtcttgatctcctgaccttgtgatccgcctgcctcggcctcccaaaatgctgggattacaggcgtgagccaccatgcccgacgatcactttggaaattctaagggttttaggagttctgtgacaccaaccgggaacaaggaccaaatatactgtattttatattatactaccaccctcaattagagcttggggtgcttgggggcagagctcctgccatgcagcacctgggaagatgctgagcccccggatggtcagctgactgtcaccatgggatctggctggtggccagagcaggtgcacagactgcaaaccctggtggcctccgggcagcatgcatcgctgctctgcagaaggggcctgggttaaagagcaggtatcatgaggctctgccagctggggctgagggaggcgtgtgggagtggaagtgcctggagcccagggacaaagtcctgtaataaattacgtgggcccagagtgctcccagtcatttcctcttggagccctacctcttcttcctctgtcccttactccctgacacacccggagtcccaacattgcctcctttcctggctctttcagggtgcccagggtggaggggaaggggagtcagccagacccccatcctgacaaggtaagggcgtgccgggggcgtgtctgccagcggggagtagggggtcacctctctgaagagggtcgctgggcaggaggcaggtcccctggaaataagatggaacaggtctgagggatagagagtggagaagcccttcaggagcctggaaaccagaaaccgcagcaggggactcagtccatcgggctgaagggcagcacctggggggctgaggaggaggaggagggggagaagctgtctagccctctgctgtagaagggcaaactccctgcaggaggggaacggcaggtgccaaggctgctcccaccctgaagcctcctcacagctagagggcctcactgtggaatcatgggacatcatggatagcctgggtcccatgatgagcccctgccagatgtcagctgtgccgtgtgtgacatcccactgcgtcctcgcaacacagtggtggaattgcctccattttatggacacagagactgaggaccatggaagcgaaggtgcccacgggaagaagcagagccggattcgactccaaagcccaggcttatccgccttacccatgtaccttgggcaattggctttagtcacctctggaaggctgggaccctagggagaggcaggacaggtctggggtgtggtgggggggggggtgggggaagaggtggctgaggagagggaccgca

SEQ ID NO: 449 - DNA, 77680 bp, Homo sapiens
gaagaatcaggttacacatggacttgaaggatgaatgtgggagttttatggagtggtggaggtggctctcagtgggatggatggggagctggaagggggatggagtgggaagatgatattctcctggagtttggctgtccagcagccgatctcctctccagtcgtccccagcctctcgacgttcagatgctcctcttctctccttctctgccatgctgttctgccgttcatctgcctgtctctctctggagcctggaatttggggtttatatggtacacaataaggggcatggcaggccaaaagggaactttttaggtgcaaaaaacaggaatgcctcttctcacttagggctatagattttcaggcttgaaggtggggcctttaccagcgaacctgtatttccctgtctcctgtgcatatcaatgtaatcaaatactgggctgatccaggatgtttctttagaccaattatgggtaaaataatttacattcaggtttttatatttgcttttgtcatttctttttaagcaatcatgtaaaatatctatacgacagtaatagatgatagcgaacctaattaaaattaccagaaacttaagaatctctaatgatttcaactgtaactaaggttatttctctttatgttgaacaatgttgggagataagacacaagagtttctgaagtatttcagaaacacaaagagggaggttatataaataatatttttttcctactttgggaaaatgaaagctagtcacaaagttaaacgagtggttattttaatatttaaaatacaggcttggatgtatttcctgttaaagaaaataaaatgcagaatattcaaaacgtctgaccacccttctaagaaaatgcatctctgaggtatttttccttagaagttattgtaaaaatcctggagaagcttgaacacagcaaagcaaacaggatgcagagtttaatctgtggaaagcttagggaagaaaagcaaatcattaaaaataggtcttcctctgaagatttttaaaacgcaaagagggtggaatagcaatgataataaaaaagctggcatagagagtggcacaatttgctgtgccactgagctgactggatgtgttctgaatttctaggcattagtgtacctttccacacgcattctccctttaaaaaaaatgcccacacactgaatacttttttcatgcaatttaaaataagcgcaccatctagtttacagaaattcactagaagttatttatcctaaaatagcagagatctagaagaattttgagctctaggacattttagacacacagaaagaagaatctggacaagtcttgaccagacatgacagaatagaaatttcttttcctatttatctctttgaataaaattttcaggatcttacagtggacaagtttgttatctacacattgtgaagcacattgatttctcctctgtagccttaggaagatctgagaggtgactgagctgattgaatgatccgtgaccgctctactgggaccagtagtagaactttactggtggagacctgctggaggtttgagagcagactttgaaaattactagagctacacagatactgtgtggctaactggattatgtttagaggctttcagaactatgctgctgctgctgcagtgtagccaggacgcacagagaacatctaaggctcttgaatggggcgatagggacagatttcagcagccatctgacttcagtgctcattttgatgctttccctgcagggtgcagtgtgcagtgtgcagtgtgcagtggtgggaggctcacacaggaatacttgcttctgtagccctaatttccggttcaaactctgcattcaccttgacagattctttccttggccaaaatttagttaggcttctgggctttctcttatgcccacctgcagactttttggtaaaatccagttttagtaaagagctctgctaagtcagtttagcaagaatccccacctcaaaagtcactatctccctccctggtagtgtctggcttgtcttcagcgagaattctattaggttctgttagattagaatcctccttacccttgatgcttcctcttagtattttttcatccactgactccttgacccaccttgctcctcggctataaattcccacttgcccatactctgcagttaagactattttctccccactactgcaaaatcccattgccatggtccctatactatctcaatggtaatgaataaagtctgccttaccatgctttaacaagtaacattgaaccatttttttctttaacaatctgctgcacaatgagattactaaaactttattccattttgccatgctggatgtcctcaatggaatggctcttgtgagcaccaaatcattgtgagaaggaaaacccatctcttacagccccctgtaacgtgatgtatgttacatgtgatgtatgttacatagttttttttcatgttgatcactttttgcccattttcctatatcttatcagttggaagactgtggaagtttgtagtactaagccacaagatgactaagaagagttgaaagggcaagtggggctaaaaacagattttgtttgacttaccccaccattccccctatcatggggctgaatctgcctggaggaaggagcatctttatctttgtactgtgaaccacacagtctagcagcagcacagccaaggcacttggggtttcatgagactaagtacatgcaattctattgtaaaggcttaaaatatatacaactgacccttgaacaacatgaatttgaattgcatggtcagttatacgcagattttcttccacctctgccacccctgagacagtaagatcaatcaatcctcttcctcctactcctcagtctactcaaagatacttgaagtctacttgaagatgacaagcacaaagacatttatgatgatccacttccacttagtgaatagtaaatatgttttctcttcctcctaattttttaacactttcttctctctagcttaatttattgttaagaatacaatctataatacatatgacatacaaaatatgtcttagttgactgtttatgttatctgtaaggcttcaggtcaagagtatgctattagtggttaagttttcgaggagtcaaaaggtgtatgtggactttcaactgcaggggggtgggcacccctgcccccatgttgttcaagggtcaactttactgccaaaggcaagcctttacatccactttttccatcccatcagtaaatggaaaaagatagctacagtatccctgcgtcaaatctttttttttgcagatcacaaattggccactcaccttgctctgtgaggggtaaaatgccccactttctttagtaatatttaagttagataatatttaagttataaagttgttctttgtaatcgttaattgtaatttttacatagtttctttcaaacagaaatagcatttttgttagataacctcccgtatagatgatgaaactccttttaagggctatctgaattttaattccttgaaaaggcagaaattggatagctagtagtcataaatgtactgtggcttcccccaaccatctgggctatatagaagctgcatccttggactgcagtagaggagtcttacaaagcacagagcaacttctctcctgggttgcgctagttatgatggcaattttaaatgtgtacttttacccaaagaaaatccttattatcaacaatcacaatgccatcataaccatggtataaaaaattcaaaatgtcccagctgaagtggaggcaaagactcaagttcatggagtcagagtttccttgctattcctctttttcaaatgaccatttagtaagcacctgaagaaaatactatggacggcattgaaaagtgaagataggtttaatcttctcgaaaatctaattctccagatgaaacgctgacacttatccaccccacagaccctatagcagatgtgtcactggccatcacatttgacacagagaagtcataactcagtcagcacagagacatttccatgagtttctgaaccatggacagaacgtcgtctgtgggacatgaaaactggaacttagaggacaggcacatctgagaaatgggcagtttaaaggcagaacatagcacatatgtgactgggttttagaagcaaatttacaagacgcactcttcttcatcctaaataatctgcaaccaaagcttccaaaaaagacaatttaggaatgcagaggtgaggagtagggaggggaatgggatgagagagagtggagattaatggtgggcagagcgaggtttagaacttagtggtttcttcaggttctgaactgaaatttgtatactgtaaaggcacaaacaccatttttaacaaaagtgagcaggacttcctatctggttcagaaaataggtgaataaatagtacgaattattaaaaataataatttccacttatacataggaaacttgataggaaccatgataaatgcttaactcttaatcttcaaggaactctgctagggatataatattataaatcttgttttgcagatggagaaattgaattttaacccaagttatcataacccttaaatgattaaatgatactgttacatgagaaagctgcgtatctgtttcctggatttgtagccataatttgtgtctcaagtcccttttgctgccagctatcttgggtaggtgtgttccctttgggctgtttgatacccccacatttatcttttttttttctctttttttgttgagagagtctttccctgttgcctaggctggagggcaatggcgcgatctcggctcactgcaacctccgcctcctgggttcaagtgcttctcacgattctcttgtcccagcctctctaatagctcggattactggcatgcaccaccacgcccacctaattttgtatttttagtagacaaggggtttctccatgttggtcagggtggtctcaaactcctgacctcaggtgatctgcctgccttggcctcccaaagtgctgggattacaggtgtgagccaccatgcctggccccaaatttatctttaatgccccaaattatctagttcccatgactgggcttctgctttgatcctttctgcacttgctggaccctctccctgggaaatgagattgtgtcctgagcccctagttagaggctatgtctctgctgttcctgaatgggcctcctggatgagacctcattaaaagtctaattctcttggagaattgagagatacctatttgtctcaaaatcattgaaaccaattaatgtattatgagcctctatccagtgatttgtacctcaattccccaatccagctgtcaaggccaatttgttctaccttacctagtaggtaagtctggaattgtagctgtggcattttcagtaatggtactctaggttagcagtccccaacctttttggcaccagggaccagttttgtggaagacaatttttccatgaagggctgggcaggggagtggtttcaggatgaaactgttccacctcagatcatcaggcattagattctcacaaggagtgcgcaagctagatccctcacacatgcagttcacaatagggtgtgcactcccatgagaatctaacaccgctgctgatctgacaggagacagagctcaggcagtaatactcatttgcctaccgctcacctcctgccgtgcagctcagttcctaacaggccacggaccagtactggtccacggcgcaggcatcagggacccctgttgctaggtataagcatctggctgctgcatgtcttctgtgtagctacatctgtatgtgtatctgatgagatataaattatttgattataaattactttcttcatattagagttgtgaatgagtatcacatataattatacataaactaggaatatgctttttaataatgtatataagtaagtttccttaactatgactttcatcttagcgtagtaagagggtgctaagaaatatttgtgatgaaaataggcattggtagagttgagaccactgggtgatgaaagagtgtaaagattttaaagccttcagatgctggttcaaggtgagaaatgtgattgggagcaaatcaattaacttcttgaagtcttatagggcagttatgaatacttaatgttaacatatgtaaagctcttctgccctgtatacagtaaatgctagttagctattatgatcactactaaaatggggatgacataaacctcataaggttttaagtattatgcaagatactatacaaagtccagtaaatatcacattcaattgaatccatgatgtccgattattttagctacttccaagagagaaaaaaatgctgtcagttttactgttcttatagagagcaaggcagatcccaattcccaatgtggtaacgtgaaaatttttgcatttgaatcaacaaaacactttctcctttctttcctactatttaacaactggtaagtctatactcccccaaatctggaattctcctttcttattctttttcctcctaccaagaccgcaggatcttttacttggctataaggggtaaacctcaagtagtacaagttctctgtattacttttatactctgtcacagattccctttgtttcctcatctccatgtgaatttagttaaattctcagcattctgatccttactatacaaggtaaatgaatataaaaacaaaacgaaacaaaaacctcttcctatttacataaggccccaacctaatatttagtgatatatattaatgtgaacaaggaactaacgaagactgggaagaaattcacagacttgagagaagaaatggcaggatttcctgggaacaatttcatgtaacgtcaaaggtggtaaaaggtcaaatagaatgaagatggagaataccggattttcttacaaaatgatttcccaggagatctcatcaaatgcacgaggataccttctcagtttcacctagtgagtaaaagactggtaacatagctcacttacaatttggataaacaaaactaaacaaacaacatcaaaatttcagaaaaaataatagcaaaacagaaatcaaacactcaaatttttggtccttctgtttatttcattttggatactcagtgaatgttaattaaccaggaaacttaaaagttatttcaattatgaacctcttcaatccttcatcaattattttgagtattctggtcttaaaaacatctctttcttctacaaacttctgaaagagatgaacacctccacctacaccaaaataatgtgctttgctggccaaaagtacacgtccatttttacttaacagtctaaggaaagtctggtgcaaattactataataatctgggttgtaaatggtttctgaggtgagaatgagatcatattttacaaaaagtttttcactacttagtacaagcttacaaaactcagaccactcaccagaaaaaaatcggcatttatatagttgtgttacttttggtttcctgcatcttttcacatctggctcatttacatcattttcttcatcttccaaagtggagttagctactacattaggtaaggttacttcatcaatcaccatactgttataatcttgaaagtgaatttctttggaccctcccttgaatgcagttatacctagtaaacctgatccacaaccaagatccaagacttttttcccagcaaatttcactttggcctttgtgaaataagccaggaggtcaaaggtacattcccagatttttaagcctccctcataaacacctgtaatcagatcagagtgagaagaaaagctttttgaaactatgttttctccagggaagttctctttcaacaagatggttttcactactgataacttaacatgctggaaacctggtaatgtttctatgactttattttctaacatcttctttaaatctttaggcatagcatgctctttggcagctctcaaggagggctgttttccatgtggctccaagttccttgaactgctggctgcactgagtggactgtctgtgtcttgagagggagctgcattttccattgacttatgttcccacaagtgatcctgaggcaagtcaaattgttctgcagaacattttctgtccctctcttctcctttttgactttctgagactgacagctcttttgaggaatccagggtcaaagctccatctctaatgggtgttaattcattttccagatggtcttctatagtgaaattaaactgaaaggtcatcctcttattaaatgcacacaatctttaaattcagattcttcaacttctggatagaatttgatgatacacacaaatctgcctcaattattcaattagttttgttgggcccaatttctctttagcagcttatacatggtaacaaatatttagagatatttccaaatgactttttagacgtctttggtcctctttccaagcagctctggaaagaaaaaaaaaaaaaaaagaaagaaaatgatgattaaagcaaaatggcacatttcactaaagtgtaatattaaacagccacccccacccctccctgtcccaccatacagctgctttttcttaaaaagttgtggggaagagagagagataagagatttggacactcatacacaccttaagggttccaaagtgggagaagaaaatcaactataaaaacaaacagaagaacaacagcaaccaccaccactaccacctggacaaacataaagtccaagatattcagacaggacagcctagctacttgctgtctttcagctgtcttgatttgtgtccaaccatattcaccccctaagcttccagaataacttcacttctgtcttttacagaagaggtgcagtattttattttggtaagtcagcgtccctttaaaaacatgcataggtatggcctggtgtgtgtaaattcatccaagacttcactccaaacatttagtcgagaacagcagccctaagtgtatagaagtgggggtaatttggcaataattagtaaagactaattcggtggcagagcaaacgcaaactagggcactgcagtagtttggagagacctgtagaaataagaagcaactttattgagaatcttctatctactgcgctagacactataccatctgcctcaattttcacagttctggcaagtgggatctttgttccctttatacaagatttacaatttgggggagaggcgggtcacccagtcccgcggctaggaacgcgcctctttcctctcccatcacgctgcaaggcttggagtcacttccggctgcaggtcccggaacaaatccgaccccagaagtggggacttctggccctcacctccccatttgaatgtaatgtttacagtgatccagacctggggatgcttgcttcccgacgtgtcctgggatcgcgcttctgaaaaagctcacctcacaacgcctcctccggacctaaatcgcgcaccagtgagtcgagtcctccaggggctagagaagcccgactttctttccggccttgagggacccgggctcaccaagaaaccagccgccctcctctctatggttttggagccggcggagagcgcgcaagggttggcgggactgcgagtttccggtctgggctttggcgggtctggtttgaagctctcctgtttgacgaaagtatgtctcaggaaggtgcggtcccagctagcgcggttcccctggaagaattaagtagctggccagaggagctatgccgccgggaactgccgtccgtcctgccccgactcctcatatccttccttggttgtcacttctacctagagaagggtgtgggcgggtcgcgaacctttctcttctgtcccttcagacccaccgccaggctgggttatattaccgcggcctgaaccccctcttttctttgtcagtgagtgggatgaaaagtgagggactggaggggaagcgacaaccgtggtagatttaagtaaggctttggccctggaaagcctcgcggacgtgttctgacccaaggttttagcagtggatgtggcgttttcttccattccttctttcagtttttctgtactcgttgcttgcaattaagtgtaaatacttttgctagtggataatgggggaggcaaggactgagacctgcggtatgacgatagctctggctcttaatagtttgaggtaaagcgagatactctgagcttttgtctcccgtaaaaagggtggtgaatatgaataagggctttcttagcgttataagaattaaagggcatagttctgtggtgtgaaatctttaaaagatgttcagtaaataaaaatgattttcctccttcccctctcagacctctttttcttctttctttctttttttttgacaagttctcactcctctcacccaggctggagtctttctgaaagagttcttccgcttgttgttggctttcaactgttggatttgaggcgcttagcgccttcttcgtccgggtgcagcacattcttgattggtctcatgcctttgtggttgtaaatgtgcctggaatcctagcctttcatggtaaaccatatgtatatgtatctttttcacaacatttgagcccagctttatacaattacactcaaaagaaaaaaagtaaccttcacttgagagaatctcaatactgcacaaatattgtgcagctaaagccctatgtaatcacatagaagtcattcacctaggcattagcaaaatctcagaaggtgccaaagcccccttttttagtttttgtgtaggtacagaactgccgtcttcaaggagtttcaacttgaaaacaaatagccaccctcaaaacattcaaaaacacttaaactgcgtgcataatgtgtgtgagacatggtgttaggctttgggagaacagagacacggaacgtgattcctcttcttccccacaagcttatagagagacttcattaagttgaaagtcaacattcccacctagctttgcacttcaaacgacatattcaaaaaagcccaaacttcctctagttttcttcatctgagtaaatggtttcacaaactgaaaccttgaatcctctctgtctcacacacccgatcagtaagttctattgtttctgattccaaactatgtcttgaatcaatccgtttatctccatcctcattgctaccactctgattccaaacccttatcacctctcacttggagtattaatagtttccttgtttctactcataattcattattccaaaaaagttaagaggggaaaaacatagatctcgtcatttccctttttaaaccactttaccttcaaggttccaggtgatctaagccttgcccttctctcatacctagttaattaactacactctgttcatgaatacattaggctcacctacctcaagatctttttgctcagcctgatttgttctctcagccttttgcatatttcatgtttatgtcttggcccaaatgtcacttccttagaggggctttttcagagccttcaatcttaggcagttcccccaaacgcagtcttacacttgtatcacattggcctgttcagttttctaaaaagcacattaccattaaaagaaatgctcttgtttgctttgtatattttccacttctacacattatgttgcaaagttcataaaggcaggatgttgattttcttcacagcgttaccctcagcacctagaacagtgcctgacacatagtaagcattcattaaagggctaaaaatatttcatgttttaaaaatacttgggagtctaattagacaatactttttttcagcttaatggtagtattttagcttcactattttaacaaatgaaaaatttgcaataaatctacaatgccattaccccccaaaatctttttcatgttttgcattttacgtattattttccaggccttacctgcatgtctgcataatcataactgactaattttggaacagctggtaattatttgagctttactgaaattttttcatgaggccaattctaccctactgaactcaaatttgagttaatgatgacctcattttgattgctgctgtaaaaaataagatttcggaagaggaatgaattcttgtattactgtggtaggactatgggtttttttttgtttgtttgtttgttttgagacggagtctcaccctgtcacccaggctggagtgcagtggtgcgatctcagctcacagcagccaggttcaagtgattctccttcctcagcctcccgagtagctgagattacaggcacgtgccaccatgcccggctaattttttgtatctttagtagagatggtttcaccatgttggccaggctggtctcgaactcctgacctcgtgatccgcctgcctcagcctcccaaagtgctgggactacaggcgtgagccaccgtgcccggccgggttattcatttttcttattaacattctttgatgattcttatggtgttgttacagtaaaacatttctaacaattattctaacaattattcttgatggtgtatatgaagaatttattgtcgtgtatttgtaagctgctatgtgcagaagaatttcagtcaaataaagttggtaagataggtatgtaagtaatatgaaaaaagatagaaggtgatgagtgacttaggtataaattaagtacaatagaaatgttgaggaaagaaaaatttcttgtaatagaaatcggaagtacaaactgggcatggtggtgtgcatctctaatcccagctccttgagaggctggtatgggaggatcactttagcccaggagcttgaggctgcagtgaggtgtgatcatgtcaccgcactccatcctgggtgacagcaagaccgtctctctttttttttttttttgagacggagtctcgcctatgctggagtgcaatggcgcgatcttggctcactgcaacctctgcctcccagtttcaagtgattctcctgcctcagcctcctgagcagctgggattacaggtgtgcgccaccatgcccagctaattattttgtattttaagtagagacgggttctcaccatactggccaggctggtcttcaactcctgacctcttgttcgcccatctaggtctcccaaagtgctgggattacaggtgtgagccaccccacttggccccgagcgagaccctctctctaaaaaaaaataaataaataaatcataaacctgtggattattgtagcattgtttctcatctgtcaaaaatatttcatgactatgcatagtttgaaaaggcaagtttgtccctgggcaattttcaaaatatttctttaatgtgttttcacaatactgtttacctaataaatcttaagtttttaaaagcaaaattaagccagtaatttgagtccaattccaatctcttatgagtcattgcttaaatttcaaaagggttttattttttttttaggtttgttctgagtaatgaataccctattactatgatactagtatcttccttaattatcctactcattgtctcaacattctgacagttggattgagcatattcgtaagtaaaattgttttaactgtatgatgtactttgatgttaaggtccgagtccccacatacctcggtagatgtgttcttacagttttgtattcccttgaaatgtaactgttctctatgttacagcctttataaccttcagttacttgaaatgaacaaattcattcaaattccagcacttaaaagttttaaattacattttggataaataccaaagtgttttgttgatgatgtatgtataaacaaattgtaaatattaaacgttagttgttacgattagacctatataaaacatgatatgcagtctactgaatagctatcagcctctaacatgtttagtgtcatttagaaaatgctttctaaattgccaaaagctgattgtctaggtgataacaaatttaccatttggaggaagttgactttctcattttcatgtcttcatcagtcttacttgatgagattcattcttctagtcagaagagagtttagactgctcagtttactcatattttgagttagcttttctatttagagttcacttggttgtggaatattcatttataatttgaatctacgttgtgtaatgggacctaatttttttttcctttgtttttgttggagtctcgttttgtcacccaggttggagtgcagtggcgtgatctttgctcactgcaacctccaccttccaggttcaggtgattctcctgcctcagtctcccaagtagctgggattacaggcatgcttcaccacgcctggctaatttttgtatttttagtagagatggggtttcaccatgttggccaggctggtctcaaaactcctgagctcaagtgatcctcctgccttggcctccataagtgctgggattacaggcgtgagccgctgagcctggccccagagtttgttttgttttgttttcaagacaagatctcactctattgcccaggctggagagcagtagtgcgatcatagctcactgcagcctgaactcctgggttcaagctattctcctgcctccatcttctaaagtgctgtgattacaggtctgagccatgatgcttggcctgtgtttttgtttgtttgttttgggggacagggtcttgctttgtcaccaaaactggagtgtagtggtgcgaacatagctagctcactgcagcctccatctcccacgctcaagcaatcctctcacctcagccttccaagtagctgagaccgcaggtgcgtgctaccatgcgtggctaattttctatttatatatttattttttggtagacatgaggtcttgtcatgtttcccaggtggtctttaactcctgggctcagacagtcctcccgcctcagccacccaaagtgttgggattacaggcgtgagccaccatgcgtggcataattttttttaagtaaattatttttttatcttgagtatagaagtgattcatgttcattgtggaaaatatgaaacatatagaaaaacagaaaagattacaaaacatctaatctgaaatggttaagattttgatgagaacagtctcatctcatttccgtatattcctgccagcctatccatcattcttcgtacatgtttatctacattaaaattggtgttatattttggaaactttttgtttaactacattgtgaacatttttcatgttttaaaatgtcattttaatgatggcagatcctattcaatagatgtacacacacctatttaactggtccacaattgttggatatgtaggtcgtttcctttctctctttttttttttttttggctactacttaatagtttctctgtatagaatgtggtattttgaaagtgtatcaagctttagattggtagtattcttgcatttaataaagggcagtggcctttgttgactgacatgacaatatttttataaaatttgttatttgctttacagaaattttgaaaattattgtagaaatgtttttacctcatatgaaccacctgacattggaacagactttcttttcacaagtgttaccaaaggtataatactattacctgaaaatacatgttataaggaatctagcctcagtcttagatgatttattattaattatggctctctttttctaatatatcaaatatattcaaaataaaaataaggagtaagtagatctcatgtgagactataatggtgttagtgtgatcattaggcagttaaaaactgttacaggctgggcacggtggctcatgcctgtaatcccagctctctgagaggctgaggtgggcagatcatctgaggtcaggagttcgagaccacccatggtcaacatgatgaaacctcgtctctactaaaagtacaaaaaattagctggacatggtggcaggtgcctgtaatcccagctacttgggagactgagacaggagaattgcttgagcctgggaggcggaggttgcattgagtcaagatcgtgccattgcactccagcctgggcaataagagcgatgctccgtctcaaaaaaaaaaaaaaaaaaaaaagaacttatattttcagattgtgtggttcctttactaactgaatttaaattatttgtagtcaattttaaatgctcttgtattttaaagccactgtactccagcctgggtgacagagtgaaacccttaattcaaaaaaaaaaaaaaaaaaaagaaaagctggaatattggcaaaatcaagtaactaagagaaaacattaaattcacagaatacattattacattttagatatatatggtatatgttttctctgaaaagcacaagcataccttttttgttttaaatggagggaactaaagatactttggtgccaaaatgaaacattatttgtaattaatctcttattgaaatgggtttctaactttagctttgaatcgtaatctttcaaatttcttgtactcatagtcacttgatgattctctatctgaaatatttcttagaatttgttcttgaccaccagaaaaagattcaactgttacatagatgaaaatggatgttgagtgttaacaggcctatgggaaacagtattttctttagctacattgtattgttgactgtgttgctattcttataatgtttaggtcatttaaattgttagaaagatccaagtattaagatctagggtggctaacttttcacagacaaaaagcttgtttgtaaggtcatttactatacccttaattcaggaaggttagcttgaattgggtcaaaaggaaactggttagaaaataagtgagtagtgaataggcgattcagtgcaaattccttccagaaaatacccttgtaaatgactgtatgaatgtggattcttcaagacagtcaaatttattgtgcgaaagtaatacttttattttttgcatctctaaaacatgaactttgagtgattttttaaaaaaattgatgctattaaatagattcaaaccatagaaatggaaaataaatttctgtttggggcttttggggggattatgttgtaaaaataccttttctctgtattttgtgcttaattaggtacaattgttaagctagatgatagcctgtggatgttactagtgcaaaatcaaattatcgtattgtgttttctctgtaaagttttgtcttgtcttttctagtgatttctcttattcctgtttattacttgatttgtttttacagactgtgaaattattcgatgacatgatgtatgaattaaccagtcaagccagaggactgtcaagccaaaatttggaaatccagaccactctaaggaatattttacaagtaagtcaaatgtattagaaagcaggagagagagggagcttaaagaatgtcaaaatttttatactgatactgattagctatgtattcttatgtaatggcctaatgttggaattaaatttatagaattaaagacgtgaatatagaaacatgaattctgaataataaactcttataagaagagaagtcatcaagctagctgaccctacctgtattttcaaggatatgtgtggaacacctgccatgtgttttgaagtttgtgttagtattctaaatggctagacagttgttccagtatttgtagttctgatagactaaagttctgtgaaaagaggaagagactgtgttttgttcattgctgtatttgtagcacccagcatgctgactaataccttttcagtgcacaaaaaatatattctaagtgaaatttccttccttattcacagacaatggtgcagctcttaggagctctcacaggatgtgttcagcatatctgtgccacacaggaatccatcattttggaaaatattcagagtctcccctcctcagtccttcatataattaaaagcacatttgtgcattgtaaggtgagtaaaggtctaattatactttgaatggtatataatcaatgtgcataggggctgagtaaaataatgtttgtataagattttacattttagtctatattattgaaataaacttttccatagaataaagaacatgtaagtaaataattgttgcaaaaaaagtggttttaaggaagtcattaaaagtggctttttggggttttttagttttatcttatttcccctctataaagaaagaagttttaagaatttgtgttgagacagacacagggatcctgaaatagttatgtcatgttgcattgaccaatattcaattaccattatgattagatgtcagaacttccttttataaaggaaagttaatccttatttagtccatctctacatgccagaggtagccttgaggcacaaaagcttgcctagaatttatgggtcacagacagttttaatattgctatttgttgggcgaatgaaaatcactagttaattaatacctctctttgctgataggatgctaaaaatgtcacgcacctggcctaatgttacccttttttagttctgtatttgcaagatcatggaagtcagaaataatattttatacatgcttgcatctcttgaagcacactatatttaatggatgttcactaaacaatgaatgaatatgtgattcagtaaatttatgatctctaatagtatgaattaaagtaaatttggctcttgagctttgatttgttttttctctcatttttatttatccgtaatcagaatagtgaatctgtgtattctgggtgtttacacctagtttcagaccttctccaggctcttttcaaggaggcctattctcttcaaaagcagttaatggaactgctggacatggtttgcatggaccctttagtagatgacaatgatgatattttgaatatggtaataggtgagtgaagaaaactttctgcttagtatatggtgactataaatcatgtatcaattaaaattgtctctaatgattcatgttattttcttactaattatgcattaaaattgatttaaatcttaccaaataaatttttaatcttgaaatttggaatttgtaaaatttattttgggtaccttaacctagatttgcgtatttagttactgtaatttctccacaatgattaacttatataactttataatctctgaggttgtccatattcagagacaataactttcacatttttttaaccataactgatattgagatgcagtttatatttccttccagaatacatataaatacgtgcatatgtgtatgtaaatatgtctattctcatatacatattataatgaaataactcattttacatgtgatgcactttatactagtttatttttattttattttatttttttgagacagagtctcactgtgtagcccaggctggagtgcagtggcacaatctcggctcactgcaacctcgcctcccggactcaagcgattctcctgcctcagcctcatgagtagctgggattataggcgtccgccaccacacctggctaatttttgtatttttagtagagacagggtttcaccgtgttggccaggctggtcttgaactcctgacctcaggtaatccacctgcctcagcctcccaaagtgctgggattacaggcatgagccaccgtgcccagccaatactagtttatttttaaagaattgctggtcgtaacacacttcattgattttatcactcattaatggattatgaacaagagtttgaaaaacaatataaaggcaaagtttgcattcaaaactttggtataaagagagtaagttggttttgtgcagtgtatcaggcacctgttgctctgcaacacaccacctcaaaatctatttattcactatttatttattcatgattctgtgagtctgcagtttagggtgggatgtcctgagacaactttctctgatccacctggggcactagctcacccatgtgacttcagtgacttcattcacatctggctgttggcagaggcagaagtacttgagaaagccatgtgcatcatccagcaggttcaccctatctcagatacctgatgccagtggtttcagggtttctaagagtagcaaaagtgtgagcaggtcgctgtgtgctagcacttttcaagtttctgcttgccttaattttattattgtcccccgggccacagcaggtcatagcgtttagcccagagtcattgtagaaaagtgtggattcacaaagggcagtcattgtggccatttttataaataatctaccacagactgagtaaaagccttgcatgaataccatggatattaatttgaattcttcctttttagattttctttccttagcaatttgttttgtcattttggattagaattatatctgtagaatatttcagttataatagggtacaacttttattccactgaacatctttagttttatttaggtcatctggtaggtataaacttcagaagttaatattcaatatttataaaaaccattaacaagtgtgacacttaaatagtttaaataattcttttgacacaactgtttccaagttgtgttacgtattttaattcaatcaaatgttgaaattgttcagtagatagttttaattataggagaaactcacccccatgacatttggatgtcttaaaagttctgttatctttctttgcagttattcattctttattggatatctgctctgttatttccagtatggaccatgcatttcatgccaatacttggaagtttataattaagtaagtttgtttgttattttttactttttagaaaatgttttccatattccccaatcttaattattcatgattctttagattgcatttaaaacattttgtgtgaatttaatgttcactgacactgctgtctgataatccagatattctacatgtagctctcaagccaaattggacttctttaccctgtggcctctaaaattaaaaaaaatgttcttcctagttagctagtacttcagaaataatgggccatgggccagactagaacttaaccacttttcttctgctactgttgtttaaccagctatcaagtatcctatttctaggattagataaattgataactataattaaaactgaatataatcttttcattaggtacttttaagttgttcacacttaattccatttgtacagtaattttaactttctgaaactgaagcattttaaagggtcaccagggatagtgcctgtagcattcatcagattcttaggggtgagaggagatgtggttgagatgtaaaaatggttaagaatatctactttatacacatacataaaacattaaaggtcagtgtattttcaggtcttaggtacttttcttgtactaccaggacattaagttgccattcagtggttaagagtgttgcctgggagctgtatcacatgtgcttaaatccattcttgaaatcatttactccttctgagcccttgggctatttggttaatttctctgaacgttagtttgctcatctgaaaatggaaataataatagcaacttcttgacagggttatagtgagaattgagttcatcactgtgaaatgcttagaaatgtgcatgacacatagttaatactcaaggaattagccacatcactatcatcatcactgattatcttccactcttaccctcttccagttcattttctgcccagcagaatgatcttttaaaaagtaaatcagatcatgttactctattgcttgaagtctatcccatttgattaagaataacaacctaatcctctgtggatgctgcctccttcaccagcctgtctcatgctgctctccctactcttagttcctcaaacataccaaactctcctgtcccagagtcttttcgtggtttttccatctgcctaggatgcttctctctcctattttgtgtaccttgctaactcctgcttactgtctttcagttctcagcttaagagttatatcttcatgataacattctttgatatccttaccctaagattaagttagattgatatccttaccctaagaataagttagattaggtctctctattgtagcaccttagactctgtcatttgacaaatcacagccctaattaattattcttaaaattatttaacattctctctcatgctagaccacaagtttcatgcaggtaaggcggagattgtgtccatttgtttgacccctttgtctccagggcctggtagaatgcctcatacatagtaagaattcaattaatattttacacagagaaaaaattagcaacttatttaaacaaatataactgcttcagaggtaaactgggcacatcttagttatattatgtgatatatgatgctttttgattgtttttttaaatgttctacaaggtagatattgttagaggtcctaagttacttgatgtgttacttgtggtgattgtattcttttctttttattcatttaggcagagccttaagcaccagtccataataaaaagccagttgaaacacaaagatataattactagcttgtgtgaagacattcttttctccttccattcttgtttacagttagctgagcagatgacacagtcagatgcacaggtaaaatttgggctaatagcattttaaacagcaactcttattttctttggcagttagtaaatctcatttgaatgtctgggtcagtctatttaagaggattttaatttatttcatttgggtgtttttttttgatctgtgggattatttatatcccataattacttttcacccagagcattgtattagattcctaactgctgtcattgcctctggggtctgcctggctccctctttgcttggtaactggttggtcacagcattcttctcagaatcctttcattcttttctgcatgagaacaaaaattcttttgttcatatttgtataagatctgatatagctgcaatcaatcttgcattttttcttcaccaacgcattgcgacctttagggatacaagtatgtttgtgcatgtatatgtatgtatcagtcttttaaatttgatatagtcatacatttgtttttattttgaaaagttagagtgttgaattggtatcccatttatgaaacattatattctaaaaatttgtagtacgattattgggaattataactcattttcctgtaacactgttatacatagtaccttttgctttcagactagccctcaattttatttaactatagtagtcctaaattataagattaatagtactcaggacctaacagttatatgtcatttgttttttttttttttgagatggcgtctcactctgtcacccaagctggagtgcagtggtatgaccttggctcactgcagcctctgcctcacgggttcaagggatcgttctgccttagcctcctgagtagctgggattataggcgcctgccaccacgcctggctaatttttttagtagagacggggtttcgccatgttggccaggctggtctcgaactcctgacctcaggtggtccacccgccttggcctcccaaagtgctgggattacaggtgtgagccaccgcgcccagcctatatgtaataattttaatgggaccatgaattgaatatttcttccttgaatagcaatgacatagccccttctattgtacatctgcaagctgatacagggaattcctttgtacctgcgctcttccctgccagtcagctatgggggtgaaagtgtaggggttcatccaagtcctaaaactggtagcaactcctagggcagggctgatctggaaggacagaccctaggggagggtggaactttaaaaagaagttctgaaggtagtaagaaggaaatgaggagtagtgttaggaaggggctaacttttttcttcttgcttctcttctttatctcacctgcccctccccttgtatcccttcttcctttttccctttccttttttgtcctcacttcattcgtgcatcctttctgattcctcttaccttgctaaaaggagaagtttgtttgggtatcctatatcaatggcaggaaggttgttttcttctttacctttatcctatagattcatattctcaacaccaacctcctcctttttcagtttccttcttgcttctcttgacaccacagagtttgcagctagtacttggagaggaaaattaaacagagatacttggaccaagagtaagatgaagaaagtctaaacaacagtatagtctatagtggcaagagagagtatgggggctgcttagccagggtggctgtacataaagtatatcttcagtttatataaactgcttatagatggaaatcagaaaatttaaattctcttaactgtccaagaaaattctcattttttcaaatttgggactgataaatgtgaccagttctgcttactgtccattgcctgaaatggagctttgaggtggactgtataatttcttcaatcttaactccaaattctgatcagcgacgccctctgctgttcactattaatatttatttaccaatcaaagtaaagtattgaagttttcctggcagttttcactttgtgttttagtccatttaggctgctataacaaaatcccttaaactgggtaagggattataaatattagaaatttatctctcacagttctggaagctgggaagcccaatatcaaggcaccagtagatttggtgtctaacgagggtgtgccgtctgcttcaaaaatggccccttgttgctgcatcctcacttagtgcaaggggcaagacagctcccttcaacctcttttataagggcacttatgtcattcatgagggcagagccctcatgacttaatcacttccccaaaggccccacctcttaatagtatcacattgggtgttaggtgtctgggaggacaccaatcttcaagccatatcatctcacttggaaaaaagtcaaaataaaaccagtagatttaattaatattacactatttatagaagcatgtgatgtatcattccttgtattaatttcctggggttgccgtaacaagttaccacaaactaggtggcttaaaacaatagaattttattctctcacatttctagaggcagaagttcacagtgtgtcaatagggccatgttctctggaaggctttaggggagaatatatttcatatctttctcttagcttctcggtgtcactggcaatccttagcttactttggctttctgtgtcttcacatcatctttttataagaacaccagtgatagtgattaagggcataccttactttaatatgacctcatcttaactaattatgtcttcaataaccctatttccaaataaggccacattctgaagtattgggagttagaacttaaagctttttgggagggacacagttcaacccataacaacccctaaaatcgatatttattctcaattaagtcttgaaattggtttcaaaaagagaatattctattagagtttttaatgtatagttttaacatatagttctttagcccccaattttttttttttttttttttttttttttttttttttgagacggagtctcgctctgtcgcccaggccggactgcggactgcagtggcgcaatctcggctcactgcaagctccgcttcccgggttcacgccattcccctgcctcagcctcccgagtagctgggactacaggcgcctgccaccgcgcccggctaatttttttgtatttttagtagagacggggtttcaccttgttagccaggatggtctcgatctcctgacctcatgatccacccgcctcggcctcccaaagtgctgggattacaggcgtgagccaccgcgcccggcctgcccccaattatttagtttttctataaacagggaaatttatttgtgtggcccttagaactaatttaatttccactctaattcctacttatgtttatataatgcttttagaaatttgtattattcagaaaataaacatatactattgtatctgttgcctacacttagattttattgcctgctatatttaaattttattagtattttaattgttttattaaagaaagaatgtgcctgtaatctcagcacttttgagaggccaaggcagaaggattgcttgagcccaggagtttgagaccagactgagcaacacagggagacccccatctctacaaaaaataaaaaaattctccaggcctcatggcacatacctgtagttctagttacttgggagactggggtgggaggatgcattgagcccaggagattgaggctgcagtgagccatgatcaggccactgtactccagcttggacaacagagtgagagcttgtctagatagatagatagatagataatctaaatagataatagacagattatctaaatagataatagacagattatctaaatagataatagacagattatctaaatagataatagacagattatctaaatagataatagacagattatctaaatagataatagacagattatctatctaaatagataatagattatctaaatagataatagatagatagattagatagatagatagatagatagagcttggacaacagagtgagagcctgtctagatagatagaaacaaagaaagaaagaaagaatggtgctcatattttaaagcattgaaaaatggtcttccttgcttatattacccacaccttctttgttggcattaagatgcaaactttgttttaaacagttgagtaaatcaaagatgggactgttaagttatttgtgttatttacctgctttttgaaaatgtaaaaataaaactctaggtttaattagtagtatgctatttagtaatgaagtaaagctagaggcttcgaacaaatcttgtgtaatttcctcttgaatgagagagaaaatttaaagtaagcaaacaaataagttgtgtgtcaccactcattcagtcatttaacaagtatttccagagtacttattctgtgccaggaaatgttgtaggtgccctcaacaacttagagtctagcctgagacacaagtaagtaggtaattattatagaatggtatgatctttggaggactgggtattggctggctcatgggagtacaagataggtacccagtgatgaagtcaggaaaggtttcttatggtgatatgatgacgtctatgctgattataaggtcagtgtagaataaactttgtgcttttaaatttgcatagcactgtattagagagttcatcttcaaaataatcgaaaaggctgagtgtggtgacccatggctgtaatcccagcactttgggaggccgaggtgggcagattgcttgagctaggagttcgagaccaggctggccaacatggtgaaaccccgtctctactaaaaatacaaaaattagccaggagtgatggtgcgcacctgtaatgccagctacttgggaggctgaggcaggaggatcacttgaacccaggaggtggaggttgaagtaagccgaggtcatgccactgcactccagcctgggcaacagagtgagactccatctcaaaaaaaaaaaaaatgatcaaagaaaggtgaattttcatctaccctatttctgctgaggaaaatggactattttcaaatatttttaataagggtcaaaatgagggatcatattccattagcgaaccatccaactctgttttgatttggtttaatgaagattttgctatattggaaaagaaacatagccaatcaacatataagttaagatatgttattttcatatgaaataattcacaaattaaagacagtaatttatttgacttaattttatggcactatttaaagctgtttggattatagtgtgtattataaacttgggtggtggaacaaccaatatttattgagctaagttgcttaaacgtcagacactgtttaaatctcacaataatcctgtattagcctcattatagatgagaaaactgggccacagaaaggtttaataactttccccagatcatatagtagttgtagtaggaccaggacttaaatccaggcagatgaatctatagccctccctgcatattattggcactacccactgttttatcaatttacaaatgtaatacgtaatcagaaaactcacacatattacacaagtatctaacatggaaggttaaatcctattttcgtctactagaaagaatcacaggaaaggttttgatttattttgggggtggtttaacacatttaaaaataatgataggattgtgttatcattagagtcaatagacaaatctctgaaaacagaacgttttatttgggaggaagtaattgcactttggagcattcatgcagaccaattgttcggtatgtccacagaaaaaggagaaggttagcggtcttataaaaaaggagacatattacatatagctcttcaagaaagtccattggcactagatttggggagctgtcaagctctgattggtgagtgatggcagtgggtaacactggtcttagagttgcactagtttctttcagtagcccttagataaaactggtttccggttacagcaggcagtttcagcagccaggcctacagagaattacattttgggagaaatgttttgtgccctgagtgcttttcccctaggcctgttgactctgttttagttgggtatgacaagaatgactcaatttttgtaattaattttacattatacaagttgtttacaatttgattttttacttaacagtttatccttagggctttctgtgtccatgaagatatatgtacctgattcttatgtgattatactataaatttatagttgacccttgaacaatgcaggtctgaactgcacaggtcaacttatgcagacttttttaaattgtcatttattaccataaaataatacaaatctattatcaaaggttaaaatttatcaaaacttagcacacagagaccatacatggtaccatgcagttgagagaaatgtaaacaaaggtaaatatgcagtattaaatcataactgcataaaattaactgtggtacatattgtagtactattaggttgtgccaaagtaattgcagtttttgccattattttctatatattcagtatacaataatttcatagccacttcctgttgctgttactgtgaaaagtgttgcaaggccatgtgatactaaccatccccacgtgagcagtttgtctctccagtaagtaaattgcttttctcagtaaaaagttattgcttgaggtgcctccatattttttcatcatctttaatgcaatatggaaacccataagaagtgccactagtgatcctggaagtgctcccgagaattccttgatacatattgtaaattgaggtctgcaactgcaattacctgccatttcagatagatgattcttcttgtaaatagacagtgttaatacatatacaaaatatgttaatcagctctttttattagtaaggcttatagtcagtggtaggctattagtagttaagttttgggagactcaaaagttatcctcggattttagaccacatgggggttggcacccctagaccccatgttgttcaaaggtcaactgtatttaggtgttctccacatgatgcacacttggtacatttcagttttcactatataaaaaaagttttgtttttttttttgtaaagcgaaagcaagtttattaagaaagtaaaggaataaggccaggcgcggtggctcacgcctgtaatcccagcactttgggaggcagaggtgggtagatcatgaggtcaggagttggagaccagcctggccaacgtggtaaaaccccatctctactaaaaatacaaaaattagctgggcacagtggtgggtgcctgtaatcccagctactccggaggctgaggcaggagaatctcttgaacccaggaggtggaggttgcagtgagccgagatcgcgccactgcactccagcctgggtgacagagcaagactctgtctcaaaaaaaaaaaaaagaaaagaataaagaatggttactccataggtggagcaacccctaagtctcctggttggccacttttatggccatttcctgatttatatgctaaacaaggggtagattattccctttctgggaaaggggtgggcaattcccagaactaagggtttctcccctttgtagatcatatagggtaacttctggttgttgccagggtatttgtaaactgtgatggaactgatgggagtatcttttatcatgctaatgcattataattagtgtatagtgagcagtgaggacaaccagaagtcacttttgtcaccatcttagatttggtgggttttggccagcttctctactgcatgctgttttatcagcaaggtctttgtgacctgtcttgtgctgacctcctatctcatcctgtgacttaggatgcctaacctggaaatgcagtcctgtaggtcttgtcctcattttactcagccccttttcaagatggagtcctctggttaaaacacctctgacatatttccctcctcccttttataagggaacccttaatcctaagggttgtagagggacaaatagacatcttctataacttcttcgggctgaatagggatgatgatattcctgcctaactattggggtctcttatatttggggtagagaggagatcagtcagaaagtgtcagtatgatgagggccattcataactctcaattccaaaaaaagatgatatctggaagattagtaagtgttcgatttaataaaacattcagtaattcatattcctacacagaattatcttgtattcctacacagagaacaacagcagtatattctacaacagtaaagcaaaataagtaaaattatcccaagtaaactaaataagaaggctttccatgaactgggcaactgttggaaaccaagctgattccagtatgggcccagaattagaatactgatccagattttcacattaccatctctcttgtttcttctgagcagcagccagagatcactggttggttcacaggaataagcagggttagtctaaattgcagaaaaaaccctcaagaacaactgatgagaaaaacactcaaaaacacctaataacaagtgtaccatagtttttgaaacataatttttttctctctccagtctcccatttttactaaaggcaaatcatgataagactgatttgcttttttatacttggtctgattatctgtataaagtacagcaagaataattatttttcacatgggctttttaaaattggctttgatggaactctgtttcataaggaaactcagataagactttttaaaatatgaattgggtaaattcctttcctcttgaggtcccaagataacttggggctcctgggcctgtcagaaagtgacattctttatttaccacaggtaaggaaccctgtacagggactgcataaacaaggtatgaggcaagttttcccaagggcctttattggctttataagtcaagtttgattccttaaaggaaagcacactattccagccaaagccttggtaaaataaccagtttctccagttgtgtcctgttgcaaaagaaaacattcgtattgcacttatgcaaataactatattgctgtaagttaagaatattcataaataggttccaaattctggagaaatcagaaacaaatatgctccaaattttattcacagtgatatactttactcaattgttaaacagctcaaagaaaagctcacaacagctcaaaagaagttttcttgactctgaaaaataaaacaaagaatcagcaacattttaaacaaaaagtaaaaaaaaaaaaattacttcagtcttctgttagttcagtccatgtagttaatgcttgccctgtttgatatccacgaacactccatctcttcatgagagtcctgaaaatttctttcctctattttaatgtcacaattgccaaagttatcagaaacctgcattgaaaagcacctgtcaaagtcctgtagctgattaaaaatcaacttttgattaaaacaagacaacaattgtctgtggatgacaaaaagccttagggcagcctctgttaaagccataattgactggggattttggttacttctgtggcagataacaattttatataacaattatagtatacattaagtcatatcagaattatagttgtttcccataattttggaacacatgccaataacatatttatacaaatatagcccaaagaaagccaaacatcattttatatttgactatgcttcctgtatgatttttataccaaaaaagccaagtttcacctttgcactagtgtcctattgatgttaaccccaattcttaataaaactgtatagacaaatctatctaattttaatcagtataaaatgtaatcagtataaaactgtatagacaaatctatctaattttaatcagtataaaatttaatcagtataaaatctaattttaatcaatataaccataaggtaagattctcataaactatttacaactctttacaatttttgttaaagagtagattattgctctcaggaaatcctgttgtgattttttccagtgttcaatttatggaaaaactgaataatgcccctttaactttagccaatatgttcacacagatttttttttttgcaagattaattttttacaaatgttgtacaacttgctcaaaccttcagcgttatcctatttaacttaaaacaatcctatccccctttaatctaggtcaaaaatccacattcccatgctttcttataatcttttaccaaaaacacatttcactttccttacatacctgtaatgtaaaactgtttcttcagtagtcttcaattacatgttacaatgttaactcttagcaacttttacttatggtggaaaaccttggtaagtaaggaattctaattatgtactaggtatggagcctaggacacagaacagaagtgtaggtaaggtctgactctttctagcatagctagggggcatggctaacaccacatgtccccaggccttacctagaatctgctccaaagttaaacagttttcaaaagtcaaagaagcagtttatgaccttaaagcatttagcaaacctaatatctaacctgcctaatttaaaccacgtctttattttgaagatattttaattttaccaataatctttaaaactgtatttcccagaaattacttaagtcacatgaactaaaaggcattccactttttacttttctgacaaaatatttaagtgttcattatttttaaaccagttatcaagctcttttatatttcatacacaatacatataaatatacagaagaagagatccagtagttattagatttttcatttgccagttttatttatttatttatttattttgagacagagtcttgctctgttgcccatgctggagtacaatggcatgatcttagctcactgcaacctccgcttcctgggttcaagtgattctcttgcctcagcctcccaagtagctgggattacaagcatgagccaccacacctggctaatttttgtgtttttagtagagacagggtttcgccatgttggccaggctggtcttgaactcctgaccccaggtgatctgcctgcctcagcctcccaaagtgctgggattacaggtgagccatcacccctggctcatttgccagtttcttaattggattactggctttagggtagagcccttggaggaacagggccaggaaagcatgcggtttctacagcctaataagcaggcacagttggaacgcaaaatagatccgccaaaattaagtgtcccatttgtatactggatcctggattcccaaaagagaaacactatagaaaaaggcagtccaatgattttaccatgcatttcattgcaaagtaacccaaagccaatcagtctattctgtgatcagcccatcactcatgggagttgtatctctcaatgggggttgaggggaaggtggggacatccccataccttctaagtggccaagagcatgcttctgatccaaatgtgcaaagatcttgagtatccccctcgtgccattagttatccccaaaagtatatttcctacctagttatataccaaagctctgtgaagtaatttatgatacctccaaagtgaaaaacatcagataatgcaatgcaaagcagaacagaacagagccttagattttgagagggatctatccacttttaattcttggggttccatgaggaaaatagaggttttcactaaaaaaggatctgtggtgccccctctgttttccgatggagtcccaggctgttagagcttgaatgtctactttgaattaagctgacttttaaccacagcactttttaaaacgtccttttaaatcccctattacccgactttagccatgccaaagtgcggatatttctggcttttgaacgttaccaaaggtaaccttccaggtgctcagagaaagaaaaattcaagacagttcatggaggggaagagaatcaacaaatggtaaaggtcacacagatatcaaccagaaagtactcattgcctttgccagattgaacccgggccgccagccattgtaaaatggcaaagccttagctgctgaactccagcactaggcaatttccattgttctttccagaaggagcccagagcagccaattttgagcttgcaaaggctcaagataatttttagagctaattaaaacatgaacccccaaattcctgtcctctggatggtagagacaaagagcaagtactgccatgtggttacaaggtcaagctcctaaggacatttttcaacatgtggtctctgggcaagatgaaagagtggacagttgatctgagtaacagaaaagataagaaagggaaaggagagaatgggagaaaagcattgcctgtggcagggtggggaaggtgaggagctcagggaggcctgagaaagacccctccattgcagtgacactgaatcaagttcaggcagcacttgtctgtagtgaagggacctttttcagcagtcccatcagctcaagtttccccttttggggaggataaaagctccccacgtcccatgattctgtacatgcctaatcctgtcacccacagccgtcagcaggagtgcaaggccaagtaatccaaagagaatagcagttaacatcccgtagtgccaaaccagttcttagccaagagggactttactgagggggatctctaaccccctaaatcttaagaaggagtctaattttcctaagttgggccgcaaaccaaagttcagtcaagcatcttttccttttattaagaggggcgtttaaacccaccctgtcttaggagagactctaactcccgtaagttaggcctctaacccaatcctcttcatcacctgggtaccccactacttaacgaaagttgactaattggtgctgcagtctgctttttggggctggaggtttcctcagtattgtccctacagggtttgccaggaagttattactggaaaggggtcctgatccagaccccaaaagaggtctggatcttgtgcaagaaagaattcaaggtgaatccatagagtaaaatgaaagcaagtttatgaagaaagtaaaggaataaagaatggctactccataggcagagcagccaaatatgtcacattgcatacctatgctagtatttctatagactgtatttccagaaattgaattgctactcaattaaggtgttttaacatttcaacttttaataataatgtattattttatgctcccaccaatggtaaaagaaagtgcttgttaacttacttccttactagtgcagggatattatcagtctttttaatctttgctaatcaaataaccctcaaacctcccccttcccgaaatatatataattaagttataatttggatatttttcagtagcagtttgttttgtcttttttgtgtaatgtgtttttatgtctttacctgttttcttttatatatcattctttctttgatttgtaagacctttttcttttgaccatccgttaaattgatccccatgtaacaaagaataaggtatttaaatttctttcactttcagatcaactgagaaggatcacctcttttgctatcgtaggttaagatttcttttcttttcagtaatgtagaatttaatttaatacctctgttgtcatttgttatttgtatcgcacctaataattcaaagaggagttatattttctcggaaaaattttatactgtgtttaagaggggttttttttgtttttgtttttagaaaatattgtctcatttgtaagcttagctaattttatattcttttcttatttattatgctttcttatttccctttttggatcaggataatgctgactacagattatttcagaaaacactcaaattgtgtcgtttttttgccaactcccttttgcactacgctaaggtaaggctttattatacgttactttatttaattgtagttctctcagaaaacgaattattatccctattccacagaatagaaatttcaagctcagatagcatataacttgatcaagtcacatatctagaaaccggtaaggctgggatttaagtacaggtgtgatttctttatcatttatggttagactatgtcttagaaagtaaaaaaaaaatagtttttattgtattataagatataggaaaaagctgatggtcatttaaaaatttttaaagattcccctgatagaattgattttttcagaaagacaagcagcatagttagagaaaactttgcttccctacacaccaagtaaatatcagatgggtaacaactacccgtcaagtgccattggtacatttcccacaatgtgtctttgccactggaatacaaaccctgcaagctgcagggaacccagtgtaagaagcagccaactactcttaaatggcagctgcccagaaagaccaatttggatggcagtgtatcagtagccagggtaccagccatggcattctgactataataaatcgtcattggaaacccttatctttcgtcaaaaacagaagactaggtcaaaaacaaattgaacatggacaatagtttttttaaaaaccactaatatcttttactaataatgttttgttcactggctgctgtaagcattctctgctcatctttgcaaataatctgccttgacaacttttctatttattaatttttttgagacagagtctcgctctgttgcccaggctggagtgcaatggcgtgatcttggctcactgcaacctctgcctcccaggttcaagtgattctcctgcctcagcctcccgaggagctgagaccacaggcgcctgccaccacacccagctaatttttgtatttttagtagagatggggtttcaccatgttggtcagtctggtcttgaactcctgacctcaggtgatctgcctgccctgccctcccaaaatgctgggattacaggtgtgagccactgtgcccggtcgacaacttttctattttacagttatcgctactgttctgatgactctcaaatacgcagccctctttaaaattatgacacagtttttaacgtttgaacattgtggttaaatagaacaatgagttttttagcctcatcctcctttcattctcatgttaagaatttttttttagtgctgggtgtggtggctcatgcctgtaatcccagcactttgggaggccaaggcaggtggatgacctgaggtcaggagttcaagaccagcctggacaacatggtgaaacccctcctctactaacaatacaaaattagccgggcatggtggtacatgcctgtaatcccagctgcctgggaggctgaggcacgagaattgcttgaacctgggaggcagaggtttcatgagccgagatcacaacattgtactgcagcctgggcaacaagagtgaaacgctatctcaaaaaaaaaaaaagaaaagaaaagaaagaaaaacaaataatttttttaaaaggggtcacattcaggattttatgttattttgcatacctttgtgagattatatgtactaaagagacatatttttatgcaaagaatgaatagagttgttttattttaggaatttcttcctttcctctctgattcttgctgtactttgcaccaactgtatcttcagatacacaggtaagaagaatgccatatgattattaagatacaacaatgccatctgtgccatgcagtgcttaagtacctaccattttatgataaaacagaataatttttcttaatgttttagtaatttttatctgctagcttgaaataattggagatagaggcttttgaaagatacattccacatgagttatgcttatctttgtattttattagtaccttatacaggagtaataattagtaggtgataaaatccaatggcaaatataaatatatatatacacaaatatacgtatacctttatttttctattggcattttttaatctttatttttattttgtttctatgaagtttaagtcacttagcctccatttaaatttacattttgatacctttctgtaattcactttacaggacagtcttttttctgaaaccatctcagaaaagaactgaattacagaaaggtatcaaaatttagatgggggctaagtgacttctaaaattgatggtttcctccaaagagccctaaatttgacacaaagtgagttcatttatccagcagtcctgttgcagcttcataattcatttagtgtcccagacaactttttcacacctttccttcctcaaacttcctgtatcttccaacaccttcccaattcctcactgtcaatgacctcacttcctgtgtcactgaggaaaaatggaagcaattaagagagctgctgtatgtttcctctaacacatctactattctatgtgtatctagacccatatattcattccctcactcccatgagtgaactgtgcccctaagactagcctctccattgtgcattggatttcatcctctctcacaggctcagtgaccttgcaccagcaattattccctttccctcttgcatcatcagcctttcctccatactgggtcactctcatgagtatacaaatatgctgttatttttcccatcttaacaatacaaaacaaaatctcttgactctacgtcctcctacaaataccgtctcgtttctctgcctttctttacagcaaaatttctagaaagagttgtctatacccctgtctcaactctttcttgaatctagtccaatcaggctttctgtaccaacacttcatcaaaatagttcttgttaaggtcatcagtgaccaccacattgctgcatccagtagtcaattatagtccttctgtaacctgtcagtagcacttgatcctcttttttgaacactttgttctgttggtttctagggcatgtctcactcttggttctcttctagtcttactagctgctccttctcagcctccttagcaggtttctcttctaagttaagtgtgtcccagcacttactcctcaggcctgttatctgtctattatcatttagtctcaagactttaagtttatgtctcctttaatgtttaactactagtcaggacatctatactaaattgtcccaaactgaactcttgatttccacccatatcatcctcatacccaacaaaatctgttccttttgtaacttctttatttcagtttaagtggcagttcttcaaattgatcaggccaaaaaaccttgccctattaacatgttctgtcaatgttaccttcagtgcacacacgcacacgtacacgcacttctcatcacctgaactgctaccatctgatctgaccccctattattttcttgcctggattttgcaaaaaactttctatctttgcctcgcgctagtttgttctccacaaagtagccaaagtaaatgataaaatacataaatcagatgatgtgacttctctgctcaacccctcaaaatgactttcatcaatggaacttcttgtctttctttccttgttttatttttcttctttacagcattgaattaacctctgctatattatgtatttacttgtacacttgtctgttaactgtcccctttcattagaattgtaaactataaagacagtgactttgtatattctctttattactgtatcacccactcgtggaacagtgcatggcatgtatacataggcacttagtaaacatatgtcaaattaatttaaaaatagttgattgaaaaaataaattcttgcaatgatgctcagtagatgtaattcaagtctgtggaatttcattactatgttttatttgtatatgtcttttatttatttataatttaatcctcacagtaactcagaatcaatgtcacaaatgatgaaactgagtctcagggagggcaaatgaatgaaccaaagtcatgtaactaattgacagattggtgctttttccatcactctacaaaaacctcaagtgtttatcttaagtgcatactttaaaatgctgttatcctctgctagacagagttttctcatgtattgtcaagtttacaattaatgtggcaaaaaatatagaatacatatcttagttcacataagttttgattgaagttcagtttaaaatccagttactgagacattttcatgaaataatctttccattcttcagtgttagtatacagtttatttcttgtaaagctcttgcttctgagaaactgagtattaattcatagtaaattcagcattctgcctattttaaaacaactttttttttcttttttgagatggagtttcgctcttgctgtctaggctggagtgcaatggcgaaatctcggctcactgcaacctccacctcccaggttcaagcaattctcctgactccgcctcccaagtagctgggattacaggcatgtgccaccatgcttggctaattttgtatttttagtagagacgaggtttctccatgtttgtcaggctggtcttgaactcccaacctcgcttgcctcggcctcccaaagtgctgggattacaggcgtgagccaccacacccggcattttttttttttttttctgagatagagtttcactctgccgcccaggctggagtgcagtggcgcagtcttggctcacagcaacctctgccttctggtttcaagtgattctcctgcctcagcctcccgagtagctgggattacaggcatgcaccaccacaaccagctaatttttgtatttttagtagagacggggtttcaccatgttggcaaggctggtcttgaactcctgacctcaggtgatccacccgcctcaacctcccaaagtgctgggattacaggcatgagccaccacgctccgcccaaaaacaacttttaatagaaataagctagaatttatcagacatagtcttttcaatatatatttttacttttgatttaagatttagatttttatagtatttttaaggatattgtgaaaatgatatcagtgcctcaaagcaacaaagatttctctaagattatcaacttctcattttatagaattatggctatgtttagtttagagatcttgatccaattctggtatcaattcagtactttgaattttgttttataaaatgcacacttatttttaaaaacttagtttttaatatatttttactaccagaacatcagtttatagtacttactctacctaaaattagaagatagctattaatgaatgagttttttttctctcccttcccagcaagtttcctccaagcctttatgctaccaggatttctaaagcacaccaagaggaaatagcaggtgctttcctagtgacactggatccacttatcagtcagctgctcacatttcagcctttcatgcaggtggttttggacagtaaattaggtaagcttcaaaatagatttaatgataaatcatctattatgacatgttagagacactgatttcccctagccattcttttttacaattaagaaatttttattaagtttcttttactttcttttcttgaaacatatttcttatttaaaaattatacctggctgggcacagtgaatcacacctgtaatcccagcactttgggaggccgaggtgggcagatcacctgaggtcaggagttcaagaccagcctgaccaatatggtgaaacgccatctctactaaaaatacaaaaattagctgggtgtggtggcatgtacctatagtcccagctactcgggaggctgagacaggagaatcgcttgaacccagacggtggaggttgcagtgagctgagattacaccactgcactccaggctgggtgacagagtgagactctgactcaaacaaaaaaaaattattcctttacgtattaatcagatttctgctgaattaatgtgtttttattacatgtaagacctgccatgtgaactgcagtttccacaatgtcttcttctggttgttgtcatggataagctgccatctcagcctaaggaagtgcaaaccctgtggtgcacagacagccaggtctcagaaacgacaaccaggtagcaaacatgtttttatccagtcatattaccaatggttaagaaggccctgttgtttggaatggtcttgaaattaagtttgtgtgttttttttttaaatcagatatttatgttaatagttattgtgtagacacacatatatattgctactttataaaagcagataaatataaaatatataaacctatattagatgctaaaaatattttaatatttaattttgttcagtattgcttaatggtcagcattataaacattgattgtaatagagtagctataagtagaaacatttaaaaacgagctctgataaatagaacactagacactgtaaggtatatcctggcaaatttaacctttaatcatcttccttgccaacaccgtagtccaggctctagtttctttcttcctggattactctgtgctctaatttttcacctcttcctttatcccattctgcgtaccacgatgaggttagtctccctaaacctggctctgagcttcctattctgctcaaaaactgaaacataatgttagaacttctcagctttggatttaaagcctgtcccatactattgtcatcttctgctttttctcctcattcttgtattcattttcaacacatattccttgcttctgtcacccccttatttgtgtgcttttactcgtgcttttgtcttctttacgtacttacaatttgaacagttttgttttgttttttttttgtttggagcagggtcttgctctgtcacccaggctggagtgcagtggcatgaccatgggtcactgcagcctcaacttcctgggctcaagtgattctcctaccttagcctcctaaataactgggactaatggtgtgtgccagctgtcctggctaatttttaaattttttctagggataaggtctcactatgttgcccaggtcttccaactcctgggctcaagtgatcttcccgcctcggcctcccaaaatgctgggattacaggcgtgagccactacaccctgcccataacttgactatttttaatttgttgtttaaatcctctaagtttcttcaaccattttaatcttaaaatgactcctcgtctgctacttattttctgtttttccatataatatctaatttagctatttaagtttcaagttccttgaggaactttgactttgtgtaactcagtaccaagataaacagttggtaaatgatgcaaaaaatgtccaggaaaattctcctttaaggaatttctttgacagtgaatatattttccttttatgtgtacatattcacacgtgttggaaactattgctgattatacctcttgaaacattttctgcttaaacaaccttccatgttacatattattattataattgctaattagtaaatgttattaatgttgggttcaatgttctcaatttccctgcaggatatctctactcaaagccgttttctacagttttgagcagtgttctggtgaactctctctacctgttcatttacagggattaaagagtaaggggaaagctgaggtggctgtcaccttgtatcagcatgtttgtgttcatctgtgtacatttattacttcctttcatccctcactgtttgctgaactggtaagcatattacttactgtgctaagctaaggttacacttttgctttctcttcattgaaattgtgattcatatacagaagaaaatgtgggaatacttagtatattccttttgagtgaaacttagttgtgtcctagaaaatggtaatcccagattcctgtattatttagatctaatatttggctaaaatatttgagaaaacattttgggtggggaggtatgcaaagacaatgtgagaagaggaaaaatatgtagtacttaagtaagtttcaaaagaaaagtaaatagcttgtagtatcaggtctcttatagatctcagacataatatagattttaaaaaggatagaatttgatttgaaaagaggttaagaaattctaggaattcgatacttgtaatatctgaaatttaaagatcagtagcatttcagatattacacaatatctagcacctattaaatgttgtatgtgaataaaggcagaaagaggaatataagcatatatgttatttatgttgttttgaatatttcaggctacttagagaatctttgtggatcctagtgactgagttattacatttaaaatcatgttgaactctccatagcacagcacagtacttaatgtatagtaggtgctcaataaatattgagggaatggcagtgtcctttcagatactagaaagtagaactcccccattgaggatctgttatttggattctgatagtgctttcttgttttattttgagaaatataatattattgcttattgtgaactttagtatttaaataaattaatttttctgtttttgattaggatgctgctctgctgaatgctgtacttagtgctaatatgatcacctctttgttagctatggatgcatggtgcttccttgctcggtacaacatatttgcttttttgttctttggattggttattagtagtgactgacagtagataattttataattgtaagcttatagaaaaactgtttcaataatcctttaaaaataattcccaaaacgctttgatttcatattacagcattaaattaggaaacaagttctttctttggttcaagccaatagatgagtactgtttagggagttttgtatattgtgatattatttggtcatggaaataatggcagtttttaatgtcctcatcagaatatttagtgctttatgcaagttcatctccttatgtttctgagtaattgtataaacatagttgtcttctcttttatattgcagatatgggactgctgaactgtgtgcacaccatgtcaccatagtggctcatctggtgcgtagaattacaaggcctaaaacacccactttctatgcacttcctttggggatatgataatctttaagaatgtgaatatcggcgggagaaatatcacagtaacaagattgttttgacagtctttgtcttgtattaatgctgatgcttttaagaaggatgtactaaaaaaccgttagtgtgaaactgggaatgttttctcatattctcaggattttatgtaatttcagtaattgttctgggaaggaaagactgggttaattgaaattacatttaaaattgaatgcaaagtagaaaataagagcgacttataattgatggccaagaggtttctctcttctgtctctctaatatgccttagacaagtcgactcttgattttgttgtattttttttttaagtcaagatgatttgagaggaacttgagtttgacattgatagatacttttggcaaaagaagtcatgttttatgaatgggtacagacagaaaattattttataatgatttcatcatcttaacattaacattttttgcttttaaattctgaggtgttttatgtgttccatataagatgattatgacctatttgttacatatttttttccctggcctttaagatcttatgtgggccatacatcttttgttttctaatagtcttattgtatcatatatttcttggtttacctttaaaggattttgtagatcagatccagtgaggtgtgtaataacctgaacagctgacatctatgtctccatggctgatggtctggattatcacttacacactttactaaatccttaacatatctttcacaaagcagataaagagtgatttttatgttatgtgttttatgtctgaagtttcctttaaataaaagctttcttagtgcattatgttgtaggaatggatttcttctagttcattatgataaaattgattccaggatggaatgatactatattatgataggaattgataaaattgaatttataaaatttttttgttagtggtggtttttttcttagagacagggtctcattctgtcacccaggctggaatgcagtggtgtgcaatcatagttcactacagcctcaaacttctgggtgcaaatggtcctcctccctcaccctgctgagtagctgggactacaggcatgcgccactatgcccagctgatttttaaaactttttgtggatatggagttcttgctgtgttgcccaggctagtttcaaactcccgggctcaagcagtcctcccaccttggcctcccaaagtgctgggattacagttgtgaaccaccacactcagcccctgtaacatcttttaatgaagcttctgtcttgtagagttttatctacctctctactattgtagttagatcttaaaaagttccatgaattgtctttgagtaggaggactgacatacccagttatcatcaaaatgataattagaaatagaaattacagtgttaaatatgtcagaagttcaatctcattctaaatttagattcattgaagataagaaaagccccaaattaaaagtcaatattacctacaatcttttcccctagaaagagctgctattaatattttggcatattctcttcttgtaaaaattctgattctaaattagtcagtctctcctctctctctcatgtctttttccagataaagtcatgccctggagaatgttatcaactcatcaacctatcaatactgttgaagcgtctctttttcttcatggcaccaccccatcaggcaaggaaggatatcatctttgtcactgtctgtgaagctgctcagagttggattcagactcctttgatagcctttttttttccatttttaaaaatttatcttattattttttttgagacagagtctcgctctgtcacccaggctggttttacagtggctcgatcacagctcactgcagcctcgacttcctgggctcaagcaatcctcccacctcagcctcctgagtagctgggactacaggcacacaccactacgcctggctaatttttaaaaaaattacttgtagagactgggtctcactatgttgcctaggctggtctcaaactcctgggctcaagtgatccatctctgccttccaaagtgctgagattgcaggtgtgagccactctgcctggccttgcctccatttattttaaatttaaatactggtgtgatctaagcataaatttttgacgttgattgctgtgcttgttgctgggtatagattttgatgtccttgctttgagttatagataattattctaattctgtcttcctgaaatagatctttccccttatttttcatatatatttgagatacatgatatgaaatggttctatatcccctgccccttttattttgaagagctagaatattatttttgctcttagtggtctttacttacataaacctgtatggcctagtgcagtccctcagactggtcacattggaactgttgtaggagctcttttaaaaatataagttcctggactctaatctgtggatgggtgggtatggaggcatgggtatgaagtaaggctcaataatttgtttttgttggtactatcattaagttcctgcgtgagtcagacttggatctaagcttgggaaccactagattagtgaagaggattagactttaaggtcttatggtcctcggtttgaatcctggcataccatgaccttaggcaagtcatcctttctgaacttcattttccttgtctgcaaagcagaagatatgtataactattttgaaaaagtttgtaaagacttggaaataatacatgcaaaacaggatagtgctgggtttaagagggtgctcagtaaatgctaggagttatttctgactagggtttttgcctcaagtccaagtcttttcctgccctagagtggttggccaggaaccagaggtactacacctacctcttagccttcttttcgtagccccacctattagccctctaagagcacggggagcttgcttgcttacaaaagaattttctactccagatatcttagaagaagtgggactgggagggaaagggtcacatgtcataagactttaagaaagtcactttcctttttttttttttttttttttttttaaatagagacagggtctggttatgttgcccaggctggtctcaaacttgaactcagacgatcctcctgcctcggcgtcccaaagtgctgggattagaggtgtgagctattgagctcagctgtcactttccttttaacctcaattttcttatttatacaacaggaataaaattattttcccaaggtggttatgaaattttaacttttaaaataatataactcagaatgaattagctatgaggtctagaagcagtgttctaaattagataaattatagtttatgcctagagatctcttactctcagttttctaaatttttccaaataattgagactatcagatatgtaaattataggtaaatgaggggttacttttaatttgtatcttcagttatcaaatgcagattttctttatgtacaagttattgtgataaaatttaagaaaacctgaatctgcatacctattttaagagtccttaggagagttaattataaaattgagatagatactaatactcatatggcagttaagaaacttgataagatacacatatggcatgaaaagaccatttaacaaatgttaggtctcctctcctgcttggctcttttttttaaccccttaagacattatcctttctcttaaatgaaggaggaagggaaataatatttttgagactgtaacaggccaggcacttaattcatttagtccttacagcagccttgtgggatagataatattgtgtccatttgacagatgaagaaacaatagctcgaggaaattaaataacttccacaaattcacacctaacagctgatctgggatgctgaggcaggaggatcagaggatctttttatttagcccaaagttcaagtccagccggacaacatagcaagactgtcttattgtaaaaaaacaacttggaaaccacggcactatctcatgatatcttaaggaacataaaatctagtagaaattataaatttataaagatactcatattaaagagtggtttgtgatgaatgccaaaactgaggcacaaatcaaatgttgttgggtgtttgtagctgagacagtcatttctgaagaggtgcagtatgggaacaggtaggcataggagttggaattgatggcatttgagttacatgttacaggatgaatgtggaaggtggtgggactagagaagcaaaggtaagaaagcatattagagaaaaaaggagaagtgagcaatgaaacttgaaataattattcaactatttgcatacaagatggtgtctttttaaatagtaaaataagaacccaaatttttttacgagtgatgtcaccttaacataaatgaaaatagttaatcccagtatggtgatgatatactttaaaaaacaaaggtgtctatgatgctaatttggaagaaaatgctaatagaaagatgttagaatgcatttactgttctaataggagtaattattgaaatcacattatttcttttagtatgtaactattagtagtattccattgtatcaagaaaagcaaaaatacaaggaggttacctacttgagggaaaagtatttaatatgccttatctaagcacactgataattgtactacctttttaatgtaaagtaaaaattactgtatttgcattttaaacccacaagtgtattttttctctttccaattttaagaagtcataattctctgtgtattgtccccttttactttagtcttttatgaactattttgtcatagcagttttaagtctttagaattgtgttgaaaccagggttttcaacctcagaataaatcttgaactctttctataacaaattttggcaatacctacccttttatgttgtccaggacattatttttttagtttctattttggaaagggaagtagttcacttacttactggactttattataaagaaaggtgatatttgaactgatgtttaccagttggcacagttctcttggctttcctgatgtagtttggttttatgaataaagctgctttttgtaatagacactcgctcatcaagggatctgtttttctggctgtagcctctgtcacagcagatagccacatgatttctagcttgcattgactggtaaatattttccacaaaagaaataaaattgaaatacaaatatagcatatgacagaaaagtttctctgtcagatttaattttttttttttttttttggtgggtttttagtttttggtatgggaaaagttttcatcaagtagattttgaatattttaaattgaattattctacttcttagaaaatacactaatatacttcctagttggattatacttattttaatcattaaatgcagcattggtttttaccatttttctaccaaaaactgattcaacatttaaactgtttcttagaacttttgttttccatttttatctagtctctaacatctgcattttaacaaaacagtacttttctgttaacctagtaagcactttggttatttcagtggtggaatggatttgccaaccacgctctttttgatttgtggcttacctttgtgaaactgatttagtatgttgtctaaagtaggacagaaccagctaactcatttgaaagctgaatctttgcttctttaagttctctgctataatcaagtgagataacagtaagctatgaaggttgactaaatccagtttgtatatttggaatattacttttgacttaactgtacaaggtgacgagtatataggaaaataagacttattggtaagtaggagcatgataagatatctgacataactaataatgaaatacattatttaatgtcttggtgcatttatattgtgctccacttaagctgtgtttttgttttggaaaccaatgcagcatcaataacaataataataaagcatgttcatttatgttaccttggtctggaatgtagatattaccgtaccattataaagctttctcgaaatattaaatgtggaaactaatacttagcttttgtgtatccattcctctgacttgtctcatgttactcttctttctttaacaatttatttcagctggagtttatccagaaattttccccaaaagaagcagaaaatctgcctctgtggcaacatatttccttccaggcgttacctcctgagcttagggaacaaactgtccatgaggtcaccacagtaggcactgcagaatgcaggaaatggctgagcaggagtcgtactttgggagaactagaatctctggtaagataataattttgatttattttattcattcagcagctgtttattgagcattgttttaggtactggggttaggttgttaataagatgcacacactctctgttctctgtttctgttagaacctagtaagattttcagatttcttcattgtaaaagaatctgtgagaaacttaactgttattttaattgatgtattatattggggggttgtttcctatgtcgcttaaggtatgttgagacatgatcaaacacactatggaacacttcacttgtgtatttttgctgatgtatctctggattatgcagatgtaattcttccattcgacaaaatacaacccccattttatgctaacttactctgaacctttatgtaccttttacatagaatgttccctcataaaataatggaataataagagacttatctactagaagaagtaggaaatgtgagatttttaaaagttggctggatatagtacatgtagttgaaatttcgagtttagtgttcatatgctcattcattcattcaacaaatatatttggagtacttttatgtgccactttgttctaggcattgggggtacatcgggaaccaaaaatttctactctcatagactcacatttgagcttagcagtggacagtaaaataagaaatgccaattatgttaagtagagaaaagcaaagataaggatagggcattcaaagggacagaggtctatttgcagttctaaattaggagttcaggtttttctgagggcatatgtttccatgctgagtacaaatgttctgataccgttatatgtaatgacacttgatcataattattataattttttggcggggatgaggtttcgttcttattgcccaggctggagtgcaatggtgtgatcttggctcactgcaacctccacctcacggattcaggcaattctcctgcctcagcctcctgagtagcagggattacaggctcccaccaccatgcccagctaattttttgtatttttagtagagacggactttcaccatgttggccaggcaggtcacgaactcctgatgtcaggtaatctaccctccttggcctcccaaagtgctgggattacaggtgtgagccactgtgcccaggcttatccaaaggaaatgtttttatgtgactttattttagaaaaagtatcaaatacctagttaagaatgggttaaatgtgtccgagtttagcatttaatgtgtaccaatttctatagtaaggacaaaggatgttttgttttatattaggtaaagaaaagcactataagtaaactttttgaagtatgaccacagctttttagtccagcaggttgttcaacatacgtcttttattttaaattttttcaacttttattttttattttattttttgagatggagtctcgctctgttgcccaggctagagtgcagtggcatgattttggctcaccgcaacctctgcctcctgggcttaagcgattatcctgcctcagcctccagagcagctgggattacaggcacccgccaccatgcctggctcatttttgtatttttagtagagatggggtttcaccatgttgaccaggctggtctcgaactcctgacctcaggtgatctgtccacctcggtctcccaaagtgctgggattagaggagtgagccaccacacccagcctcaacttttattttagatttaggggatacttgtgcaggtttgtttcctggttttattgcgtgatgctgaggtttgggatatgaatgatttcatcacccaggtactcagcatagtacccaaccgtttatcaacccttaccatctctcctccctccccctactagtcccgtgtttattgttgccatctttatgtccatgagtgcccagtgtttagctctcacttataagtgagaacatgtggtatttggttttctgttcctttgttaatttgcttagggtaatggtgtctagccgctctctgttgctgcaaaggacatgatttcattcttttttatgactgtatactattccatggtatatatgtaccacattttctttaatctgttgatggacatctaggttgattccatgtctgctgttgtgagtagtgctgcaatgaacatgtgagtacatgtgtctttttggtagaacgatttgttttctttcggatatgtacccagtaatgagattgctgggtagaatggtagttctgagttctttgagaaatctccaaactgctttccacagtggctgaaataatatacattcctaccaacagtatataagcatttactttctctgcagcctcaccagcatctgttgtttgactttttaataacggccattgtgactggtgtgagatagtatctcgttgtgattttgatttgcatttccctgatagctttttcatatgatggttggcctcttgtgtgtcttgttttgagaagcgtctgttcatgtcttttgcccattttctaatggggttgttttttacttgttcaggtgtttaagttccttatagattctggatattagacctttgtcacatgcatagtttgcaagtattttctcccattttatgggttgtctgtttactttgttgatagtttcttttgctgtgcagaagctctttaattaggtcccacttgtcaatttttgttttcattacaattgctattggtgtctttctcaaggctgatgtctagaatggtgtttcctaggttttttcctaggattcttatagtttgaggtcttatatttaaatctttaatccatcttgagttaatttttgtatatgctgaaaggtggctatccagtttcattcttctgcatgtaggctagctagctatcccagcaccatttattgaataggagtcctttctctgttgcttgtttttgttgactttttcaatgatcacatggctgtaggtatgtggctttatttgtaggttctctattgtgtttcattgatccatttctgtttttgtacctgtatcatgatgttttggttactgtagtcttatagtatagtttcaagtcaagtcacgtgatgcctctggccttcttcattttgcttaggattactttggctattcaggctcttttttgattccatatgaattttagaatagtttcttctaattctgtgaaaaatggtgtcaatagtttggtaggaaaagcattgaatctgtagattgctttgggcagtatggccattttaatgatactgactcttccaatctatgagcatggaatgtttttccatttgtttgtgtcatctatgatttcttttagcaatgttttatagttctccttgtagagatctttcacctccttggttaaatgtattcctaggggtgtgcgtgtatctactgtaaacaggatcgtgttcttttcttttttcttttttttttttttgttgagacggagtctcgcactgtcgctcaggctggagtgcagtggtgtgatctcggctcactgtgagctctgcctcctgggttcctgccattctcctgcctcagcctcccgagtagctgggactacaggtgcccgccaacacgcccggctaattttttgtatttttagtagagatggggtctcactgtgttagccaggatggcctcgatctcctgacattgtgatccacccacctcggcctcccaaagtgctgggattacaggcatgagccactgcgctcggccttgtgttcctgatttgccactcagcttgaatgttattggtgtatagaaatggtactgatttttgtacattgattttgtatcctgaaacagatagtttgacttcttcttttcgtacttgtgtgctgcttttatttttttctcttgcttattgctctggcttgaactttcaatactatgttgaataggagtggtgagagtgggcatccttgtcttgttccatttctgaagaggaatgcctccagtttttgcctgttcagtacgacgttggctgtgagtttgtcatagatggctcttattatttcgatgtatgttcttttgatgcctagtgtcttgatggcctttattataaagggatgttggattttatcaaaagctttttccatatctattgagatgatgaatatggtttttgtctttaattctgcttatgtggtgaatcacacttattgatttgcatatgttgaaccaaccttgcatcccaggaatggagtatacttgatcatgttgaattaatttttgatgtgctattgaatttggtttgctagtatcgttttgaggatttctgcatctagaacatgtttatttgtaaaaggaaataggtaaatcttaagaagttgtatggtaattgcataaaattaagtgtggttgtgtaagtataatagattcaaggcattcattgttactgtttattacattctcataagaccttccctgtacccccaccacacctcaaacaacctcatttctggccagagagagaattgagtattttcacacatggtaaaagttaatccagaaaacattgcctttagtttcaaatactagtattttttaagtactatctttgcttattaaatgcagtgttgctgaggcatttaaaattttaaaacaacaggaaaaataaaaatctagtaacctataaagattgctgggtgcgtaatgtgaaaaaataactttttgttgatgtatattataaattagcttgattatactggccacttgtatcaaaactatttattaaagtagatttctgcttccatttggtaactttgggttaccaacatttcaccctaaaaggaagtttatggctgggtgcggtggctcatgcctgtaatcctagcactttgggaggccgaggctggcagatcatgaggtcaagagatcgagaccatcctggccaacatggtgaaaactgagtctctaattaaaatacaaaaattagctcgtgtggtggtatgtgcctgtagtcccagcttctcgggaggttgaggtaggagaatcgctcgaacctgggagttggaggttgcagtgagccgagattgcaccactgcactccagcctggtgacggagtgagatgccatctcaaaaaaaaaaaaaaagtttatttagaaaaataaagcaaatgtttctgtgtacaaggaaaattatttttaatatatacttgtgttaaatagctgaaaagatggctttggctcttagaaatattattctacatggactttatgaagagttaaaagtaacttttataacctctagttaagtcggctcttggtggtgctttagactggtgtttaaactcaagtcctttcctgtttctgtccttcagaacacagtactgtctgctttgcttgcagtatgtaattctgctggtgaagctttggatacaggaaaacaaactgcaattatcgaagttgtgagtcagctttgggcttttttaaacattaaacaggtaaggaaagcaactgatcctttccttatcaaaaaatagaaaatatcaaaaaaagaggattgtactgaaattttccagtgtagagtaaaatgtatctaattcttttgggtgcttggtagacctttataagaacttaaagtacctgtactctctcacgcagctttttcagagtgtgatagcattatattagtaaaatcagaatacgtaatgtgatggcagtccacctacttactttcctaactggttataccctttccccacctccccatctcttcccctattgtttctgttctgtcttaggttaatgtatcctatttctgtaattctaggacctttaataaatcttttgggcaatggagagtgagctgacttaaaggtggaaagggctagtgaatggatgtggctaatttgtatttctctttcccagcaaagccaaaaagccaagtgatgatctaaaactaatgatatgcatcccacacatggttgtacacgtgtttcttagtttgaaaatatagcctgtttgttttctttgactaagtagaaattaacattggcctctggcagctagaggaagctaaaggcaacagccatacttttgggaaatgatagatatgattttacagataatgttttattattgttttttatggtcagattgccctactgcagtgttttggcttcaacaaatacttttcctgatgttcacaaatcattcagtattcattcaggatatctgtgctggagatatagcttacaatattataatgtaaaccaaaattatgaagaagggaaatgaaattttaagattactaaggaacatacaagcctttcagtgatagacaagtaattagatcccttttagacttaaatttggatttcagtcacagctctgctttttgtcctagccatgtgatcttgaacaaattgtttaacctctttgaccctgttttcttatcagtaaagtgaaggtaataatatctacctcatagagctgttttgtaaggcataaatgaggtaataaatataaaatacttaacatattacctgatatataataaatgctcaataaaagcttgctattattattcttatgtgattgaaaatttttcttcaaaattactttgtgtttcttaggtagcagatcaaccttatgttcaacagacattcagccttttacttccactgttgggatttttcattcaaactctagatcctaaactgatacttcaggtaagaataatgaccagattgatactttgtttgctaaggaggttgctaaaactgctatcatgtaaaataactttctagaaatagttcctttaaacctcctcttgttgtgtcatatattgacttgtcttcatcaaggatatctcatttctctttcttccttacagtattgttaatatatggcgctgttaattcagcctttatctgttcttctctgtcaccctatactgagcagtcaatactttttgttattactgttaactacccactgcaaacccctgaggttaggagtcatagttcatgtgttgaaccctgcattcatagcagtttcaaaagcatttcagcagctgtgggaatgtggaatctaaccagtgtgtattaaaagatagcacctattgtttctttgaaaaaataaaattattttgaaagaagagcactgctgaatttcctctttggcctccaacttacatggctaggacaggcagagcctgggtcactgtctagggaacccttgtggtgcctcagctgtgcctttcttttggaagttctaagatgacagagaaagtggaaaagcccttcagctaaactgaagtgatttagaggctttggaatgagtccatactagacagaattgatgccccaaattaagagttagcttaagctcagggtcaggtaagaaagataaacaataactgttaagaggagaaactacccttcttatttatgaagatgatcgaagagatgattcctgtcacagtatgtggtggaacagaaaggaatgaaactagtaacagctttgcttttagtagctgtttttaatggtgtatgtatatgaagaagttagcaataacaagtatgtcctataccatatgtataacatggattttactaagttataaagagtcagaatacagtaattaactcattgaatgcaacaatttgattctgattctgaaagctctaatatttttagaaaaaatacaataattttgatataatgtgcctacctttaaaaaacccaaataaagttctaaaatttctaaataagtagattgttcaaagggtattgcttcctttataaaagatttcacctcaagattcttttaaattgggggtttgcagattatggccttctgtctaaattttgccctcctgttttcagcccaagagctaggcatgaattttaaaggtttgcaaaataaaaaataatatgtaacagagaacatgttgcctacaaagcctaaaatacttactatttggcctgttagagaaaaagcttaccagtccttgctaaataatgaacttctctcaatagaattttaaatacaggcataccacagagagattacaggttgtgttccagaccaccacaataaagtgagtgagtcacatgaattttttggcttcccagtgcatacagaagttatgtttacactatactgtaggttgtgtataatagcattatgtgtaaaaaatgtacataattaaaaaacactttattgctaaaaacactaatgatcatataagccttcagcaaaacataatctttttggtagtggagggtcttgcttcagtgtggatggctgctaacccatcaggatggtggttgctgaaggttagggtggctgtggcaatttcttaaaatacgacaatgaagtctgccacatcaattgactcttcccttcatgaaagatttctctgtagcatgtgatgctgtttgatggtattttacccacagtaaaacttctttcaaaattagagtcaatcttctcaaatcctgctagtgctttaataactcagtttatgtaatactctaaattctttgttttcatttcaacaatgttcacaccatcttctataccaggagtagttatgtgtcaagaaaccactttctttgctcattcatgagaagcaactcctcttcaagtttgatcatgagattgcagcaattcagtcacatcttcaggatctacttctagtttgctagctatttctaccacatctgcagttacttcctccacggtaggcttgaaccccccaaagtcatccatgagggatggaatcaacttctaattcctgttaatgttgatattttgacctcctccaaatgaatcatgaatgtttttcatggcatctgaaatgatgactccttcccagaaggtttccaatttactttgtccaggttcatcagaggaatcactatccatggcagctatagccttataaaacgtatttcttaaacagtaagacttgaaagtcacaattattccttgattgatgggctgcagaatgactgttgtattaacaaacatgaaaacaatattcatctccttatacgtctccttcagagcgcctggttgagcaggtgcattgtcaatgagcagtatattttgaaagaaatctttttttctgagcagtaggcctctcaatagtgggccaaaaaatattcagtaaacagtgatataaacaggtatgccatcatcctggctttgttgttccattgatagagtacatgcagagtagatttagcagaattcttaagggccttaggatttttttaatagtaagtgaacattggcttcaacttcagcagctgcattagcccccaagaagagagtctgtcctttgagctttgaagccaggcattgacttcacccctctagctatgaaaatcctaggtagcatcttcttccaatagaatggtgtttcctctacattaaaaatatattgtttaatgcaaccacttccatcagtgatcttagccagatcttctggataattgactgcagcttcttcatcagcacttgttgcttcaccttgtgcttttgtgttacggagattgcttcttaaacttcacgggtcaacctcattagcatcaaacatttcttctgcagctttttcagctctcagctttcacagaattggagagagggcctggctttggatttggctttggcttaaaggaatattgtggctggtttgatctatccagaccactaaaactttccacatcaacaataagactttccgtgttcattggaatagcatttttcatttccttcaagaacttttcctttgcattcacgacttggctaacttgcaaaagaggcctagcttttcacctctcttgacttttgacagcaccaggctgaattatctttagcttttgatttaaagtgagagatgagattatacttttcactcgaacacttaagaggccattttagggttaattttaatattgtgtctcagggaatagggaagcccaaggagagggggagagactggtgacctacctgttggtagaacagtcacaacacacaatttattatatttgccatcttataggggcacagtttgtggtgctccaaaacaatgacaatagtaacatcaaagatcacaaatcagcgtaataaaatcctaatgaacaagttgaaatattgcaggaattaccaatctgtgacagccatgaagtgaacacatgctgttgcagaaatggtacaggtagacttgttcagtacagagttgccacacaccttatatttctaaaaaaaaaaaaaaaaaaaaaaaaaaagcagtatcttcaaattgcaataaatcaaagcacaataaaatactgtttgtacaaaatatgttttaaaggtttggtatataaagtttttcagaaacatgtatacttttattttttacgtggttggaggcaggagggtgtggtaagaataatgctttaactgttaacttgttcataggattgtcttatttaaattctaccagtgaagttcaggggctgtggtgtgtttgtttttttctgggtttggttttgtttcccctccccacatttccatccaaatcttaggcagttattgtgtctgtacaaaatactggtattatttataactgttctttggtcttcacctctgtaggcagtaactttgcagacctcgctacttaaattagagcttcctgactatgttcgtttggcaatgttggattttgtatcttctttaggaaaactttttatacctgaagctatccaggtaatattgcttaactctgttcttgtattattaaaacaaaatctctataagagttagtgattaagggatttttaggctttttctgaaattttgcaattactgacaaagttggaaaaaaaaaactatgttccagacagattataaaatctatttataacttataatacaactcattttaagttcttttcttttagaaaaatatatgttgatacacaaataattagttggctgtagtctaccatattagattcttattccagttgggttctaatacatagttcctgtgtatttgtcttatagggaacagcatgtaattaggaaatttggtaatttattaaagttattctcttcgttttttatccatgaaagagaacctgtttttaaagacgatatttttgaaagtgttgcaaaatatgtatagctgacaaatagattatttataaaattatactgcactggcctggcaatacacatctactgaattttaaaacctcagtaaatgtatattaccaggccagtacataatttaaagaacttacagcaaagagatcttcataaattgagaattacgccttccttattactatagtcaaaatttagtaattctagtaattgacacttcaatctccaagggagagactataaagagttcactaatgagaactttcttacataattaaagcaaacacattatagacagtatctcagaacatgtagattaaactctttgaaaccaaaaatttaatttctaaggggctcttttatttgttcataagttaacagtatcccatctgtctccatcatgttaaggttttatttcatgagataagcatagaatgttgacagcttttcagctctcttgacaaaaatatccaaagacacttggcatctgagctgtcttctttttaccatgaaataaatctattccaaaatgctgcttcatttgtgaaccactatggactatgcacgggcctagaaattatgaaacaaatgttttataagcagaaatcgcagtgccttctgtattcccaggagtgaggtcaagacctgaagaaatttttgagattcatcagaacataggaggcatttaaagccatgaaatgagattgactgatttatccattcgggaaagattacgtttttgctgtacccagtgctgttttaatcattggcaatgcagtaatgaaccaaactaataaatccccactgttagcctgtttagaggcaataaacaataacaacatgatgatatgtgcagtatattaaatggtggtgagtgctatggagaaaaataaagcagggaaggaagatagggaatatgaatgtgggggtccaatttgaaatgggatatatagttagtgaagtcctcaccaaggtgacatgcaagtaaaaacctgaaatgcaaagcactggagatgggagcatgcctcatattcagggaagcaagtatagctaacacaaaggtagcaggactttgcaggtcatttgaggactttggctttcactaacaagggaaatagggagctactggaaggatttgagtaaaagagtgacattacctaatatgttttagtgtgtgtcccctgggacaggattatgttaacttgacaacactgggcttattgaatgtatggctattttatgattatctattatggtttcttttctctattataataaggcttggttcttttaggacagaattctgcccaacctgtcctgtatgtttgccttactgctagctgacaggagttggctgctagaacaacataccttggaggcgtttactcagttcgctgaggtaattataaaactgatttatcacagtgactttcaaaccattttaatatttcaaatattccagaacaatcccaaaacatttattgaactgcttctgtattgcaatcggaaaattgtctgaagggtacattactcgttatctcttttacagcttctcaaaatgaggcttagataaatgaagtgaatttcgtaaggtcctctgaataaacaaggaccagaacaggcatacacagcaggcctactgatacagacagacacagacacagtcttccagcagatagtatttttgggtcaaatgataatacatttcattttgtgctatcagtcataagggttaggctgatgaacctaaacctgtaagatgggttgctcctttactcttactgcatttgctgtatagtcatgcctatgatcataagggagtccagaagcattagtatgacccagcagaagtaattaaagcttacaacacttgtacagaagttaattttgtattatccttagggaccctgaaggaatcatgagtttatcacctttgaggatcctctgggactcttacttaaaatgaatttttggttaaggtagctcataaaactcatctatttgtctttgcaagttgttgaaatgttaaaattggtcttgttcatcaattttttaatagggaacaaatcatgaagagatagttccacagtgtctcagttctgaagaaactaagaacaaagttgtatcctttctggagaaggtactttctttacatggctcatgttttattctttgtcctatttttttttttccgaaattatgtaactgtaaccaacctgagtgtcttcttagcttaaacttttcacagtgctgagcacagtgctgacgacttttactaagcaattgaggccacagaagtaaaacacttggggccaggcgcggcggctcatgcctgtaatcccagcactttgggaggccaaggtgggtggatcatgaggtcaggagttcaagaccagcctggccaacatggggaaaccctgtttctactaaaaatacaaaaattagccgggcatggtggtacgcgcctgcagtcccagctactcgggaggctgaggcaggagaattgcttgaactggggaggtagagattgcagtaagccaagatcatgccactgcactccagcctgagcgacagagtgagactgtctcaaaaaaggacacttgtagttcctctgcctgtagtttggggtgtaatagcactgattatccaggcagtgagatgactaatgaggatccctaagctattaataatcataattaaatacacttgatcacataattaggtaggcctgagaggatgtttactaccatattttgggtataatttaggcatggcttttttttttttttttttttttttttatttgggcagcctcccaagccagggtaagctcagggcccttttttttttttttttttttttttttttggcatggcttttttattctctttgcagccaagacctgtttttacaattaaaaccaaaattttgaatcacaaggttcctatgtctatgcatacttgggaacttagtgtgaggaaataatagttaattgaaatactagtggaactgttaaaccacaaatttagactaccaggagaaactgaattatttgatatattacatgtaatgatgcacgttatatattttacatatattacatatatatttttttaggtgaaatgggcccacttgactcactgaactttattttttagacagagtctcgctctgtcgcccagattggagtgtggtggtgtgatcatagctcgctataacctcaaactcctgggctcaagcattcctcccaccaaagtcctgggattagaggcatgagccaccacacttggcctacttatattacatctaagctggattttaagtacatgtgtatacactgctgttgccagtttcttagcttatacagtaaaggttagcagactatcattttttcctgcaaagacaactctataactaactattttgtaaggaagaacacagtagagtgatttaatccagattatactaagagtatttatagatcagtccatgtgacttccagaatttgcctagtatggttgaacactcagcacttaaattatgtggccatttcatatctagtagagtgctaacatgttgctatttgcttggtttttcatggtccctggcagactgggtttgtagatgaaactgaagctgccaaagtggaacgtgtgaaacaggaaaaaggtattttctgggaaccctttgctaatgtgactgtagaagaagcaaagaggtcatctttacaggtatgggctgatttcaataggggccaaactttaacaaggcaaattctgccctttttacttactgacgaaacaaaccagtgtggtttccagccttatgctgaatttcaaatcaaatagatctagacatgtaaaattctgttttatggtagttgcttttaaaattaagaagtgggactacaccatatcaaatatattctttcagtatgtttgaattattggtagtaacctttaagggaagttacatattgtaccagtgatgctataaatgcagtctttactgaaccacagaagaaaatgaaagaaacttactcctaaatgtttagtttgattccttgccttattaatcaaatgagtctcctaataatttttggcagtaactgaagatcacatctacttattaaaaggcagaatttgacaccaataaggatattcaaaatattgttttgagcactattagtatagtaattagtatagtagtaattcatgaagaacaacattctgataagttttagtcaaactctcataaaaagaaaatacatttatgaacttgtttataagacatgtaagcttggactatgcagcacttctcattgggagccctttgggacaggatacttgttgtataccacatacaaactaagacactggtagtagcactctgaattgctatgataaaccaaaatgcctttacatatttttctagatgactgtgtaggggttttggggtgcatcctcctacccttgtgatccaatgactagaataaaatttgcatgtaagctttactccagtccaaaaggaaggttctttatatttagaatggatattgtgatattacttatgttttttttccagccttatgcaaaaagagctcgtcaggagttcccctgggaagaagagtacaggtcagcgctgcatacaatagcaggggctttggaagcaactgagtcactactccaaaagggtcctgctccagcctggctttcaatggaaatggaggcgctccaagaaaggatggataagctaaaacgttacatacatactctagggtgaaacttatcactaggcagaactgggtttgatgctttgtcaactgaaaatacttatgtctgtacattttctaacagatataaaacaaattttgtaaagttgaatctagtgaaaataatctttatttgacatttagagaacaggattgtggggaatattcttattaagaactttggtacaatgtactacatgtggaacagtcaggaactgcctaggtccacaaagaaccatttactcagatagtctaactgtaaacaaataaataagctgcctaaggaaacctcagcaatttaaaatcatttatataatttatagctaaaattttttaaagttgtatttcataatagagcttactcttatgttaaagaatggcacaaaattaagctaaccagcttgaattacattttctttacttccagaattgtcctggaaaaagcagtaaattcgacctctcctcagctacttgctcttcatagaaactggcctcagtcaaatgcacaaaggctcttcctcctggaaaccagtactgtgagcctcaccacccagggcttttagccagcactcacagtcagtctcctacttcagttggcacagactggataatgagctcctgggatgggaaaagcaggccactttggggttttcttgtcccaaagcctgcttttgaggtattgattttttttaaaaaaagggaatcctttttcctaaagtttaactcacatctattgtcaccagttattatcttcccagttcagctccccttcttcttcccagccttcagcctctccctgcaacaaaataaagcacaccaagaacccactgaaacaaatcatatgcaaaaatcatacgcaaatttgaaaaagcaggaatttaaaatttatcttttgatgccagaaacactacctcgtactaagtaaaataacttagagctctaacagaaagttgaaaagtaggattacaaaaccatggcactggaaaatagcttttcaaaaaccataaaatccagtaaaaatcagtgtggatgacaccaaatccttattttaatcccttttttttctttttcaaataaaaaggttacaatagctcattaaacaaactaagcattgctacatttttctgggggaaggaaagatagataccaatgatagaaactgattttgttaattttgtgcttgacttgactaggaaaatagcatgttgcttgttataaatgggatactgcaactaggacctatgagggaaatcctaaagctagtagcacagtttactccataaaagtactcacctcagtaatttctgctgcagcaaattttgaggaaaactgcatcactggggagacatcatccttttttgggaccatttctgtcctcagttcaggtaatataagaaaagcagcagaaggcttaatttctgggatcatatcagcaaaccaatccatctcaggatcttttactggcttcttttttacttgaatggtgaattcctctcctaaaccaagttctgatggaaccttaaggggcctttcttgtgatgacacttttggcggctcgatttggtctgcgtcatcccccctttgtacaaggctaatcttttggggtaagcttgatttccaaggcatagactcttcagtgagtgaaagcaaagcaggaataggcttctgctcccctgaggtaacaggttttgtagcagtgattccacctcctgggtttactttagtatctaagctgctgggctcgcagtcatcccaagatgactcttccacatccaaggtagtgcactgggacttgacatcatcacaaggttctctaggccaaatctgtatgttgacagtttgattttcaggctcctcaggttcactccagtcaggccactcctcagactttttagaacttgatgggaagttttcactgtcctccgaagtattttttacatctgagagtccatttatgggaaatttaataggctgagaaaatggatcgcctgtagggaaaataattattctcataaaatactggttaaaggtaagaactacacttatgggaaggatagcattaaggaagtgtagtagtataggtctaattacttggaaatatccatgcatactaaacaaaagagatcccagcagaacattactcaagatcaacgatgtcacatgttatccaaataattacataatacttacattattaactcagtggaagcatgtaagtaataactagtgcattcaatccttattaaatatccaaacatacagtatattcacataaatatagaaatgctctaagccaggcagtgttatccttgggatgtttgttaattacatatgcctgaaaaagtcttgcaggctcaaataagtttgcctaactcaacttattaacctcactttaagaaatttccctaagtgtagtagttaaggcactgagagatcctgtgcaatgtgttaatgactttgctctcatttccccaaacttatttaaccacagaactctttttcacaacacgcccattaacatctttcaaaactatcattcttggtacaatttggaagatgctgcactaaggcaacaaaagtctcaaagtaaagtatcagtgcaaaaaagaattcaagtaatgtcaacctgcacttctcaccaactataaagaggaggtaagtatatatccaatagtctggagaaacaagatgagaccaaagctgactacataattacaaataaatcagtctcaaaactcccaaaacacccataagcttattagtctcaggaaaacattcatccaagcaatggaaaagctatataaatttaatatttctacctgtctgtaaaagagtattgtagtaatctcgctgtatgtgcttcttgctgttgatgggcgtgctgccagaaaagaaacatttagggaatatgctagagaaggggttctccaagattggcgagatctgactgtgatggctgcagacgacacacataggagaatctgaaggtaaataaaaactccaaaacatgaaagggacagtaaattgcttcttgatctatcacatggttggtgggcatagttaagtgaaatgggtatatttttatacatataaaggataaaatggaggagagaacatcttcaaacatttgaagacatacacccattatggaatggactgcctgtccctagaggtgtttaagaacaggctgtgtccactccatgtggtgatggatcaaagcattacacagatataacctttgggacacctagctaaaaagttatagcccttcaaaacatgttggtggagatttaaaaccaactgattctacttactttccttttaagaataaaagttgaagagtataagcataagaatatgaatgtagtgaataccacaaaactatacacttaaaagtagttaaaataataaatttaagctgtggacatttaacccccaactggggaaaaaattagtttcaagaaatgtccttaacagtttgccagaaagtttatacttaaaaaaatgggcattggtcaatcaatttttggccaaaaagtgaggatgtggggaatagcctggggtaaactcttaacgattaggtccccagctctcttcagcaccacatctcccccctcctcaccccagcactcaggccaggcctctacaagccctccactcatttgtgccactatcctccttgaagtcctatctaatgccttatccgatgtcttcttctctgaaccatgttctccacctctctttcaggcagacttaatttcctatttccctttcatagctgaaaatgagaccacagcctctacatcacccttttcaagctctttgcagccatgacgctggtttcattagcaccaaggaagaggtgaacgctctttaaaacttcaggaagccaatgttgctttaaaaattcttttagcatcaaaattagagaaaagcctatctgattaactcttttctgctaaatgtctccatgttaccaactatcaatgagaactgggttagagatccagaattacataacaagttcattgtcttactgaaggctacacaaaggagcaatgacattgttgataaaaaattcttgtaagaccagaaattactgctacctcccaggtaacatccactgggaacataccagaaataaggacttcctgcagtatctaaaaggcaacagctttttaccccataggccaacaaaagtcacaagaaacttaaacatctagtgttaataagaattgatgcaacctttttgtaagctgacagtatctactaaatttaaaatatatcctttggcccagcaagtttacttctaacattcagtgtctgcggatgctcaagtctcttaaagaaaatgatgtagtatttaaatataatctatgcatatcatcccataatactttaagtcatttcttggttacttataatacctttattttttggtttcttttctgagtatttttgatccacagttggttaaatctgcaggtgcaaacctgcaaatatgggggaccaactggaaagatacacgtgtaaagatattcattgcagcactgtttgtagggattaaaaatccagaaatggatgcagtatccatgaataaagaaatcactgaatgaattatattcagtgaaatattaggtagctttcaaagagtaagttagacttctatgtattgggagacaggtccctgatatgttgttacttgaaaacaaattatagatttgtgcatggcattttcttaccatttaagcaaaaatcctacacagtcttgtgtcacttaacaatggggacatgttctgagaaatgcatcttagacgattttgtccttgtataaacatagatggtatagcctattaacacctaggctataaactgatacagcatgttactgtactgaatactgtagataattataacacagtggtaattatttgagtgtccaaacatagaaaagtaaaaatataatgatacatggtatacctgtatagggtatttactatgaatggcatttataggactagaagttgctctgagttaccagtgaatgaaggcctaggatattactgtacactaccatacagtttataaacactacacttaggctacactaagtttattaaaaatttttcttcaataatgttatttactataactttataaactttttaatgtttttaactgtttgacttttttgtaataatactatgcttaaaacatattgtacaactgtaccaaaatattttcttatatccttattctgtaagctttttctgtttttaaaattatttacttatttttactttgaaacttttttgttaaaatctaagacacaatcacacacattagcctaggcctacacagggtcaagatcatcaatttcactgtctttgacctccacagcttattccgctggaaggtctgcagggagctgtcatgtcctctgataacaatgccttcttctggaatacctcctgaaggacccctggaggctgtttcacagttaaagttttttctttttaataagcagaaggaatacactaatgattaaaagtaaatatataaaccagttacatagtcatttgttatcattaccaagtattatgtactgcacataattgtatgcactgtacttttatataactggcagcacactaggtttgtttacaccagcatcaccacaaacacatgagtaatgcattccactacagctacaacatcaactgccaatagcaatttttcagctccattataatgtcatgagaccatcatggtatagacagtcagtcatttacgaggtccttcgttaaccaaaatgtccttatgtggtacatgactctctatgcacgtgtaaacatatatctgtgtgtctttttgcaagcttaaaaaaaaagtatgaaaggattcccactgaaaatccccccgagaagttcagaaagagaaattaactttttatttatacttctttatatcatttgactgaatatgaccctcctacattacttatataatactaaaaatctaaaaaaatgacacacaaaaagttagaccttttaataattcttaccttctagagaaaggtcagtatttttagtaaaacttggggcagtgcgtttgaagatcttggttcgttctcctcccacaaccacctctggtccaagcagagagaccagcactgctaggctatgcagagtaattgccacaatggaatcgctagtatcacgcaggcccagcaaaacctaggagcaaatgaggtaataagggttgacaaccacaatacctatctctttcttcccctgtaaatgagcaattgggctgcaaacagattgtgcttagataaactacattatcttagatatgtgttccaggtcagtggctctcaaactacctgtggtaaaagaccagtatcttcccctcccaatccatcacagacttaccatttttaaaaaatacaatcaaaacaaaattaaaaagacatatgttgggtacataaaattactctgtcaaattgcgacaaaaggttttaaatgttaagtcttcatatctgtactcacatcacagaactgtaataaaaagttcatgtactggcagtgttctgcagagcgcactcagaactcatctagggtactaacagttatgttcctgtccatgcttctcttttcagctcttttcaagggtaggaccacctgtcccaaactgagcccatcatgatcttttgtccagtaatataaactagaatttatattttcagtttatataggtttactcaatgaggacagtatgccaggcagggacaagtgcctgtagcccgagctactcagaaggctgaggcatgtggatcacttgagcccaggagttctgggctgtagtgtgctatgctgattgggtgtctgcactaaattcagcatcaatatagtaacctcccaggagctggggactaccaggttgcctaaagaggggtgaaccagcccaggttggaaatggagcaggtcaaactcctgggctgatcggtagtgggttcatgcctgtgaagagccactgcactctagcttgggcaacacagtgagacccccatctctaaaataatttttttttatgaggacagaaaacttggaagttatgggacaaccattttggccatgtgcacaccaaaacaaggaaagctggtcttcagagagtcaaaagtcaaacaaatgcagacagaagaaaggaatgaaaaacatggctgtaagccccagctgcacttgatttccatctaagttagtctaacattcttaaattttttttgctttggctggtttaaaatgagtttcagttacttgcaaccaaaaacaccttagaagacagtcacatgcagatatcaggcaagtactgctctgcatataaggaaggaaatgaccttcaaagcatctgcaccagccagacacaaggccagggtaactggcctgcctactggaagcagcagggcgtgacaggtatcaggaatctttggttttggtcttagctctgctaataattctcaatgtgacttgaccaattggtctttttatttttctggcctggtttcctcatttatatagtaagattaaaggtttccaacaggactcaaaagataattattaggaccaatgctaacagatcactttctgtacatgtaaactaaagcatgtttcttttacatatgattagagttctgcccactgaatatgataatcataaaacagcaatccgcccaagccaaaaattggtcatcctcaacacctcttccatctaatgagaaactgagtactaccccttctgtgtccctctactatatccactgtcacactttccccagcctttgtcatctcttagctaaactattctaacagcttcctagcttatctccctttctgtggtctcttccacactgctaccaaagtgaactttctagcacacacaaattggcccactcttctttaggggaagcagtttcctaagtaatgagaggtttcattgtcttccacatgctcaacatttactctttgacctcagtccaattctgagacctatgatgacaactccatttcagagttaaagtgcttcattcctcttctaaatttccagacacaactacatacagggtaacaattactgctgcagatgtaaatacaaagtgctatgttgtagttactacaacacagagactttaaagtcagcccccagcgaatcacacctccagtatccatgcccttgagtaaacccatcccacaatgagcctgggctttttccaactctaaccgagagaatgaggcaaaaatgactgtcagttcacaacctacactttaagaaggcttcttttgccctttttttttctttagccctggccagccatttaagaagtccacctgccttgctagagaaatcatgtggaaatgtcacatggggggatacaagccccccaagcttcctgaaaattcatggagagaaaggcgcagcctctcagccaccccttccaagataccaaggagccattttggatgtgtcaacccttgtcgggccccagatgactgaagactcagctgatatgtggaacagaaccttcagctgagtccagtcaatccaaagaatcatgagaattaataaaatgattattattttaaggcactaagttttggggtacttacatggcaacggatgactgaaacatgtcccacttatgagctccttgaaagcagagagaatgttaatctatctcataggaaaattatttgaaagacaccatgtgattgtagtcttttaaaacaatttttttaaaacctcatactaggttgaatagtgtccctccaaaattcatgtccatgcagaatgtgacctttagatgaggtcatactgggttagggtaggccataaattcaatgactggtgtctttctaagaggccatgtaaagacagacaaggaggtaagaaggccacgtgacaacagaagcagagactggaatgatacagccacaagccaagaaataccaaggattgctgggagctacgagaagcttgtaaagaggagtccctttcacatcctacagccttcagaggaagcagggtcctgttgacaccctggttttagacttctggcctccagaactaaaaataaatttgtattgctttaagccattataatttgtgataatttgttatggcagcctaagcaactaatacaaacctttcattagtttcactaacaaaaccctttggtgggcaaatcataataaggttccctagtggctgataacaacaggctgaaagccactgataagaatcatctcatgctcctctctgttctaatttaattactttataataattatggataattatatgttatgttcacaaagtgctccatacattattgttattcatttaccctcccaaaattaacaaacaattatagtttctcccaggttaagaccaaatatgtcagtttaatcaatttgcctgtgtgaatggaatggaaatgcaattttaatttcagcactttgtattccacagactgctgcctgaaggctttctaagctattatctgaatacctccaaaactctttctttcagcactcttccctcaggttctgtgactaccccactgcaaacttggcctctgacctgtggcaagatgactttcttcagctgctcctgagtgaagtgctccacgtaggcctcgatgtgagacagcagcaccatccgcacatgctcttcatgaacttcaaacaactggagaagcacggggatcacccgtgactggaacagggctggtgagagcaagcaaggagtttctccctgcgcatgatctacccgaaaaatcaaaggttacagatgaaaaaacaaattttcatttcagtgaaaagtattaagcataattcatacactgaacccaaaactacacatattctaagtactcttctaaattctttttttctttttgagatggagtctcactctgtcacccatgctggagtgcagtggcgcgatctcggctcactgcaacctcctcctcccaggttcaagcaattctcctgcctcagcctcccgagtagctgggattacaggcacccgccaccatgcccggctaatttttgtat

SEQ ID NO: 450 - DNA, 72901 bp, Homo sapiens
gtgtgtatatatgtatatatgtgtatatatgtatatatctatatatgtatatacgtatatatgtgtatatatgtatatatgtatatgtatatatgtttatatgcatatatgtgtatatgtatatatgtttatatgcatatatgtgtatatgtatatatgtttatatgcatatatgtgtatatgtatgtatgtttatatgcatatatgtgtatatgtatatatgtttatatgcatatatgtgtatatgtatatatgtttatatgcatatatgtgtatatgtatatatgtttatatgcatatatatgtatatgtatatatatacagggtatatgtatatttatccttcaatttaaaaaatggaagaggactgtttttaacactacaaaaaaattatataaaacaaatataattgtacaatatatggccctgctgtaaataataatgctaacatcataatgtaaatacttaacaacagccaaagctgtgatataactacattggtagactagtggagacgagtaagaaggaatcgaatgtgtgaattaaatcctagtctttcaagagcgaagaaaatagatagtatctaaaagtgaaaagaaacagctttataaccatgttatttagaaatactggctctcctgtttcctggatccttctcttgcaaaagaaatagctaagtatggacactgaacagcattaggagtatggaacttagaggtgcaaagcaggcagggcactgctgtttttttgttacaagctccatgatacgcagagatctaatcacagtccaaatatttgacttcacaagcaatttctttactatttatacattgtcttacaaggcatgtactctcatttaaaaataataatttggggctgggcacagcggcttacactcatatcctagcacttgggaggccaaggtaggcccattgcttgatcccaggagtttaagaccagcctgggcaacatggcagaaccttatctctacaaaaaaatacaaaaatgagctgcgtatggtggcatgcgcctatagtcccagatactcgggaggctgaggtgggaggattgcttgagcccaggaggcggaggtttcagtagttttttttcaccactacactccagcctgggcaacagagcaagaccctgtctaaaaaaaaaaaaaaaaatcattagaattttgttttccttgtgaacagctcagcactgtgacaaaagtgccaccattcagtcatcttcccagttgaattactggcaggtatcacatgggttttctcttgaagtacttgtggtttaacagtttacagcagtgataatctcttacatcataccctctaaactgtcaacctgtttagcaaatatgacatttctagacatttacagtttccactgattttattgtttttaaaaataactaaaggctaaattccatgaagataactgtgcatcttatttgtttctttaatcctaaatgtaagacatctaatgcctcaaaataccacactaaatgcaagggtctcgcgcaatctcactgcaacctccgtctcctgggctcaagtgatcctcccacctcagccctgcccccttccccctcccagccccccacaccaccaccactgccaccaagtagctgggattacaggcacgcaccaccacgcccggataattttttgtatttttagtaaagatggagtttcacccatcttgcccaggttggtcttgaactcctgagcttaaagaatccgtctagctcggcctcccaaagtgctagaattacaggtgtgagccaccgcacccagcctaaatagatatcttaaaggataataaagataaaataccttgttgggttattctgacaatacatgttaaccactgaatacttttgtgtcctttaatggggtatgattcagtaaaattaggagcaaatttaagggcttgtgaatacgaaaacttcccattgaaatgaatggcatatgtgtgtgtgtgtgtgtgtgtgtgtgtgtgtgtgtgtgtgtgtgtatgtgtgtgtatatatatatgtgtatatatatgtgtgtgtgtgtatatatgtgtgtgtgtgtgtgtgtgtgtgtgtgtgtgtgtgtgtgtgtgtgtgtgtatatatatatgaataagactttatcctaatcaggagtttttcagtatcaaattacctttgaaaagccaggtaagatttgtttgacttaaatgcctaggtttcataaatactaatggttagaatgaggctaaaacaagtagtgcctaatgaaattttttttaaaagttagtgaatctggctgggcacggcgactcacatctgtaatcccagcactttgggaggctgaggtgggtggatcaagagatcaagagtttgagaccagcctagccagcatggtgaaaccctgtctttactaaaaatacaaaaagtagccgggcatggtggcacatgcctatagtcccagctactcaggaggctgaggcaggggaatcgcttgaacccgggaagcggaggttgcagtgagccgagactgtgcactgcactccagcctgggcaacagcacgagactccatctcacaaaaaaaagaagtcagccaggcgcagtggctcacacctgtaatcccagcaccttgggaggccgaggtgggcggatcatgaggtcaggagatcgagaccatcctggctaacacggtgaaaccccgtctctactaaaaatacaaaaaaaaaaaaaaaattagccaggcgtggtggcgggcacctgtagtcccagctactcgggaggctgaggcaggagaatggcatgaacctgggaggcggagcttgcagtgagctgagattgcaccattgccctccagcctgggcaacagagcgagactccatctcaaaaaaaaaaaaaaagtcagtgaatctaaagaaaaaatataaagtaaggaacactcaggggcatttagatatgccaataatcataaaggaagcaacgactgccatgtgggaaatataacagcatcccacaacccagtctgtcaccagattgccaaactgaagggcatccagggatggcgggtcatgacctgtaatgtgagctgcactatcctagagcccagcgtttactcagtctatcctttccttcaactcgtactgatcatttggggccttgtacgcccatggtaaggaatccagaattgattctatcaactgcaatgagatgaggctggagagttttaagcaaaggatttataagatctgatttgcattaagcatcaaatgtgctgatgaatatgaaaaggctcagtaaactccaaagtatcaccccagcatattttattgccttgacagagggcagaacaaaacgaagggaagaaaataaagcaaactaaaatccaagtagaattgacccattacaaattatgtggccagtagtcatgactcaggcttcccttatgccccatttagggagatggagaagatcaggtctgatggaaaagggagaggattttggctttcgacatactaagtttgagatgcccattagacatcaaagtggaaatgctagaaggcaattggatatacctacccatccagagctaaaaggagaaacacgaatggaaacagaaacttaggatccgtcagcgtatagagcagttattaataacaatacaagctaatctttatagcagtaagctatgtacttatagctgagaaagtatgtttcagtcactattttaagtgctttatatgtacaactcacttggtcctcaccacaaccttggaaggtcaggtcctatgatacttactttacaaataaataaactgaggcataaacagattaaataacttgcctaaagacacatagtaagtaaataccagagctaggtttcaaacctaggtaatctgactctggaactctttaaagccatgagattgcttggcaagtacagacagaaattagactgaggacacagtatttcaatttaagcaatttcctgaatatcaaatggctggcaaggtttcaggctctgcagatacaatgaaaaataagacacagtctcttcaggaagcccagtctaattaactactagctgagagcaactatttactaaacaactattcctatatgccacactggctacgcttttaaaacatattatttcacttaatcctcctaacaactttatgggatagatgttatcatcacctctttagaaataaggaaactgaagttaagagaggttaaataacttaatcttggtcaccctgctaggattcaattcaggtccaccttactttaaaatctgatttttttttccaaggaaattccatcacatgctataccacagatgatccttgaggacattatgttaagtaaaataagccagtcacaaaaagacaaatactgtattactatactggggttatctaaagtagtcaaactcacaaaaacagaaaggagaagaatggttaccaaggactgggagggagaaatgggaagttgttcaatggtagtttcagatttgcaagatgaaaaagttctggaaatctgtttcacaacaatgggaatatacttcacattacttaactatacaccttttttttttaagatacagggtttcaccatgttgcccaggctggtctcaaactcctgggctcaaacaatccgctcacctcagcttcccaaagtgttgggattacaggtgtaagccaccacactgggcctgacctatacacttataaatggttaagatggtaaattttatgtttacatatatatatttatatatgtatatagtttgaggcagggtctcattctgttgcccaggctgcagtgtaatggtgtgatcatggctcactgcagccttgacttgccaggctcaagcgatcttcccacctcgggttcctgagcagctgggactacaggcatgcatttccacacctggttaatgttttttttttttttttttgtagtagagctggggctccaccacactgcccaggcttgactcaaactggctcaggtgatcatcccatcttggtctcccaaagtgctgggattacacacatgagccaatgtacctggcctatattatatatttgtttactacaatgaaaaaattttggctaggcgcagtggctcacacctgtaatcccagcactttgggaggacaaggcagggggatcatgacgtcaggagttggagaccagcctgaccgacatggtgaaaccccatctctactaaaaatacaaaaagtagccaggtgtggtggcacacgactgtaatcccagctactcaggaggctgaggcagaattgcttgaatccgggagacggaggatgcagtgaaccgagattgcgccactgcactccagtctgggcaacagagcgagactccgtctaaaaaataaaaaataaaaaatgtttaaatctggtcttttcctactataccacatgccataacagtataaaaatatgggtaatctgggcaacagagcaaaaccctgtctctaccaaagatacaaaaattaatggggtgtggtggcacacgcctgtagtcccagctactagggaggctaaggtgggaggatcacttgagcccaggaagttgagcttgccactgcactccagcctgggtgacagagcaagattctgtctcaaaaaaaaaaaagggtaagcaaataacttattctgcaggatgggagagaggagcggaagggcacagcatggaataaattaaaaaaaaaaaaaactaagaaaagaaatatttgaaagatgaaggtccccattttatcctcactatagctccaggcagggggtctctacttcaacttctgaaatagctcccacacctatatacaaccatcagttaccacaataacctgccttgcttttgtggctccagaatattccagcagccttgtatctggtgagctttttttttttttttttgagatgaagtctcactatgtcacccaggctggagtgcagtggcgtgatctcagctcacaacctccacctcccaggttcaagcaattctcctgcctcagcctccagagtagctgggattacaggtgcttaccaccacgcccggctaatttttgtatttttagtagagacggggcttcgccatgttggccaggctggtctcaaactcctgacctcagatgatccacccgcctcgacctcccaaagcactgggattacaggaatgagccactgtgcccagcctctggtgggcttttctaggctcctcccattctaagtcattcagcactggaaacaaattaagttgcctaaattgcctcatttatcatgctaaagaacttctgtggctccctattattctcagaacactgattatcaggatgggtgtttaggaacatatcatctaacctctctgagcctcagtttcctcatccatattaagaaatgagtcttgaagcataactcaaaagcttgaggattaaagataacatatgccttgtaccgtactttttctaaaggttatgtgctcactaaaagttagtcctctttctgcctgtctctacacacccagctcggtaaggtatcttagcttaagaaggaaagagcaagtatttctaggatttttttttttttttgagacagggtctcactctgtcaatctccgcctcccaggctcaggtaatcctcccacctcagcctccccacaggcacacaccaccaccatgcccggctaaatttttggagacacaggattttgccgtgttgcctgggctggtctcgaattcctggattcaagcgatctgcctgcctcggcctcccaaagtgctgggattacagggtcttaagtcaggtcttaagaacacaagggggaaaaaggctgctcatctatggttgtgtgatggccaggaaaacatttctcactcacaactgctcctttcgtccacagtcctccatacacacagaccccctagcctttattttattctatccttttcgtcatttgaggaagtgatattcaaattaaatttaaataaagttacactgtgaaaagtctcactcccattttctccccctttagcccaattcccacctcactcccaccaaccactttatcagtttcttgagtatccttcaaactttttatgaaaaagctgtctttaaataaagctaatgttttacaggtgttagcaaggttcggggtgggggagggtggaagaagtagtggactaggtcctattcaacctggtttaccctaaagcagtgtccttcgctcactcaaaaataacaataatcatatgttgggcacctgttataagtcagatgcttaatattaactaccttcagcccttagtatgcaccagaaatgcactaatgctttacacaattgccccctttgatctccacaacaatcttaaaaggtaggttactaattctcatcttcatcttacaagtgaggaaactgaggcacagaaaggtcacctgcccaagcaagagagaggagcagggctttgaacccaggcctgactccagagtccctcttaaccgtgacgctctacactagcaaaccagatatagtctctgcacccgctggaactcagcctaatgtgggagacgggcgagaaaaaggcagacaacaaagaaatacgaaattatagactaagaaagtaatgtaaacgaaacgaattcgcggctgtgacagaataacaatggggacctactttagaaaggggaaggaaagagtgtcaaggaaaggcctgagaaaatgacatttatgaaatgctcgggaaccatttgggggctgcaatgatgaccccctcccccacgcccaatacacgggataaactcgaggcccacagaggctaaaacaaacacgacagggtcccccagacgtgtagacgtggcgcaaagaagggaggatccagaaactgggcccagggttcgtacacgccatcagtgtccacagcagcccagccccgctcggcccctgacaagggacatcaagccagctgcttcccacggccccgctgcagctgagagcgtccgggcagctcacagggaggccttccggccagccaaaagggctttggcccgtccagcggcggcctggaaaggcctcttccccggccccccgccagctcccgcctggtccgccccgccccgcccctcctggtccagcctcgtacctgcaccgcccggaccaggccccggccggtcagctggccctgccgcagctgcagcagaatgttaccaggccgcggccggccgccccatccgccccaagccgccactgtggctgccgaccgtctccctcggccggctccagacccagccgctaccggcgccgccgccatgtctcctcgtcggacaaacaggaagcaagcggcctcggggccgcggagatttctacggggcggcggaggggtcgccgcagcgcccccagtgggccgtcggcggaggcgcaagccgcgtggcagggaccgtgtgcggcgtggaggctactgggaattgtagtcctgcgcggcagcggggtaggtgggaaaagagatgtggcctttcctgcactgccggtttctctggcccccgggcccagcatttcggcgaaatctcccaaggtccacattctcccatttctctcgccgatttgggcaggatgcaggcagctggccaagaaatgatcctgggcttcaggtcaggagtcaggccctcgagtccgcttcctgcctgcttctctctacacgtgactcaccgcggacatcgaccaagtcatcgcgctctgccactgcgcctgtgtcctcgtcaggtcactccatctatagattctgggagcctgatcaatcgtagttcctggggctttctctgcgcccgacaccaaaccatgtctaggggaaagggagggtgtctgggatacagtggtgagcagaacggcctgggatcctttatcacgaaatgcaggttacaggggaagacagcagatccatacacaaagaaacgcagtctcaaactggataagttgtgtaactgggtaggttgttgtgaaattaaataatggaagggaaagggattagtaaattgtgacatcatattctctgtcagatgaaaaccctgtcctaatttctatccaccagatagcatgttgtctctaatactcattttttcagctaacttctgtggcaggatggcactgactccccccacccaacacacacacactttttcccttcctagcagggggcctgtaataaaaatgaaagaggagagctaagtgtgatgtaacagggaatggtgaagattgtgactcataactaagatgactgtaacttactgctcaaaccagaacactttaaagaatgaaaagacacaataaataattacaccgggacggtaggcataaaagtgactctcccaggtgaactggcactatggttaccatcctcacaccccatctaaaaggagtagactcaccatccatcttcatagaactagaaaaaagaatcctaaaaatcatatggaaccaaaaaagagcctgcatgtccaaagcaagactaagcaaaaagaataaatctggaggcatcacattacctgacttcaatctatacaataaggccatagtcacccaaacagcatggtactggtataaaaataggcacatagaccaatggaacagaatagagaacacagtataaaaccaaatacttatagccaactgatcttcgataaagcaaacaaaaacataaagtggggaaaggacaccctattcaacagctggtgataactggcaagccacatgcagaagaatgaaactggatcctcatctctcacattatacaaaaataaactcagccgggtgcagtggctcacacctgtaatcccagtggctcacacctgtaatcccagcactttgggaggccgaggtagtcagatcatgaggtcaggagttcgagaccagcctggccaacatggtgaaaccccatctctactaaaaatgcaaaaattagctgggcgtggtggcatgcacctgtagtcccagctacttgggaggctgaggcaggagaatcacttgaaccctggagacagaggtcacagtgagccgagatcacgccactgcactccagtttgatgacaggatgagactccatctcagaaaaaaaaaaaaaaatagccaaagaagttacagtcaggagatattttgttccctatagaaactgaatataacatcttaaaatttgtccctgagtgttgtttcttagaaactcgaacccccaccaaatggatctgctgataggcaaactcagataagggagagctgagaactaaactttgacttctattttttgttataaatttcttcctagggggcctggaggaggacacgaccataagtcagagctaacattcttttctgcagatcccaaatttttagacaaagctttacctccttaaccaattacaagtcagaaaatctttgaatccacttgtgggcccctggttggagatgtcctgtctttttaggtggaaccaatatacagcccctatgtattgatttatgacttcgcctgtggcctctgccctcctgccattaaaaacctgtaagccggctgggcgcggtggctcacacctataatcccagcactttgggtggccgaggcaggtggatcacctgaggtcaggagttcgagaccagcctgaccaaaacggcaaaaccccgtctctactaaagatacaaaaattagccaggcatggtggcacgtgcctgtaatcccagctactcgggaagctgaggcaggagaatcgcttgaacccaggaggcagaggttgcagtgagctgagattgcaccactgcactccagcctgggcgacagagcaagactctgtctcaaaaaaataaaataaaacccctgtaagccataagggagttcaggtcttaagcataagctgtttgattctcctcgcttggcaccctgcagcaagtgcaataataaatgcctcactttctcttgctgtaatcccaatgtcagtggctttgctgcaccaggtaagcagccctcactttggttcaataacaatacttttcataactttttgcaccagctatgtatcatttctagattcaagaaaaaaaagtcttctaatatgtgaaattaactttaaaaagacataaaaagaaaaggcatttccagggatacaaacagggcattggtgagctgtccgggcagcagccagccttaccagggaatccacagcccagggattccacccagagctcttcctgaggcatatggtgatggatattctcacccttgtcgcggtgaggagacaggatcctgactaatttcacagttcacatggccctccaggtttcccttggcactcatcatgctagggacaaatcttcccacctcagctttgacccaactgcaaatgtcactttccattcctcagttcctatctttgtcagtctagcctggcccaggcattcaccaaagctgggtattcactgggtcaaaaatgacaacctcaaattcagtccttacagataccatgtgaccatgaagtaaggggacatgtttccagaaacctctgtggaaagacactcttttccacttcacctctgctctgccagccttttccgtagaaactagctgaggctaggcgcggtggctcaggcctgtaatcccagcacttttggaggccgaggcgggcagatcacgaggtcaggagttcgagaccagcctggtcaatatggtgaaaccccgtctctaccaaaaacacaaaaattagctgggcggggtgaagcgcgcctgtagtcccagctgccctggaggctgaggcaggagaattgcttgaacccgggaggcggagtttgcagtgagccgagatcgcgccactgcactccagcctgggccacagagcaagactctgtctcaaaaaaaaaaaaaaaaagctgagtgtctctcaccaccagagggcgaagtacctctcccaccagaggtctgttgatgtcaattttaatcagcactagaaaaaaaatgaagctcccaaactggctaattttttttccaccgtaatcccaaatggcttaaccaaacatgatgatgctattcagagaacattaactcttgtaaataaatcgccaaactcatctcaattgggcagacagattttctgggacttttttttttttttttttttttgaagtcttgctctgtggcccagcctggagtacagtggtgtgattatagctcactgcagccgccaagctcctgggctcaagcaatcctcccgcttcagcctcccaaagtgctgggattacaggcatgagtcatggcaccctgccaagaagtcactttaatcaaagcaactggcactgttatatcaggccatggtaacagctgtcccatgcaactatgcattgtcctgtggtgtcattttttacagtgatttttttttacattacatttctaatgtacaacctctccatgatttgtcttttaaatgtttgttaagtactatcttatgtgccaggcactgttataggtgctgtggatattgtgctaaataaaataaacaaaatttcctgccctcatggggcttatacttctgggtaagatctaccctttattgagcacttaccattggccaagcactttctttgcactatcttattattctcgcagcatttttggggaagtttttcaaatctacagaaagttaaaagatacaccattaacactcatataccctttgcttagacttgtcagctactaaaactatattttatctttctctctgtgtatatatacacatatatgtacatatatgtgtatatatacatatacatatatacacatatgtacatatatgtgtatatatacatatacatatatacacacgtgtatatatacatatacatatatacacacgtgtgtatatacatatacatatatacacacgtgtgtatatacatatacatatgtacacacgtgtgtatatatacatatgtacacacgtgtgtatatatacatatgtacacacgtgtgtatatatacatatgtacacacgtgtgtatatatacatatgtacacacgtgtgtatatatacatatgtacacacgtgtgtatatatacatatgtacacacgtgtgtatatatacatatacacacgtgtgtatatatacatatacacacgtgtgtatatatacatatacacacgtgtgtatatatacatatacacacgtgtgtatatatacatatatacacgtgtgcctatatacatatatacatgtgtgcctatatacatatatacatatatgtgtatatatacatatatacatatgtgtatatatacatacacatatatacatatacgtacatatgtgtatatatacatatacatacatatatatgtgtatatatacatatatacacatacatatatgtatatatacatatatgtatatatacagctctttccatatatgtatctctctctatacttcatttatacgtagagagggtttgtgttagttttgctaaacatttttttttttttagacagggtctcgctctgttgcccaggctggagtgcagtggcacgatcatagctcactgtagccttgggctcctgggctcaagggatcctcccatctcagcctctcaaagtgttgggattacagatgtgagccactgcacccatcctgctaagccattttttgctaaaccatttgaaagtaaattgtagatattatgacacttcacctgcatattttagaatgtatctcctaagatcaaggacatgctcctaaaaactatgataccatcacacccaagaaatttaatattgatacaatttatctttttttaaatttatttatttaagacagggtttcactctttttgcccaggctggagtgcaatggcacaatctcagctcaccacaacctctgcctcctgggttcaagctattgttctacctcagcctcccaagtagctgggattacaggcatgcgccaccacacctggctaattttgtattttcagtagagatggggtttctccatgttggtcaggctggtctcaaactcctgacctcaggtgatccgcctgctttggcctcccaaagtgctgggattacaggcatgaaccaccatgcccaggctttttttcttttttgacatggagtcttgctttgtagcccaggctggaacacagtggtgtgatctcggcttaccacaacctctgcctcccaggttcaagcgattctcttgcctcagcctcacgagtagctgagattacaggcacccaccaccacacccagctgacttttgtatttttagtagagatggggtttcaccatgttggccaggctggtctcgaactcctgacctcaagtgatctgcccaccttggcctctcaaactgctgggattacaggcatgagccaccatgcctggccattatttatcttataatccatattcaaatatctgcaattaccccccaaatgtcccttacagtctcttccccccagtccagagttcagtaaaggatcatgcatacatttgaaagctatgtcttgtcactgtcttttaatctagaagagtccctcatctcttttgtcctttcgggatattgacagttttggggtccgggccagttgtactgaataccctgacatctggatctgctttattgttttctcatgatttggttaggattaagcttttatggctagaatattaaacaggtgatggtgtgtctttcccattgcttcatatcagaaagaaataatgtaaatgtgtcccattattgatgatgctaagtttgatctgttggatcaaacttaatatgtcttcattggaaacatacattttggggttaataagtaatctgtggccttcaagactacgagactgtcttgttctccacccacctttcacccagtaatgtttgtgtttgtttgttttgagatgaagtctcgctctgttgcccaggctggagtgcagtggcgcaatctcggctcactgcaaccttctgttcttcttctcttgcctcagcctccctcccgagtagctgggactacaggcacgagccacttcacattgcaagttttgcttttttttttttttttttttttagtagagatggggtttcaccattttggccaggctggtctggaactcccaacctcaggtgatccacccgccttggcttccgaaagtactgggattacaggcgtgagccaccgcgcccagcccccacccagtagttttttttgttttgttttgggttttttttgtatttttagtagagacggggtttcaccatgttagccaggatggtctcgatctcctgacctcgtgatccacccaccttggcctcccaaagtgctaggattacaggtgtgagccaccacacctggccaacccagtagtttttatcatcccttgatgatccctccctggattatcatgctggtggttgcaaaattgtaactttctaattctaccattgcttcctcttttattaggtaatattcccccccaaaaggagctcccgccctttttctggggtatcactatggactcataaacttttttttattttatgtgttataatccattactatggttattctattttcccttggttttattagggtatcatttacataaaatgaaatgcatagatattaggtaatatgtaatctgatgaattttgacatatgtatatacttgtgtaaccaacacctgaatttaaccaatactcccaatggatatagaaatttccattactccagaaagttctcatgcacttgttacttactaactccaaaggagaaaaatgtacctctccactgttctaattttatcatcatagattaattttgactgttccataacttcctataaatggaaccatctaatatatagtcttttgtgtttagcttttttcactaaggatgatgttttctagattcatccatgttgatctgcatgtcagtggttcattcctttttactgctgggaagtgtaccgtctcaggaaatgatagtccagggccgggtgcagtgcctcacacctagaattccagcactttggaaagctgaggtacaagaatcgcttgaaaccaggagtctctacaaaaaattttaaaatgagctgggcttggtggcacacacttgtagttctagctacttgggaggctgaggtgagaggactgcttgagcccaggagttggggtctgtagtgagctatgatcccaccactgcactccaacctgggtgacagtgtgagaccctgtctctgaaaaaataaaaaagaagatgataccctaagataaaggcttcagaagcagctctctctgaccgtctcctgcccttctgtctctggcctcttattctcccctgaggctagtcatagaaactagaatccctcttccccaaggcagggtttagaaaccagaaactggcagggcgcagtggctcactcctgtaatcccagcactttgggaggtcgatgcaggcggatcacctgaggttaggagttcgagaccagcctggccaacatggtgaaaccccatctctactaaaaatacaaaattagccaggtgtggtggtacatgcctgtaatcccagatactctggagactgaggcaggagaatcgcttgaatgtgggaggcggaggttgcagtgagccaagattgtgacactgcactccagcctgggcactagagcaaaactccatctcaaaaaaaaaaaaaaaaaaaaaaagaaaccagaaaccttcctccttccccttgccagcggtgaaaccaaacctaaaaatattactctaactccctccccctaaaccaccacacctttctgtgcataaactggccatcaagaaattatccaacctacctggtttgactgtaggtcataagacccccattccagagagggtcctgctgcacacccggaaggaaggacaagaacaaaactctgtctcaaaaaaaaagaaaaaaaattctgtgtgtgtgtatttctcattctttttgatgctcaaattgtcccaaatttgaccattggtagtcctctcaaattaattcctgtgtcatctttgggacaatcttaattttaaatgggccctgtgggacttaaacttgtccaacactatgatcggttctgagttcagaaaatagtctctctaaatttttgttccaatctccacagatgtagattcttacctcattcccaaagctagtcactccttaatctacaacagccattcttcagcaacactgaagactcttatgacataaagttgaaacttctttccccaaatgatgcatgcatccgacacacaggcagacacacacgtgcatgcgcagacacacaggcagacacacacgtgtgcgtgcggacacacaggcagacacacgtgcatgcacacacacacacattttgccagtggttcttggattgtttacagtgatctctaaatcactgaacgcctactatgtattagagattgtgctagatgcaaagaaatgcaaagggaagaaaataagaaaattaacatttaaaaaagacctaggccccatgtggtggctcacacgtgaaatcccagcattttgggaggccaaggcaggagggtcacatgagcccaggagttggacacaagcctgggcaacatagtgagacctcatctttacaaatatatatatattttttaattagcctggcatggtggtgcatgcctgtggtcccagctagttgggaggctgaggtgggagaactgcttgagccctgggggccaaggctgcagtgagcagagattgcacagtccagcctgggcaacagaacgagaccccgtctcaaaaagaaaaagaaaatacctaccatgtatgttccggacattgtactaagtgtttgatacatgtcatcttaacaaagatgcataaaatagagatttcataaactaacaaattatcacagcacactagaatacatactattgtaaataaaggcatgtagtcactgaattacattcattcaccagatatttcttgaaaacttcctatgtacaagctctgccccaggcgtgggggatacatctgtgaataagacaaatgcagcctgtgccttctagggctcaagtctagtggaggaaggcagacacataagcaattaccatcagagctccaacccacacaaacatttttaaaaacatattattgtagagacaggttctcactatgttgcccaggcttgtctcaaactcctggcctccagcaatcccctcacctctgcctttcaaaacattgggattgcaggcgtgagccactgcatctaacccaaaaatatgtttcaaaaagaaaaacaaaatctaaaacccactgcctctgaatctgtactatattctttggaagctcctcacaggtgacaaattagcattgtcttatatacaacccaaagccctctgagcagagcttgatgaataagtggataattaatatcttttttttttttgagacagaatctcactctgtcgccaggctggagtgcagtggcatgatctcagctcgctgcaacctccaactccctggttcaagcgattctcctgcctcagcttcccgagtagctgggattacaggcgtgtgccaccatgccatgcccagctaatttttgtatttttggtagagacagggtttcaccatgttggtcaggatcacaagctcctgaccttgtgatccgcaggtgcagatagaaaagaaatcccagattgagtgttgtgctgtaatcctagaaaacaatcgatcaaatcagaacagactccatgaataaaaagaagagattccaaccagaaattaatgtcagaaatttgaaaagggaatatcatttcagattcttcagcaccaaaagatcataagaagacatgatgaataactttatgcctatgtatttgaaaatttaagtggaacagaaatatttctagaaaaaagtcttacctaaatggacacaaaacataatagaaaattggaatcatcctataactattaaagacatttcatctctaatttaaaaggttcccacaaagaaaactccaatccctaatgcctttgaaatctaccacacttttaaggaagaaataatgccaacatcacataatttcttccaaaggccaggaaaaaaggtcaccaaccgacatgaaagcaacataacattgacaccaacataggagataaggtgcaaaaatatctctaatttcatttcattcagttcaaaccgtgatacagtttgcctgtgtccccacccgaatctcattttgaattgtagttcccataatccccacatgttgtgggagggaccgggtgggaggtaattgaatcatgcgggcagttacccccatgctattctgatcatgagttagttctcacaaaatctgatgattttagaaggggcttttccccccattcgcgcttcacttcttgctgctgccaggtgaagaagaccttgtttgcttccccttccaccatgatcataagtttcctgaggcttccccagctatgcggaactgtgagtcaattaaacctctttcctttatcaattacccagttttgagtatgtctttattggcagcgtgagattggattaatacaaactgctttcattaataaaattgcatcaatttgttgcagcaatgttgggaacatctagtacccttgttctcagtcttgagcttgcattagaatcacctggaggggttggctttgttaaaccagattgggggcccatctgtggtcagggatggggcccaagagttttaaatacaacaagatccttggtaatgctgttgcctctgcaccagggaccacttttgacaatcactgacccagtggcacatactattttgaaatcttgcttgccatagaagtaatgttatttggaatgcttggacaggctcagtatgttggaacaacttctaatttaattctctaaggatgtaaaaaaaaaaatcttggttagattggccaacattgatatgattggccaatttcaatatgctaaagtaaatgatgtggtcagctgtaatccctgaaaatttgttttcaagaagttgattatcactgtttttcccccaacatatatatgaattttagcaggatccctttgttttcctaagatttacagcatataaaagagtattccaaatagcattgctttcagattcttctaacaattttataataactgtattatattttcattcatatttgctactctcatacaatgtctttatatttgtctggactaatctgtattggccaaagttacaattgtcaattctctgaatgcttttaatccagttttgtgagagaagattaaccaaacaagaagaccctccttaaaatgttcttaccactcatgtaagatataagctaagtgttgtgcaactttcaatttgactttctctggttggattacaaaatctatacgagattgtaacagcataataagcattgtttccaacattccgcaacagtatagattcaaggagaaactctattattgctaaggtatgtttttatggcttgctacaccataaaaactatacacaccaaaatacatgccagagaataaatgtttttttcaggaaccatgtgagcaatttttttcttttggcacataatatgcaacccaatacaatgataataaggctttctcactgacagtcacaacatgaatcataaaatttgcctatcacattatatatgtttttctttctttggaaatattcgagagactgactaattcaacatgtcatgtttccaagcatcttttaagttttgatggttttaagttctcatttgcaagaacatcattataatgcattggtgtacatgtcattttgttggttttacacatttcataaaataatacacacatatatgtatatatatatatagagagagacagagtttcataattatcacccagactagagactgtgatctcagctcactgcaacctccgcttcccgggttcaagtgattcttctgcctcagcctccagagtagctgggattacaggcgcctgccaccacacctggctaatttttgtatttttagtagagatggggttttgccatgttgggcaggctggtctcaaactcctgatctcaggtgatctgcctgccttggcctcccaaagtgctgggattacaggtgtgagctggctgggcatggtggctcatgcctgtaatcccagcactttgggaggctgagatgggaggattgctcaaggctaagggtttgagaccagcctagtcaacatagtgagacccccatctctattaaaataaataaataaatacataaataaagcaaatcttgcatttaccctttttaacaagatgcaaatgatgtcagtctgttgattagagttgatattttctccaatatttccatttactcttcccatgtttttcaccttattattcttgttctttgtagcattaaaacagtcaacttaagagcaatttgaactagttcaattaaaatgctacaattattgcacatccaaaattttttatctgattataaactttctgaaaaactgcactgcaaattcctaaccaaaactcagttgaaagtcatggcaatattgcaaaaaaaaaaaaaaaaaaaaaaaaattccactcttcaattcacaactaactacaaactattttgatataaaattaaataatacacagctgggtgtggtggctcacgcctgtaatcccagcactttgggaggccaaggcgggtggatcacgagatcatgagttcaagaccagcctggtcaagatggtgaaaccccatctctactaaaaatacaaaaattagccaggcgtggtggcaggtgcctgtaatcccaactactaggaaggctgaggcagagaattgcttgaacccgggaggcggaggttgcagtgagccgagatcgcaacaccacactccagcctgggcaacaagagcaaaactccatctcaaaaaaaaaaaataaataaataaataaatactatactattctgccattataacttgatggtcatattgacactcatgtaccagaaaatcaaatgagatgacaattcaccaaataaactgcttttagccaacgtgcacatttttcacatcccctcctctgtctctcccacaatgtaatgcaattagccttgtgcgattagtaatgtgctcctgtcctcagttcttgtcaagaatccacacaaggcactctaatattttcgaatccattctatttcattatttaaaaagttagtgggacacattaaatttatttcttgacccactaaagggtcatgagcaaagtctcaaaaacactactgtaagacactaaactattaactattgcaagggagtttgtaaaaaatacaataaacagaatagcttacctctctgcatgcagaatgttttctttgctaactttatttttcaaggctggatttataccacactgggcttgcaaacttgctgcttcatgggttggtggggaggggtaggagaggggtgtgtggggtatatatgttttcttttttattttatggtctttttaaaaaattgagatataattcatacaccataaaattcacactattaaagtacaattcagtggtttttagtatattcccaatattgtgtaactatcatcactatctaattccagaacatattaatcacccatcaaaaaaatccatacccatgaagagtaactccccattttccctgcccctggtccctgccaaccactaatttacttcctgtctccatagattaatctattctagatattttatataaaaggaatcacacagtatgtggccttttatgtctggcttcttccacttagcatatatttttaaaggtttatccacgttgcagcatttatcagtaggtcattccatttagtggtcaagtaatatgccattgtatgaatattccacattttaatcatttgtaagttgatgaatgctaggattgtttccacttttagctattatgaataatgctgttacaaactgacgtacaaacttttgtgtagacgtaattcattttagttttctcttgggtgagtggaattgctgggtcacatggtaacttaatctttaattttaattaatttatttataggctgaagtgcagtggcgtgaccttggctcactgcaacctccaccccccagattcaagcaattcttctgcctcagcctcccgagtagctgcaattacaggcgtgcgccaccatgcctggctaattttttgtatttttagtagagacggggtttcgccatgttggccaggctgggcaatgtttaatttttgataagccaataaagtgttttccaaaccagctaccccgttttatatccccgctagcaatggatgaaaattccagggctgggcgcggtggctcacgcctgtaatccagcactttgggaggctgaggcgggcagatcatttgagcgcagtagttcgagaccagcctgggcaacgtggcaaaaccctgtctctacaaaaaataaaaaattagccaggcgtggtggcatgcgcctgtggtcccagctacttgggaggctgaggtaggagtatcacttgagccccagaagtcgaggcttcagtgagctttgattgcggcactgcactccagcccgggcaacagagtgagaacctgtctcaaaaaataataaataaataaataaataaaaattttaaaaacaaaattccaaattctccacatcctcactaacatctcccacctcagcctccctaaaagctgtgactacaagtgcgagccaccatgctcagctaatttttttatttttggtagagacagggtttcgccatgttacccaggtcttaaactcctggactcaaactatccacccactttggcctcccaaagtgctgggattacaggcttaagccactgttcctggccttttttttttaaataaatgatttttaaaaatttttatattgacaaggctgggcgtggtggctcacgcctgtaatcccagcactttgggaggctgaggcaggcagatcacgaggtcaagagatcgagaccatcctggccaacatggtgaaaccccggctctactaaaaatacaaaacttagctgggcgtggtggcacatgcttgcaatcccagctactcgggaggctgaggcaggagaagcacttgaaccagggagtcggaggttgcaatgagccgggatcgcgccactgtactccagcctggcgacagagacttcgtctcaaaaaacaaacaaacaaacaaaaaaattacattgacaaataaaattagtatatatttatcaagtacatgttgttttgaaatatatatacattgtggaatggctaaattgaggtaattagcatatgtgattaactttagactttaaggatatgtactcgtcataatggtctctattagccaggaacctgacaggaaacagatggctcattcaaattagaaaaattagtggaaggtttaataaagagactacttacaaaggtgtggacagagtgttagagaaccgcaagggaaaatacagtaatcctatacagccaatcctatccctagcctgaagggaataagagaatggttactgtattagtcagaattacaaaacagaactaatggaatatgtttgtgtaaggagggcgaggtggcttacacctgtaatcccagcactttgggaggcggaggtgggtggatcacctgatgtcagaagttggaggccagcctgactaacatggtgaaacctcgtctctactaaatacaaaaaattagtcaggcatggtggcaggtgtctgttatcccagctacttgggaggctgaggcaggagaatcacttgaacccgggaggcagaggttgcagtgagccgagatggtgccactgcattccagcttgggcaacaagagtgaaactccatctcaaaaaaaaaaaaaaaaaaaagaatatgtgtgtgtatagaaagaggtttatcataaggaattggctcacacagttgcagagattggcaagtccaaatgtgcagtgtgggctggcaggtttgaaacccaggaaagccagtggtatagatgaagtcccagagcgggctgctggagaattccctctcatgtaagggagaggccgtctcttcattctcttcaggctccagctgattgaatgaggcccatccacattatgaagggtaatcttcaccaattaaaatgttcatctcatccaaaaacacccttgcagaaatactcagaataatgtttgaccaaatatcggagtacccagtggtccagccaggttgacacataaaattaaccaccacctgaaaataaaaagttgtgtagagatgggcaccttgggataaaatgatactttttttttattattgtactttaagttctagggtacacgtgcacaacgggcaggtttgttacatatgtatacgtgtgccatgttggtttgctgcacccattaactcatcatttacattaggtatttatcttaatgctatccctcccctatccccccaccccaccacaggccccggtgtgtgatgttccccgccctgtgtccaagtgttctcattgttcaattcccacctatgagtgagaacatgcagtgtttggttttctgtccttgcgataatttgctcagaatgatggtttccagcttcatccatgtccctacaaaggacatgaactcatcaaaaggatattctttttatatacatatatatagagataggatctcactatgttgcccaggctggtcttgaactcctgggctcaagcaatcctcccatctctgcctcccagagtgctgggattacaggtgtgagtcaccatgcccagtcagaaatgataccttttgattgagagatgtagccagcctgaagcaaatcctgcaagaagggagccagagggataaacgcccttgaactcactccactccctttcaccagtctcctgtctgggctccccactggatgaacccaactggaagccaggaagaatgagcccattaattgtagctcataccagaccacgagaacagaggataatgaatttcttggggcaaagaatagggtgaaaaagggtgaaaagcacatccacagggggaaatggaagatatcctacacacaagattatgccacagtaataagcaattccagcggactcaaagaaagtagaaggaaggaaataagatcaaagcagaaattagcacaacagacaaacatacacttgacagcaacaagtcagtcccaagtttgttcttcaaaaaagagaaatacaataagaaatatctggcaagactaatcaagaaaaagagaaggcatagataattaataataaaaaacaggccaggcatgatggctcacacctgtaatcccagcacttttggaggctaagtcaggaggatcatttggatgccaggagtttgagaccactctgggcaacatggcaaaaccctgcctccacacaaaaaatttttttaattagccaggtgtgatggtgcatacctggagttccagctacttggaaggctaaggcaggaggattgcttgagtgtgggaggtcaaggctgcggtgagtcgtgatcacaccactgcactccagcctgggcaacagagcgagatcttttctcaaaaaaaaaagaacaaaacagataggacaacttcatgccaatgaattcatagaaaagtacaactttctaagttagggaagagcagggtttaggaaaggactttctttcgtctctctgatctggcctggaatccggggtgttgactaatgatcaagggtatccctgggtgtggggatgagctggccttggccacaaagaagcctgaataatgaagtggactgtggttctaagagtagtcatagctaatagtagctgttagctagtagatgatgtaatttccttccattatgcctcagttttcagtcaagacttcttcaaagttatagcagttctcgtctaggttatggggaattatgtgtaggcctgagtctctatttgaggcaaagtaatagaagagagggcaggaggtatatccctgcctatcaaggtagccagaggtttgccatggtactgaagaaaatgatcagcagctgaattagccaaggttcatgggcaaagatgaggctggcagataaagccagacaaattcctggttaaaagtcacctcctgagctatttagagaaacagttgattcagggctgggataggaacgggatcagctgagcttggaacatcttgtaataccagaaagcaggacactatcaaagactattggggttgtgttaacaggactcagggctaacttgaagagaggcttccactggccagaaatgggacaatttgagctttgataagaaaaataatttcaatgaactgaaaaccatcaaatgagtttaaatccaagagttcacaatacttgaaaaacaaaacttcattgtcacaattggaagatgctaggaaaatgatgcattattctggaaaataaaaaataaaagttaagaatcaaatatttatcctggctttcctgaatgaactgtgccccaaggaacccaaatagttgacgagaggaagtctttctttagagaagtagtctagccttggctgggcatggtggctcacacctgtaatcccagcactttgggaggccaaggtaggtgtatcacctgaggtcaggaggtcgagaccagcctgactaacatggtgaaaccttgtctttactaaaaatacaaaattagctgggtgtggtggcgcatgcctgtaatcccagctacttaggaggctgaggcaggagaattgcttgaacccgggaggcagaggttgcggtgagccgagatcaagccattgcactccagcctgggcaacaagagcaaaacttcatctcaaaaaaaaaaaaaaaaaaaaaaaaaaagagaagtagtctagactaattaaaatctcactattttgaaacccctgttgaaataatggatccaagcaatgaccaacaaatggctgttagtaacaggcaaggagacatcatgtgtctcttgaccaaaagaaacaacagtgcttattcttgaaaaataaaaacaccagcctagacaacatagcgagaccccatctaaacaaaaaatttaaaaattagccaggtgtggtggtgtgggcctgtagtcccagctattcgggaggctgaggcgggagaatcacttgtgcccgtgaggctgcagtgaactgtgatcaccccactgggtgacagggtgagacgctgtctcaaaatacataaatacacaaataaaaataaaaacaaaagtaaaaatccaaatctgatgatgtctctagatcttaatatcaactttaaaaaacagttatataataaatacctcagagatgcaattaacaaaatccataatatggaaacctacaggacatacaactgttgtcttcaacaaacaaactgcaatgaaaatagaggaggagtgggaaaggagggagggagggagagggaaagaattcctgtaaattaaaagacatttcagagatatatcatctaatttcaaatatataaatcaaccctatgtgggtcctgatgcaaacaaactataatacaaagttatgaaacaaaacattttgaacattggagaggatatcaaggaataatgatttatttttataggcatgctttggggatgcattctgaaatacttttaggaataaaatgtttggaatcctaaataatctagtgtggatataaatgaaataaggttggccatgaattcatcatctttgaagctagtttgttgaaattgggtgatgagcacacaaaggatggatgtcctgttcgctccatttttgtttatttaaaattttacttagccaggcatggtggcatgcacctgtggtcccagcttcttgggacgctggggtgggatgaccgcttgagcctgggaggtggaggcttcagtgagctcagatcatgccactgcattccagccagggcatgagtgagatcctgtctccaaataaataagaaaataaataaaaataaaataaaataaaataaaataaaaataaaaaaataaaaaataaataaaataaaataaataaaaaataaaataaaaaaataaataataaaaataaaaaaataaacaaaataaaataaaatagtacatcctggccaggcacggtggctcatgcctcctagcactttgggaggccaaggcaggcagactgcttgagctcaggagtttgagaccaccctgagcaacgtggcaaaatcccatctcaacaaaaaatacaaaattaggaaaattagccaggcatggtggcatgctccagttgtcccagctactcgggaggctaaggtgggaagattgcttgagcccagaaggtcagggattgcaaggcttgcagggcttgcagtgagccgtgattgcgccactgcactccaggctgggcaacagggtgagaccctgtctcaaaaaaaaaaaaaacaactttgtggccagggacagtggctcatgcctgtaattccagtactttgggaggctgagatgggaggattgcttgagcccaggaattcgagaccaccctgggcaacaaagcaagatcccatctctaatgtttataaaaatgtaaaaagaaaaaattaaagttacaagaaaataaaattttaaaaagcaataaaattttacataattaaaagctcacgtcctcagggaggctttttccacccaccctatctaaagcagcttatctttccccattattttctagcacagccccgtgttttcttcatggaactgatcacaatgttactttatctatttactaggttatttctttctgctagaaatttagtttcacaagaataaaaactgtttgccttgtttgctgctgaacctctggggctgcggctggcacacaaaggtgcctgcccagccccatggctcacgcctgaaatcccagttaatcaggaggctgaggcaggggattgtttgagcccaggagtttgagatcagcctgggcaacatagggagacaccgtctctgcaaaaaaatttttaaaaatcaggcaaattatagtggtgtgtgcctgtggtcccagctactccagaggctgagatgggaggatcacttgagcctgggaggtcgaggctgcagtgagtcgtgatcatgccactacattccaacctgggtgacagagggagaccctgtctcaaaagaaaaaaggtgcttaataaatcttcgttgcttggaaggacaggtggatagataggtcaactaaagagtaagaagcagccggggcatggtggctcacgcccataatcccagcactttgggaggccgaggcgggtggatcacctgacgtcaggagttcgagaccagcctaggcaacatggtgaaacctcatctctactaaaaatacaaaaaataaaaataaaaataaaaaaattagccagatgcggtgtagccagatgcacgcctatagtcccagttactcaggaggctgaagctggagaattgcttgaacctgggaggcagaggttgtagtgagccgagatcacaccactgcactccagcctgggtgactgagtgagactctgtctcaaaaaaaaaaaaaaaaaaaaaaaagtaagaagcacatgttggagcaagaactaacaaagaaatacatttatgacaacactttccacaaagacaccagaaaaggaagggagattcaactatcgacccctaggatctttggagccagctaaccgcatttagccgtctctccagctgcatgagaaaattaactagagtcacaattgcccgtagccaccaatcctttctttgaatgaaatctcatgagacagcccaatatgtaaaacatgataaccaaaatatgatagccaaaagcaatttattatagtttagcctcaaaaaaataaaaataaaaaaattatccagtggttatgaggagtctaggaaaacctgtcccagtaatgccaacttggaggtgaagggctgactggggcagctgagaagtgggaccttctgtttggcaggcttcctctcccttgcctggtcatggttttctggtgagaagagtgttcctggccttgctggaggttcccatggccccgaactaacagtgtttttctgaaatttcgacctgctccgtttgagagagtagaattccctcatcaagtcctccacctcccactgctcttccttcagcctctggcagcagtgcagggcggcagggtcgatggggtgagcttctgtgttgaagatgtaccccccagcccccaggatgcactccccatagggggtgatcaccgcgtcgaaggtggacccattgttgtggatgaagttggttgggtcaaacaggaggtagaggtatttcacagtctcggccaggaagaacgactccatgcggttgtccagcttgtggtctcgcagatctttgatctgacatgtgggagaaggaagcaagctggaacaccatcacaatttagtagtaagggtcaggcaatcccttaagaaggcctgttctgccacaaagcagctgagggcctgtgagcaaatcactgaacttttcagaacttcactctttcccaagccaccatcatctctcacctggattatcacataagcttccaaatgggctcccagcttccaatcttagccctgcagtttatatacacacactattttaaaaaatagggacagggtctcacaccatgttgcccaggctggtctcaaatccctgggctcaagcaattcctcctaccttggcctcccaaagtgccaggataacaggcgtgagacacacaccaagctcctacagtatctgtataacataagtcttcctgtcaattctctactcacaactttctgtgagccctccatttcatgcaggataaaaatgcaagtcatgacctggcccctgctcccttcctgccctcacctcttaccactctaagagctccagctgctgcctttctgtcctgagctagcacagcaccctcctgcttcgggctctttgcatctgtggttctttcagcctggagcactccgcctccagtttttctcatagcttgttccctcccttccttcaggtctctgctcaaatgcttcctcaccagaaaggtctccgctaaccttgctctatgacatgacaatctcctatcccctttatcccaactttttgtgactataaacatagagctaatcgtcccttttaatgatggcagagtattccatcgtgaaaatggatcaccatttacttggctaatcctccttggaagggcattcagatgattaccaagtttttttttttttagagatggagtttcactctgttgcccaggctggagtgcaatggcatggtctcggctcactgcaacctctgcctcccgggttcaagcaattctcctgcctcagcctccagagtagctgggactacaggcacatgccaccacacccaggtaattttttttgtatttttagtagagacagggtttcaccatgttggtcaggctggtcttgaactcctgacctcgtgatccgcctgccttggcctcccaaagtgccgggattacaagcctgagccactgcgcttggccaattaccaagtttttgtaagcaactaataaggggtctttttttctccactcagacccaaagtatcgacacttactaggttcaactgctgttgatgaaaactattgacattgttttagtaaggagtcttatttagagaatttcaactgagttttcaggcatggatgactaagattacttgctacaaacatttattttagcttctcagaattagtaatacttctaaacaaaacattctcagtggactctatcttacatttaaaaatatgactcaaatatggtcttgatgtatcaagatgattatttccttgccctgtttgagaaaggtcagacccctgttcccatcattcaccatggaagacctccaaagggcttcatgttcatggaaatgagcccagcattcctaggaaggccccagtgggcttatcattttggtttttcacacaatacagcatattagaaaccaaatcatatcaggggtttattttttcccttccacatgtaggtcttctctcttcccctacacatatctatattttacttatagaatataatcacattacaaacttttgcaaaataagtgttttgttgttgttttgaattccataccccaacactgtaggcttttcaggggattttcttccagactattttcttctactttcatatttatatcttgcctgcttggttcctgcatggatgtgagatggctctcacctttgaccctttcaatctattcttcacaaagcagccaaagcgatctttctaaaatacaaatcagatcatgtcactgctctgctgtaaatcctaccaagggttcacattccaagtagaaaaaaaaacccaaactctttcctgtggcttacacaaaaccctacatgatctagcccctgcctacctctgggaccttatctcttcccacttttctccttgcttgctccgctccagccacactggccttctgtctaccagatacacattcatggtttttttctcattaaaatgtaagctccatgagagcaaggccactgctgtaacccttgggcctagcagagtgcctggcatgtgaaagacattcaagaaatatctgtgagactaagcaggactgctttgttaaggagtcccaggtttgaatatagggctatgggactctggattccccttaaaatctattttagtgtctcacaaaacttttcgctaaactcaccttttcaaagtcacctattcaaacagatcaaagatctccactgtgggaggaatgccaagggccggggtcaagatcccaaggaactaattctagctctacctctactagctgtgagatctttagcaaggcacttagcttctctgttctttggtctccccatctgtaaaatatgagcattatgtatatctccaaggtcccttctagtgctgatatgtcagaactcccaaagctctacccttaaagaggctttttagcagcaaggggagactcttcccagttcttggggccatgcaaacacttactgttgcaaatccgcactccaccttgctgattttttcaatggattccacagcatctcttccgagttctaggagggtgggatcccccgtggcacggtagaggtacattgcgctttcaataagttctgcaaagtccaaagcagaccctcctcactcagtggctgcacagagatggcctggggcctcttagggccgtgagggactactcccctccatatcttgtccataaggccccaactagcaggaacacaggatacctcacccagtgctgagtttcagagccagtatacccaaagcttgaagctcagtggagaccagcattaaggctgaccagtgacttccaccacaagggagagaaaggtggccaggttctggcatagagaaggtggcggaggttgttgcctaattcccaatatctgttccccgcttcctccttagtagcaggattcctaactttagctaagcacaggctgcctggctgccaacactaactattctaacagctaggtgggattaaggacaccatggcgagccatataagcccagaacatgagagagaaatacatttctatcctaattaagctactattttttttcctgtcactcagagtctaacctaattctaaaactcaaaagaagagtaagagcttggcatcataaggctcgttctaagataggatggaccaaaagaaaaggctgagatatccaagagcaggccaggcatggtgggtggctcatgcctgtaatcccagcactttgggaggccaaggtgagaggatcgtttgaacccaggagtttgagaccagcctgggcaacatggcgagatcttgtctctacaaaaattaaaaatgattagctgggtgtggcatgcacctgtagtcctagctactcaggaggctgaggtaggaggatcacttgagcccaggagtttgaggctgcagtgagccatgattaagccactgcggcactccagcctggatgacaagagtgagaccttatctcaaaaaataaaaattaaaaaaataaaataaaataaaccaccaaaccgtcaatctaacaaagacgtagtcatcagttcactgtggccagaaaaagtgatgttttgtcttgcccaattctatgccacaactggaacttgatgttaagacatgagctctaccttaagatgaatattagccaacaggagtgggtccagatgagaatatttattctagagataaggaaatccaaaaaaaatgtgtttattgctttcaaatacctgaagaactgttgtagagttgacttcaagggtggcctcagctcagtatgtttttctacttcatccatcttttctaagagacagaagaacccctgtctcctttctataccatcatctccccctgaccttctcctgtcctgtttcctcctgggcttgatcagtgcttctgtcccttttggcttattgctgcaaactctggttcttattttattccgttaattacttttttgtgacagagtctcactctgtcacccaggctggagtgccatggtgcgatctccgctcactgcaactctgcctcctgggttcaagggattctcatgcctcaacctcccaagtagctggaattacaggcatgcgccaccagccctgactaatttttgtatttttagtggagacagggtttcgccatgttggccaggctggtctcaaactcctgacctcaagtcatccgccagtcttggcttcctgaagtgttgagataacaggcgtgagtcactgcacccagcctctagttcttattttagagaaaaggtctctgcctatctccccagttctctcttacttcctcctcccctctcctcacaggcctctagacaattgctaatctaattgctcatattctaaggcacagactagggtacattcattactagatgaacacattctgtgtgttcaaaggcagaaaagacagtgccctcatgggaggcctcctcttctgcttcttttttcggcttcttcttttttttttttttttttttttgagagggagttttgctgtgttacccaggctagagtgcaatggcatgatcttggctcactgcaacctctgcctcccaggttcaagcaattctcctgtctcagcctcctgagtagctgggactacaggcacatgccaccgtgcccggctaatttttgtatttttagtagagacagggtttcgccatattggtcaggctggtctcgaactcctgacctcagttgatccaccgccttggcctcccaaagtgctgggattacaggcgtgagccaccacacccagccctcttctgcttctagcagctggtgggccagtgccctcatgaccagccatcacgcttctctcctcacatgtgggcctcctaagcatgttagttattgctttactttcctgtgcatctgaccaactctgtcgagcagtggtccccaaccgttttggcaccagggaccagtttcatggaagacaatttttccatgaactgggcttgtaggagatggttttgggataattcatgtgcattacatttattgtgcactttatttatattattattacattgtaatatataatgaaataattatacaatccaccataatgtagagtcagtgggagccctgagtttgttttcctgcaactagacagccctatctggggttgatggatgacagtgacagatcatcaggcatcagcttctcctaaggagcacacaacctagatccctcacatatgcagttcacaatagggtttgtgctcctatgaacgtctaatgccaccacggataagacaagaggcggagctcaggcagcaatgtgagcgatgaggagcagctataaatatagatgaagctttgcttgctcacacgcagctcacctcctgctgtgtggcctggtttctaacaggccatggacttgtaccggtccacggcctgggggttggggaatccctgctctagaggaaggagacagcccaaagttcagatttggacttagaggaaggtaaaagcctgcagaggcctttaggctaggctctgtgctccaacactgctgatcagagagacatatacgaaagtacagggctctggccaatttagtgaaagagtagtccttatctcctatttgccattgttttggggtaggagggatgactggattaacgcactcctggattcctgacagcggtgccttatgttttttttttttggagacagggtctcactccattgcccaggctggattgcagtggcgccatcatggctcactgcagctacgaccacctgggctcaagtgatcctcccaggtagctgggatgggactacaggcatgcaacaccactcttggctaatttatttatatttcttatagagacaaggtcttgctatgttgcccaggctgatcttgaacccctgggcttaaatgatcctcctgcctcaggcttccagagtgctgggattacaggcataagccactgcatctggccagtagtgtcttactttccatgaatgccttcctgccagcctgtcccaaatggaacaggttgcctctgttaagtagcaagctccttgtcactcgtggtaactaagcaaaaactagataaccacttgacagggccatattaggaaaattccaattagaacacctctcaggttccctctaaccctaagattgtgcaagcctatgtcttacatttagttccaaaccctaatctttacctgttggtaacaccagatacgataccttctcagagcttcttatttttaaaatttacttatttatttttttgagatggagttttgctcttttttgcccaggctggagtgcaatggcgtgatctcagctcactgcaacttctacctcccgggttcaagcgattctactgtctcagcctccccagtagctgagattacaggtgcacgccaccatgcccagctaattttgtatttttagtagagatggggtttcaccatgttggccaggctggtctcaaactcctgacttcaggtgatccacctgccttggcctcccaaagtgctgggattacaggcgtgagccaccatgcccaaccaagtttcctgttttaaaaacatgccatgagaacaaatgcatgagaaacatcaataacagtggcctctaaggagtcaaaagttgatgaatttgctctttattccctctcctggtcccctctacacctcctacgataatcacttgagttagaagaggaaggaaatggggtagaggaaggcaggataaccagaaggcctgtcccatggctaaaaggcaattcaggtgggaaagtgggaagtgtctaagacaatgggctcatagcctgttttggggtgggggatgactatgtgtgctgactaagcttccttcctttgtccctctttttctttccctcctcacaattttcagcttccctgaagtgaatcaaatgacattagggctagaaaggaacctatgagagtgtctcaaatatagtcctttgcttgattctgagctgcaaatggggaggtggaagagactaggtaattcctaaggtccgccccaaagttctaacattccatacacgtaagcataatttatctgacccatggacttaggaagcttgcctacacttctgaaatcctgatggcaggagctcaaaaggagtcaaccttggccttttccttctcactcatttcctgatttgaaagagcatatggggccagtcgcagtggctcacatctgtaatcccagcactttgggaggccaaggtgggcggatcacctgaggctgggagttcaagaccagcctgaccaacatggagaaactccatctctactaaaaatacaaaattagctgggcatggtggctcatgcctgtaatcccagctactcgggaggctgaggcaggagaatcgcttgaacccaggaggcggaggttgcggtgagccgagatcacaccattgcacttcagtctgggcaacaatagcgaaactccatctcaaaaaaataaaaataaaaaagagcatgcaatttagttaggagccctgggttccaggcctagctcctgcacttaagagccagaggcgagccatttcatcccactaggcctcagtttccatatctgaaaacatggggataattaactcctagtaagaaaaccacccagagccactgaaaggaacagatggaaagaaatgaacttgtgggcagttgtggaggatggagccttgtagaggggatttggggtttcagcaaccagagcctgtgggcagatgacaagccagaaatgctgctcacctggccgaagtgggtagccctctcgcttctccactgtgtatccctgaggaatgttgtagaattccgggagccccccaaactgcttccatacagtgtagtagttgaggaaggtcctcatggcattgtcaatgtctccaatgaggctctgtgggagaaagtggctgtcaggcaggtagacaccaggcataaaaccccacagacaaccttaagaaaagacaaagtaaaatctgtggggccaaaaaggccttgaatcaatccctgagtctgccagttactcagtgtggtgctgagccaggcactggacttctctgagccccatctataaaacgtaaaatacaccacctatctcatgcattgttggaaggaacaaagattgtatattaagtccctaaatcttcagagtcaatgtcagctaacagttttggaattcggccagccagttaaaaattctaagaatagagaaaagtttgtgctaaggctcactcccacaccacacccccaaaagataaccatttttgtttttgtttttgagacagggtctcgctctgtcacctaggctggagtgcagtggcacaatcacggttcattacagccttgacctcctgggctcaagagatcctctcacctcagcctcccagtgctaatttttttattttctgtagagatgggggtctcactttgttgcccaggctggtcttaatctcctgggctcaagtgatcctcctacctcagccttccaaagtgctgggattacaaccatcacccatcttgcctggcctcagataaacattactggtttcttgtataacctttcagagtttctttatgcatgagtatatgttattttccccacactaaaaaatagcctttggttctttattaatagggatattaattatctccatatttttagatatggaaatttggctttcagatatttttatttgaattggttccaacaactaatgtggcaataaataattctgtatatatgtcacatcaaatagatgtaaaatgttatgtgtaagatacattttcagaattaggatcactgggtcaaaggatatatgcatttataattttaccactattgctaagtagccattactattaatgtaatctcacagggaagcagctgaccctgacatcttcattggatgtctcatggacagaacaaacttggcacttcctaaacaaaattcttggttcccttactttcccacgaaattgcctccctactttggcctttttcccttcttggtaaatgacacaatgtctacctggttattctggatagaaacccggtggccactttttttttttttttttgagacagggtctcactctgtcacccaggctgcaatggcatgatcatggctcactgcagccttgatcttctgggttcaagcaatccttccactgcagtctcctgagtagctgggactacaggcatgtgccaccaccctaggctaattttttatttttatttttatttatttatttttatttttttgagacggagtcttgctctgtcatccaggctggagtgcagtggcgcaatctcagctcactgcaagctccgcctcccaggttcatgccattctcctgcctcagcctcccgagtagctgggactacaggcgcccaccaccacgcccagctaattttttgtatttttagtagagatggggtttcaccgtgttagccaggatggtctcaatctcctaaccttgtgatccgcctgcctcggcctgccaaagcgctgggattataggcctgagccaccgcgcccgacctaattttttattttttgtagagatgaggtctcactatgttgcccaggtgggactactttttcttaaaacttttaaaaacgtagattataaaaacattttggtacatgcactattttggaacaccaaagtggggtagattagataagctctaagatccttccagctgcaactctaccagaccatgtaatggaaaaacaacgagatggcacagcggcacaagctgcttcctgcccttcctgaggcccactgtcaagaatgagattggacagaaacgcccagtggagaaacacctgttgccaatggccattcctgcccagactggaaatgcactgtcgactttaagtactgtaacactccatggcaaactggaagctcagttcctgacactcaatttggcagaactctaaatctatctaattcactctaggtctctcttccatcctcaacctgtccctccaaaaaaagtactcaagcaattaacaaagtacattatttgacttatacatcagaatgagcttgctttgccagactcatagaaagatgatcacattctttgatcattcctacctgaagaccaggccagtaggcctccaaggactggaagactggcatggacacagtccccttgtacatctgaacccacaggtaccagtcatcgaagcgggtgtagttccggatggctttgttatactctgcagtgggggagatgggataatggacatatgagtgattagggagaaaaaaggcaggcctggacagcggaagcgagaacttacactttggaaagagcaccaggatgcaatgaggcaaggaggctagacaagagcatggattctggagtcaaacttccagctcaaattccagctccagctctaccacttgctaaccgtgacctggggtgggtttttcccttttaagcctcagccttatgatctataaaatggggaggccaggcgtggtggctcacatctataatcccagcactttgggaggccgaggtgggcggatcacctgagattgggagttcgagaccagcctgaccaacacggagaaaccctgtctctactaaaaatacaaaattagccaggtgtggtggtgcatgcctgtaatctcagctacttgggaggctgaggaaggagaattgcttgaacccaggaggcggaggttgctgtgagctgagatcgcaccattgcactccagcctgggcaacaagagtgaaactccatctcaaaaagaaaaaagcagaaaataattgatgtggtttggctgtgtccccacctaaatctcaccttgaattgtagctcccatatttctcacgtgttgtggaagggacctggtgggagataattgaatcatgggggccgtttcccccatactgttctcatggtagtgaataagtctcacaagatctgatggttttataagaggtttcccctttcacttggctctcattctctcttgcctgcaccatgtaagatgtgcctttcgccttccgccacgattgtgaggcctccccagccatgtggaactgtgagtccattaaacctctttttctttataaattacccagtcttgagtacgtctttatcagcagtgaaaatggtctaatacagtaatgttaggtatctgtggaatttttcagtcatttatttataccacaaacattcgctaagcacctactaggttccaggctcctatgagtttgtaaacaagacaaaatccagccttcagagaacttacattctagtaggaacttgaatttatccctcatatctctcccctagattgtaaatccatgaggcctgggactttgttttgtctactgcagaatcccccacactagtacaatgagcaataaacattttctgaatgaacaaagtaccaaatatacatgcaaataaataagataatctcaaacaggagttgtaaggattatatgaaacagtccatgttcagagcttggcacaatgcttggtacatccgtggtattcaataaatatttgttgaataaatgagtaaagtagtccccccttatgtgaggagaatacgttccaagaccctcagtggatgtctgaaaccatggatagtactaaataaactctatatacagtcatgtgccatataacaacatgttggtcaacactgaactgtagagatggtggtcctataaaattataatagaggtgaaaaatcaccacagcctaaagatatcacagctgttgtaattttataatgcaatgcattacttacttgtttgtggtgatactggtgtaaacacacctactgtgctgccagtcataaaagtataacacatacaattatgtatagtacgtgatatttaataaacaaccatttacgcgtttatgtatttactatattattatcattagataactccttcctcttatataaaaaaagtcggctgggcgtggtggctcacacctgtaatcccagcactttgggagggcgaggtgggcggatcacgaggtcagtgttagaccatcctgcctaacacggtgaaaccccatctctactaaaaatacaaaaaaattagctgggtgtggtggcgggcgcctgtaatcccagctactcgggaggctgaggcaggagaatggcgtgaatccgggaggtggagtttgtagtgagcggagatcacaccactgcactccagcctgggcaacagagcaagactctgtctccaaaaaaaataaaaacaaaaacaaaaattagctgggcgtagtggtgggtgcctataatcccagctgctcaggaggctaagacaggaaaatcacaggagaattgaacctgggaggcggaggttgcagtgagccgagatggtgccactgcactccagcctgggcaacataagcaaaactctgtctaaaaaaaaaaaaaaaatgaaacagcttcaggcaggtccttcaaggaattccagaaggcattgttatcaatcatctgagataacaacagttctgtgagtgttactgcccccaaagaccttctagcaggataacatggggaagtggaagacagtgatattgatgatactgaccctaggcctaggctaatgtgtgtttgtagcttagtttttaacaaaaaagtctaaaaggtgaaaacaaaataaaaaactaaaaacagaaaaaaacttagagaataaggatataaataaaatatttctgtatagctgtacaatgtgttttaagctaagcattattacaaatgagtcaaaaagttttttaaaattttaaagttcataaagtaaaaaagttacagtaagctaacgttaatttattattggaggccaggcatggtggctcacgcctctaatcccagcactttgggaggccaaggtgggtggagatcacctgagatcaggagtttgagaccagcctggccaacatggtgaaaacccatccatctctactaaaaatacaaaaattaggccaggcacggtggctcacgcctgtaatcctagcactttgggaggccgaggcgggtggattgcctgagctcaggagttcaagaccagcccgggcaacacagtgaaaccccatctctactaaaatacaaaaaattagctgggcatggcagcgtgcacctgtaatcccagctactcgggaggctgaggaaggagaattgctagaacccgggaggcagaggttgcagcgagccgatattgcaccactgtactccagcctgggcaacagagtgagactctgtctttaaagaaaaaaaaaatcagccaggcatggtggtgggcgcctgtaatcccagctactcaggaggctgaggcaggagaatcacttgaactggggaagcagaggttgcagtaaaccaagatcatgccactgcactccagcctgggcaacagagcaagactctatctcaaaaaaaaaaaaaaaatttattactggagaaagaaaaaaaaatttaaataaatttagtatagcctaagtgtacagtatttataaagtttacaatagtgtaatgtcctagaccttgacattcactcaccactcactgactcacccagagcaacttcctgtcctgtgaacttcattcatgtgcccttttatactgtatttgtactgtactttttctatgtttatatacatacttaccattctattacaattgtctatagtattcagtagagtaacatgctgtacaggtttgtagcctaggagcaataggctacaccatatagcctaggtgtgtagttggctataccatctaggtttgcttaagtacaccctatgatgtttgcacaatgatgaaatcacctaacgatgcaattctcagactatatccctgtcattaagcaatgcgtgactactgttttcctatacatacacatctatgagaattcttaattcattaaatttttaaaaatttttatttttgagacagggtcttactctgtcacccaggctgaaatgcagtggtatgatcacggttcactgcacccttgacctcccagggtcaagcaatccttcaccttggcctcccaagtagtggggactacaggcacgcaccatcatgcccagcaaatttttttttattttttgtagagacgaggtctcaccatgttgcccaggctgatcttgaacttctggggtcaagcaattctctcgcctcagcttcccaaagcactgggattaaaggcatgagccactgtgcctagccgaaaaagtttaatttataaattaggcatgggaagagattaacaacaataactaataataaagcagaacaagtataacaatatatgttatagaagttatgtgaatttgtctttttggtaagagacaggaaaaaaagaaattatgtaaatttagtgcctcaaaatatctttgtttttttagagagggggtcttactatattgcccaggctggtctcaaactcctggcctcaaacaatcctcacttccaaaaaactgggactacaggcgtgagccactgcacccagcctcaaaatatcgtatctgactgtactcacctattttcagactgcagttgaccatggataactgaaaccatggaaatcaaaactgtggataacgggggactactgtagctataataataatagtaattaggtgctcaacaattcctcaagattgctagtgtctaagggcctggcgggtaagatgtatttattcaacaggtattaatctattacctaccacatgtaaagcactgtggggaacataagatgagtaaggcatggattctgcattcaatttgtagagctgtaactgttgatgagagctaactgcaagaaagatgctgaaggtcccaaattctgtagaaggatcaagctacttcctgggcaaggcgacatttaagttaggctttgaagggtgaaaagaatttggacataggaagacaggaaaaaagacattctaggcaaagaagatgccatgtgcaatggccaggagataagaaatccagggctacatacacagaatgcagcacgcttcagttggcttttgcaagaaggcatcaagtgctgtagtgggcatgaagtgggcagtgtaagtccatagtgactctgaattcagaactgattctgcaggcactcaggccaggcgtggtggctcacacctgtgatcccaacactttgggaggccaaggcgggcagatcacctgaggtccggagtttgagaccagcctggccaacatggtgaaaccccgtttctactaaaaatacaaaaattagctggatgtgatggtgtgcgcctgtagtccacaccatcacatgcccagctactcaggaggctgaggcatgagaatcacttgaacctgggaggcagaggttgcagtgagcctagattgtgccactgcactccagcctgggagatggagcaagactctgtctcaaaaaaaagtttttaaacaaatcacacatcagcaagaaaaatgaggggaaaagctcccttactctgccatttttacctaggaacatggccatgagcttcttatcctgaagcaggatggctcctttcaccaagtactcaaagtaggagtccacgccagccccgatgcctgcgtcctgggccacccacttgccagtgagcacatcaatgtggttgccgacctgagagagagaaagacacacggtcccaacgggaaggccgatggccaaagaaggatctactcacccccaaccctgactgcccagggagatgcagggcaggtgccccagtgcttcttgggaaacatgcagaccctgagagggaagggcaatgctggatcatggccagccttcctgtacatctgcatagtagagatgcatctcatgcacatttatgaggacttaattatacacattgagcaaaaaatgaaaaagaaaaatgatttggagtgtttatgtcctgcctagagtgagtgtgagatgggagatgagaatttgctgttgccgcaatctgtctgatttctcagcacccagcatgtgattccactatctgaagacacagacgtgctttacgtatttccataaattaactcaataagaacatccaccaagaagctgacagagtggttctaaggagagaaaccgaatagctggagacaggggcaaaaggggacttcaccaatgtcactgagtacccttttttgtatcctttgacttttttttttttaattgttcagtctctgtagagactgtgaaaaattggcaatgccggccaggcgcggtggctcatgcctataatcccagcacgttgggaggctgaggggggcaaaatcactggaggtcagaagtccgagaccaacttggccaacatggtaaaaccctgtctctaataaaaacacaaaaattagccaggcatggtggtgtgtgcctataatcccagctactcaggaggcagaggcatgagaatcacttgaacccaagagggggaggttgcagtgagccgagatcgtgccactgcactccagcctgggcgacagggggagactctgtctcaaaaaaataaacaaagatacgtatttttctattttattgtatttattttattttttgtatttttagtagagacatggtttctccctgttggtcaggctggtctcgaactcccgacctcaggtgatacgcctgccttggcctcccaaagtgctgggattacaggcgtgagccactgcgcccagccaaatatatgtatttttcatatggcttagaccctcatggaagctggtaacttcatctggtactcaaagaaatagctaactgttccgcgttggtttgtgtccccccaggagcacaacctcattctgcctgaaagtagttgatttggaaggtaagtccttgtaaacaccagtagaggagggggaagtgaggcagggcaagggaggcggcatttaaggggtatgccatcaggcaggtttccaccatgggaactggagttcaatcttgctggggagcttaggaattcagtgtagagctccagcttcggagtgatcccacccaaggggcagggaactggaatgtttatccaccaactcccatcagtatcagttaccggcttgagagctactcatgggtagcattaaatcctggtaccctcagccaaaggcaagcagagtggctccaggcaccagaggagacccacaggcaaagaggcgcaggtgatggcagttggaagactggccagtgtgcatggaaatgttaagagttgagaggatatgggcatggcaccaacagagtctactacggtcccactgctggagcaaaacctgcctgagatggactaagggatttactacaggtctccagcggggcaccttttttttttttttgagatggagtttcgctcttgttgcccaggctggaatgcaatggcgcgatctcggctcatcccaacctccacctcccaggttcaggcaattctcctgcctcagcctcccaagtagctgggattacaggcatgcaccaccacgcccggctaattttgtattttttagtagagatggggtttctccatgttggtcaggctggtctcgaactcccaatctcaggtgatccgcccgcctcagtctcccaaagtgctggaattacaggcgtgagccaccgcacccagccttaggggggcaccttcttaagggattttcggggagtcctcacacaagctttacttttcaagctggattagcaccagactgcataaaatgtgcctagacctaaatgcagtcttcctaagtcagagtgactcagcaaagttggtattaatatattaacgttactgctgaagtaactgaggaccagagaggttgagtgacttgctcagggtcacacagtttcgatgtagcaaggccagggcttgaatccagttctgactaaatccagtgttatgtcctggatggctttggctcaattactgttaatcttattgattatcccatttagaagctgaaactgaccttagagatcatctggtccaaagtgtgttcaatttccatgggttaatagtactggaagataaagggaagctctggtgttaaataagtttgggaaatgttaaattaaacaaagttgaatagatttctttactagaggatttttattctgctcatgtgcattctgactctccaaaaaagggggggatattatatctaatattcccctaacttaattggccaagactcattttttcatgcaactgccactcagtatctctcagaaccggtgtcctaagaaacacagcaaatacagatagacgctaaaaatgaaggccggacgagctgatgatctgaagccgtcaagtgagtcaggggcatgaaacatacgaccctcttcctagaaatcagagaatctcaactggtcaaagctgaatgcagcccctgctgcctgccagaaacgtgctttcccactctcctccccactccaagccaaacttgaattggaggcttggtctatttttggtgtcctgagcccaaatcctggaccactcccaaggtcaccctaagttttccttggcttgactgcaacttattgctcagagccctgggcctcgtaagcagggactcaaacaggaagggcagcagcgaacctaccagcccgatatctgaccggctctcccagaggcgcatcaaagccactctggccacatcttcgaacaccgggtcaccagtgaggctgctcagggtggcaaattcaacaatgaaggtcccaatccctgccgtacaggtgacaggggtctctcctgggttcacgccatgaagtaagttcactgttccatatggcatgccagtgggggtctgaaaggctgaacaatcgacaaattatgatcccggacaggagcagggggatagggatagttctgatacacgcccaaagcctgggaccttagccagcacttccctctttctcctgggtatcctgctagagtctgagccagagaaagataaatgtcataactggagggccctgagcagccacccagcccagatgctgtcaaacactgctctgcataaccttgggttcctgctcatcatgagggggcagggagcaggctgtgctccacacacactcgctttagctagagagctttacctatttttatttattttacactacgccttcaaagcccaggcaggtaacttattgtgatgcaggcagggtttaagccacagaaagtggtggggcttgtggcacaatgacaagagtaagccccgttcaaagccattcatagacttttggctcacgcctataatcccagcactctgggtggccaaggcaggcagatcacttgaggccaggagttcgagaccagcctggccaacatggtgaaaccctatttctactaaaaatacaaaaattaggcaagcgtggtggtgcacgcctgtaattctggctatctgggagactgaggcacgagaatcgtttgaacccaagaggcgtgggctgcagtgagctgagattgcaccactgcactccagcctgggtgacagagcgagaccctgtctcaaaataataataataataaacaaagccattcatagactttaaataaagatctctgctttaaataaagagtataggggctaaattatttttaaagggaagcaaaataggatataaaccactaaaccacggatatagtatgaccctcgatttataggtagggaaaaccatgcctgtaaagaagtaattcagccacaggtcacacagagagagtcaaacagagctgggatgggaacgcctcccctgtgcccaccccagccccagtccagttctctgcccgccccacccaagtggcacccaagtgccttctggttcaagacgagaactggacaaccagccagaggcagagatttcctctctgggcctaaaggtcaaacaactccagagcagcctatgcgtcaccaaactgtgaacaaaggtgtcgacacttccaagaaccacagggtctagcaactgtgtctgccacagacaagaaacttgcaatctggcaggcaccagcgggagagcaagtcacaaccaggaagggctctaagcaatatttcagaaaaagtcaggctgtaataaaaagaagaggagtgacaaaatcctgtttcttgacctttttttataaaatgaccaatgaccaaaaataattaaattataaaggaggagcagctaggcagagtttccagagtttcctccagggatgaatcacacaggacacaatgtctgcaaggagacgctcaagccatgagccatgagccatgagtgagacctgaacctagctcacccgctatcctcagctctcccccaaaggagaggcaagtgctatgtgagaaggataaagaggccgggtgtggtggctcacgcctgtaatcccaacactttgggagtccaaggcagatggatcacttgatcccgggagttcaagaccagcctgggcaacatggtgaaaccccatctctacaaaaaaaaatttagccatgcatggtggcatctgcctgtaatcccagctactcaggaggctgaggtgggagaatcaactgagcccagaagttcgagaggctgcagtgagccatgatcacgccactgcactccagcctgggcgacagagcaagaccctgtctgaaaaaaaaaaaaaaaaaaaaattaagaaagaaaagggataaataagtgagatggccaagaggtgatggaaagcacagtgtgacgtgtctgggtgtgaacagtcctcagagcctccaccacaccctgaagggaacacagtgtacagttgatgctactgagcctggtgttactgccccactagacaaaaacatggaggcttgacctgcagccctggacacagcttagccacaaaacaaatccctctcgttttaaaagtgttggacgttctctaagcagtttctccttcctgacctcattttagcctctccaaaacccgatgtggtagggaagtagaaattatgattctcatttgatagatggggaaaccaaactgtggagagaggccagacacagtggctcatgcctgtaatcccagcactttgggaggccgaggcagccagatcacttgaggtcaagagtttgagaccagcctgatcaacgtggcgaaacttcatctctactaaaaaatacaaaaattagctgggcatggtggcaggcgcctgtaatcccagctactcaagaggctgaagcaaaagaattgcttgaacccaggaggcggtggttacagtgacttgagattgtgccactgcactccagcctgggcgacagaacaagactccatcacaaacaaacaaacaacaaactatgaagagaaagagtggcttggtcacgatgttggctggcagagctgagtctagaatccagggctgctaatgctcacaccaacacccttccctgggcccctgttactccagcagtgtgtggaataactgtagtacctggaaggggacaaatgggctcattcaaaataagggtaatggccttccacccaccaggctggccaccttcaaccatcccctgcaaacaataatgaggtcaactcatccatccgggtcagggccccagcaggcccttaaaatgcccaggacactcctgatttccatggtgggtgcctggtgggtagaaagaccaaatacacctggtgagaaataccaggaattaattcagcactgccactctcatcttcagcaagggaagcaggacctactggacttcgtctctgccccatctctgtgtgggtcttacctgggaggagttttcgggccgcctcctcagccattctcaggagaggcccggaacagggccatccagcctctacttccaccccagccttcttggagagcagatgagcagacaggagtcctcctaccactacagatggcacagaaagcaaatggcacagtccaaagggaaagaccaagggatcaaggatctttcccctgtgcgagttaaacataaacactctattgtggggcgcatgttctcaggacctcctgaagctatttcacgggtaaaaacaaacaaacaaaaacctcactctgttggggtggctcactgggaaggagctagagccacccagcgaaaaaagagtcccttaatcccacatatttctatggtgttaagtttatggggttttcttctcttggttcatcacaggaacagtggctattttttgtaagtccctattgtgtaccaagcactaagtactactgtcccctcttcgtatgaagatactgaggttccatgagataaagtgacttgccccaggtcacccatctagtaggtggtagggctgagtatctttgattccaaagcccatgctcattccatttgtcactctgtctgtctcccagtcacctgtcatacctggggggaaggggtaatgatggttattacctttattttactaatttatctatttcaacttattatgcaatatgtagaactttttttttttttttttgagacggagtctcgctctgtcacctaggctggagtgcagtggcgcgatttcggctcactgcaagctccgcctcccaggttcacgccgttctcctgcctcagcctcccgagtagctgggactacaggagctcaccaccatgcccggctaatttttttggattttttttttgtagacacggtgtttcactgtgctagccaggatggtctcgatctcctgacctcatgatccacctgcctcagcctcccaaagtgctggatttacaggcatgagccaccgcacccggcctacttagaacttttaaaaagacacaaaggttcttggaaatacagctaaatagatatcctgagtggccctctcaatgaaaataactggtgaccctaagtttcaaaattcccctcctccctgcagagggggaataggagaccaaggtcagacctgccccaagtggaagtctgataaaaggtccctatgcaggccaggcatggtggctcacatctgtaatcccagcactttgggagccgaggtggagatcacgaggtcaggagatggagaccatcccggctaaaatggtgaaaccctgtctctactaaaaatacaaaatattagctgggcgtggtggcaagcgcctgcagtcccagctacttgggaagctgaggcagaagaatggcttaaacccaggaggtggaggttgcagtgagccaagattgcaccactgcacttcagcctgggtgacagagtgagactccgtctcaaaaaaaaaaaaaaaaagtctgggcacggtggctcatgcctgtaatcccagcactttgggaggctgaggcaggtggactgcctgagctcaggagttcgtgaccagcctggtaaacacggtgaaaccctgtctctattaaaaatacaaaaaattagccgggcatggcgttgtgcgcctgtagtcccagctactcgggaggctgaggcaggagaattgcttgaacccaggaggcggaggttgcagtgagctgagatcatgacactgcactccagcctgggcgacagagcgagactccatctcagaaaaaaaaaaaaaaagaaaagaaagaaagaaaagaaatctacatgtatgtaccttatggtaaaactgcagaacaccaaagggaaaaatgatctcgaatgcagccagaatccatgtaataataattattaatgctgggtgatgggcacgtctggttcattatgctattttctctacttttatgtttgaagttttccataacaaaaagtttttaaaaggagaagacagccaaagtgaaaaccaaaacaagattctctacaaataaataataattacattgacagattacttcttaacaataatgaaaccagaagataatggaaaaagtttttaacacaataagagaaagtaaccatcaacctagaaccatacacccagcaaaaatatcactcaaaggccaaccaaaggcagttgaataaagacattttcatataaacaaaagctgggaatgtttatgaagcacacacctgcattaaaggaaattctaaaggaaatactttagagaaaaggtctgagacacgaaaagaaaaaatagtcaaaaaagtggtaaataggccaggcacagtggctaaacctgtaattccagcactttgggaagccaaagcaggtggatcactcaagatcatgagtttgagaccagcctggccaatgtggtgaaacaccatctctactaaaaatacaaaaattagcctggtgtggtggtgcacaactgtaatcccagctactctggaggctgaggcaggagaatcgtttaaacccaggaggtggaggtgagccaagatcgcgccactgcactccagcctgggtggcagagtgagactctatttcaaaccaacaacaacaaaaaaagtggtaaatttatgtgtaaatgcaaaacttcaacaatatagaacaaaaattataatgtatggaaggtttaaaacaaataactaaaatatataactgtagcatataggtcaggatgttctctaagtcaggttttgcattattcaggaggagaacaaagattttcattaaatttagactttgataagttatgtttgttaaatttgcttggaaaactatgtaaaaagctagatattgtgcataatttccatattagtaagaggaaaatggaatggggggaaaacaatctaaagaaggcatgaaaaaggacagaataaaggaacataaagaagatggcacagggccaggtgcagtggctcacacctataatcccagcactttgggaggctgatggggggcggatcacctgaggtcaggagttcgagactagcctggccaacatggtgaaaccccatctctactaaaaatacaaaaattagcagggcacggtggcaggcacctgcaatcccagctacataggaggctgagacaggagaatcgcctgaacccgggaggcagaggttgcagtaagccaagattgcaccactacactcccgcctgggcgacagagtgagactccgcctcaaaaaaaaaaaaaaaaaaaaaaaaaagaagacggcacagagagcacaatactgtagaaatgagtgcaaatatatcagtaattacagtaaatgtaaatggattaaatgtgccagttaaagattgtcagaatggataaacaaaatataatacactatttgcaaaagatgtatctaatcataaaactacagaaagatggaaaggatagaaaaagatacatgggaaaatgtcaaccaaaagaaagctggtatcacttatattcctatcagaaataaaggtataagaatgaccttcatttacagatgacaaactgggctcagaagctgggagacatagcagcaagtacagcctcaaactcaggccggattcctaaaccaggattttagaccatgttgtccctctgctctcttctcttttttaatcttttatggatcatatgtctggaatataagtttcattgcagaaaacatacaaaataatggggaaaaatagaactctgccatccagaggtgacagctgttaagtggtctagaggttcgatgcaaataagggctgtgctggcttcacaagaatcactggaagtctgctaaaaatactgattctaggacccaacacagagattccaattcattaggtttagggtggagtctcaacatctgaattttttaaccacttgggagtggttcctatgggctgccaagtttggaagattaatgctgtagatttgcactgtccaatacaataatcactaactacatgtgactacttaaatttaatatcattaaaattaaatgaaattaaaaattcaattccatagttgtagtagatacatttcaaatgctcaatagctcatgtggttcgtggctaccatactggacaaaacacagctataagacatttccatcactgcagaaaattggattggacagacaataagttccaagaaggcaaggatcatatctttcttgttcatagctgtatgcctagtatcaaatacatattaaagaggtgagtaatctggtgtatttctttccagtctcttagtctcctgctcactttcatatctgaaactgatggggaaatcctgagacttccccacctcaccctccaggagggaagaagagctctgtcggtcagaggttttggccaagggtcctggcatggtcagtccttaaaatcctatttaccacttcttggtttacagaggcaacttcacactcttttttcttttaaaggtcctagagagcagcccttacctcgaatgtttgtttcaaacacagaggcgttcacatcaatatcaaagtccacgctgtcctggagcacttcaaccactctttggaattctgagacattccccaaaatctggaaataaaaaagagacctgacaatgaggctcttacatgcatggaggcagattcagagtctgggatcctatgttgatgtggccctcactaattccacttaagacctccagtttctgtcctaggattggtgacagcagaagaaaacactgagagctagaaatcatctagagacttcataccaagagactggttaagtaaattcctaggtcccaattaagagtcacgatgttgtcatttaaatggacacaatataaagaacgcaaactacgcatagaagtcttaggttttttgtttcgtttttttgagacagagtctcgctctgctgcccagggtagagtgcagtggcgtgatcttggctcacttcaaactccgcctcctgggttcaagcgattctcctgcctcagccccgagtagctgggattatgcaccaccatgcccggctaatttttgtatttttagtagagacggggtttcaccatgttgatcaggctggtctcaaactcctgacctcatgatccacccgccttggcctcccaaagtgctgggattacaggtgtgagcgaccgcacctggccaaaagtcttagtttgacatttgcagtagataccagttgtcaccttcaaccttgtggaaaacagaacaggttggttggcccaaaacaaattcattcctaccctctttacctcatggcctcccaccagaggttggaaatccagaagctttctcggcctcctttgctgctgcagttgattgtgttacccagtcaattctgacccttgagaggtctactgggggcacttctgggaaggcttctgttttcttaataccaagggacaaacacagctaacatggcttttagtctctctctttctgccttgaactcagactcgatttctgaagtgatggcagctatgtgagaccatgacgtactaagcattagaataaaagccaaaacactaacgatactagaatgcaaagctacaaagaggctggtctctaatgacacagttgcgtagctgacccaatgctagaaattacctctagactttcttttacttgagaaaataaaccctctttatttaaaccgttagccaaatgcaatctcaatctctcttcttttgatagtaacatctcaatttaccctcgaggaatcactcttccccggcagtcactcctgtggtttgggagaggctgatcccatccctctagctgtggagtgggtacttgacctgaaccagtccaagtcttttttttgagacagggtcttgctctgttacacaggttggagtgcagtggtgtgatcatagctcatcacagcctcgaactctgggacttgagcaatgttggcctcccaaagtgctgggattacaggcatgagccaccacacctggccctttttacctttctaagcatcaggtttcttttatatcttttttttgtttgtgtgagacagggttttactctgttacccagaccagagtgcagtggtgcgatctcggctcactgcaacctctgcctccctgactcaaacaatcctcctacctcaccctcctccctaacaaatggagccacagacatgtgccatcatgcctaattttttatatttttggtagagacggggtttcaccatattgcccaggctggtcttgaactcctgtgctcaagcagtcctgccgccttggcctcccaaagtgctgggattacaggcgtgagccactgtgcccatccctaagcatcaggtttcttaacgataagaaggagtaaaggtactaacctcaagaagttgttagaagaattaatacatgtctgtactaagccctacagaaacatactaactagtcactgatattatttctttataattttttttgagatgaagtttcactcttgtcacccaggctggagtgcaatggtgcaatctcggctcactgcaacctccgcctcccgggttcaggcaattctcctgcctcagcctctccagtagctgggataacagacatgtgccactatgctgggctaattttttgtattttaatagagatggagtttcaccatattggccaggctggtctcaaacccctgacctcaggtgatctgcctgcctcggccttccaaagtgctgggattacaggtgtgagccaccatgctcagcctgatacccttttattatcattgaacatggccactagaatgtaagcctctgaaaacaggagatgtcaaagtctctgtatcccccatagagctatgcaagcctatcacaattctccgtacataacaggtcctctataaatgtttgctaaataaatgaatctgcataagttgtagttcgtttttcccctatctagctaggcaaccacagccggacgcttcagaatcatgagatgcaaataaaaggcctaggagaggaattcatttttcacccacagtcacgctgccaaaagaggaaggatgttggttatgtaacagtggaaaggaaaagaaacagacgagatacttaccagcaaggtgtccagtgcatcaattagagtcagagaaaaactgcaaaaggacagaaatcccagccgcttagtaagaaaatcaaataccagatattatggctgccctagatctgatccccctaaaactaaatgaggcaaagtaatgcctctgcctgtcccacttacagtcacaacagagaaaccacagtgaaaatcgcaggtattctctgacccacttaatgcacctgggagggttggctgatgtagctcaattgtaattaaatacatcacctatagtctggcattctcctctaccattgggaggcagtataagattgcagcttaaagcacaggcctttcaccaattttcacctctaggaatttaattcacagtgaacagctgtttgagagtgttcatggcagtattgcttagaacagcaagaggctggaaagaacccaactgtccacccattaatgggtgattaaactgtgttataaacagtgcaaaactatgagttatcaaaaagattgttatcaagacttctatgtgctgatggaaagacattcgaattgtttttaatgaaaaagtcagggtggtttagtatgtttccatctgtttcaaaaagacatgctgacagaaagcagacagcaattgttagggtcagtggtggtgcagggatgaactataaagggccacaagggaactttttaaagtgacagaagtgtttcatatcttgactgtgatggtggtcacttcaaacgagtgtaggctgggcacagtggctcatgcctgtaatccgccagcactttgggaggcctaggtgggtggatcacctgaggtcaggagttcaagaccagcctggccaaatgacaaaaccccgtctccacaaaaaaattagccgggtgtggtggtgggctcctgtaatcccaactacttgggaggctgaggcaggagaatcgcttgaagccaggaggcggagtttgaagtgagccaagatcacgccattgcactccagcctgggtaacaagagcgaaactccatctcaaaaaaaaaaaaaaaaaaaaaagagtgtattttattatatgtaaattatgcctttaagaagttcattttaaaaagatacacatacacacatctatatatataatggtataaaccaagaatatttctggacagatacaaaggaaagttaatagttggaattctagggtatgggagatatttattgtatataatcttttaccacttgaatttgccatttgtatttactttgtttcaacttaaaaaaataaaaaccatcacaagttttgagtttaatttctcccgaccttagcacattcgtgtgtaaaacagggataatggcacctaactcgtaggggtattaagatactgagctgagatctgaatgacaagcagcagccagtgatgggaggaaaatggggagtgtatttcaggcacggggcacaccaactacaaagacttaagttttaggagtgtcacactccttcctggatctgaatgcccacctacataatgaaaggggtgggttttctaattcttggagcccttccacggtatctcgttactccagaaattgcctatgtccccacagctgatgcctgttactgctggggctgagctcagcgatccagcccacccggctaatccaggactttttttttcactgcgagaggctaagtggatcctggaggtgatagtaagaattgcggggagcgcggctctagctcagctgggagctttctggtgccggtgaggagaccatgaagccaccagccccagctgacccgcccgccgaggcccagagagtcagaccctggccgccccttgcccctccgctcgcactacctgccccaggtgtcgtgcccgtcacaggtgagaggtcgcagctcatcgaagggaaaggcattctccaggtagctgtcgtaggcgtggtagaacatggccttgactcgctccctgggtgggggacgagaaatcaggcatggggcaagaacacaaaaacaagcgggggaagaacaagatacagggcggaaagtgggaatcactagctgatttctccctgggacctagcggctgtgtcggagcaagtcggggtctgggatggacggaaagggaaaggaccgggttcacgcttcccattccccaactgcgaaagggcgggtcacagttcacctgtagtgggcgggatctggcgcggagccgtcgggacctggcgcaccatggtgctgaggcagcagcgcgcacaggaggccgagcgggatgagcagccggaaaggcatagagctcgtgtcctctcagcgcccccgcagcagcagcagccactgcaaccagttcatcctgggagctgctgcgggttcttccgggaatccgcgccactgcgcctgcgcgctgagaaatcagcctctcacttccggactacaagcccctgaatgcaatgggcagcgaaacgcggccgaagagcaacttcggatgtacggtttcggcaacactgatcaacgtgtcttaaagtcagtggctgttgttactactgttattaattaatgttttaataataacagctagcatgtattgagcacttattgtgtactagtactgtacggagcatttaaaatgcattctctcattcatttttttcaacaaccttattaagtatgaaggcagggtaagcatgagaaatgttcagcctttaccattattacctagcaggacaagccgcagacaaaactcctcagacaccgggttaaagaaggaaggagctttattcggccgggagcgtcagctgactcacttctcaaaaacggagctccccgagtgagcaattcctgtcccttttaagagcttacaactctaagggggtccgcgtgagagggtcgtgattgattgagcaagcagggggtacgtgactgattaccggtgcaccggtaatcagaacggaacagaacaggacagggattttcacaatgcttttccatacaatgtctggaatctatagataatataaccggttaggtcaggaggggtcgatctttaattaccaggcctggaatgcatcgccgggctgtctgactactgatttcacttctgtctttcttttaactcctacattttctttgaggcagaaattgggcataagacaatatgaggggtggtctgctcccttatttagggatattgagtttcccaaaccagttacttgttgattgtataagacacaactcacatttatttgtccaaaacttccactcttttttttttaaaacctcttgcattttccgatgctgtcactcttgaggtttcctgaaatcccgtcagttctaggaattcatgacacttctctcctcccaatttgggatgtggttacacaatcatggtcccttcagtctccatctcaaaccggaagctttacccctgtcagccctgtagaatgtcttgggtaagaatgaataccctggttgggcgcggtggctcacgcctgtaatcccaacactttgggaggttgaggtgcgtggatcacctgaggttaagagatagagaccaacctggccaacatggtgaaaccccgtctttactaaaaatacaaaaattagccaggggtggtggcgggtgcctgtaaatcccggctactcggaaggctgaggccggagaatcgcttgaaaccggaaggcggaggttgcagtgagcgaggatcgcgccactccactccagcctgggcaaaacagcaaaactccatatcaaaaaaaaaaaaaaaaaaaaaaaaaaaaagacaaatgactaccctggggcactatagctttcaggaggtttgtgatccatttctccattccccttattcccaagtttctaaaatttggtcagcaccttagaccacagcaacacccatgactttggtcagtgtgacatgcggtagaaccaacactggatttgaagtcagatctaggatccagttaattacaactctgtcactcatctataacctgtgtatgtgaccctctccttctctggggctagcatccttgtctataaataatgaggagtttgaacaaatggatctttaagatccttttcggtcgagctttctatgattctaggattggctatctcttatttgctgaaaaagtcagatggaagtgatagctcagtttgttgagccagagtgcagccaggcctcccaaagtgctgggattacaggcataagccactgtacccagcctgggatgtttttagaaactcttcttggccgggtgcagtggctcacgcctgtaatcccagcactttgggaggccaaggcgggcggatcacgaggtcaggagttcaagaccaacctggccaatatggtgaaaccctgtctctactaaaaatacaaaaattggccgggagtggtggcagacgcctgtagtcccagctactcaggaggctgaggcaggagaatcgcttgaacccgggaggtggaggttgtagtgagccaagatcaagatcaggccactgcactccagcctgggagacagagcgatactctgtctcaaaaaaaaaaaaaaaaaagaaactcttcttggggcttccaaatggaagggaaaggagatgacagtaagctgagacctggataacaacacaggagcactgtattcgtttcctgtgattcctgcaacaaattaccacaaaccaagtggcttaaagcaacagaaatttattctctcgcagtttgggaggtcaggagcctgaaatcaatttcactgggctaaaattaagttattgacagggccacacccactccaaaggctctaagggataatccgttccttgcctctctagattctcctgactgctggcattccttggcttatggttgtatcactccagtatctgcccgtgccttcatatcgccttctctgtggatgtgtcacatctccttctgcttttctcttataaggacatttataattgcatttaggaccccccccgcgccccccccaacccagataatacaggataaactcccattccaagatttttaacttaatcacatctagggggaaaaaaaaaaaaaaacaccatttttccaaatagagaaacatttacagtttccagagattaggacctggactttaggtggctgtttccagcctagcgcagggactaaatatttttcagacctgggcctttccctgtgacgaaattcaccttctccatattataaatcctatagcttatctttttgtctcccattcaaaattctagtgtggataaaacttttgcaggaagggtgggttcaggttgcctggatttggtaacgataggtctctctttatgagcaagattgaaacactcatgattttcctttatattctttttctagcttgatgtcattctccacactgtcactgaacaaataaaaccatgacttacgttttcacaattcatgtgactatatgttctctaatgagaataaaaaaattgttttaccctctggaaagtatcaggactcttctttctctcactctgtgtttatgatattggattctagaaggttatgacccaccagtgaagtgtcacacttgagcatttacttgtgaagagactcagggtaagttgcctacctctctgagactcaatttcctattgtaaaatacagaaattgatgaggccataaaggaattctgggaattaaatgggataatgaaagtgaacattctcagcacagtgactggtatatattaaattcttgatacatattaattctcttccctgcctccccaactcttcttttttttttaaggcagggcagttgtttccatttactgagcatctgccccgagtcatccaaggtgttataggcaatagttcctaccctcaaaagtttgaggcacagtgctgagcatataactaagattccaaaataatcaagtcatagtcctttcccttgaagtgcttgcaattttgttagaaggggaagatgtcaattggagaatacttggaatcatagggtgttcaagtcttccctgtgggtgaatagagtttggagggagctcagatcacatcagtatctgaggccaatgtcctcggactctgtgttcagtggaacaagacttggactggttgtcggaaacccttggtcttgttacttgtttatccactatctctgtgtgatctcgggcaagtcattttcccttttggggactcagtttccatatctggaagatgaaagagtgagactatctctcagcacaaggaaaatattaacagatccatacagttattgcaaaaaatcagaaaacagaattcaacacacatcgactgcacaaatttcccccagaaacatccatgaagcagaataaaacagtgggacagcattccaaatggaatttgactatttgccaactaaacaaggaagaggagggggatggggagggggacaagaagaagaaggagaaaatagtcacgtgtattgataatagcgaacatttacatagcaagtaatgttctttgtactttacatccatcaacaccattaatccttaccacaaccctctgagaaagtgtcattatcaccattttataaaccaaaaacctgaagcacagattctaagaattgaagaaagatttagcaacttaatcaatgtctcataccgaataagtagaagagtcaagatatggacccaaacagcctatactctaacgcattaatgaaaataatgacaaatatataaataaaaggccaacacagaattcaacaatggagatctggcgaactgctacagtgtcctctagctttagcttcatgtggttttagggtcaacatttccttcccttttgctagaaagttagagggaaaagctcagttccctgaagttggaagccaaggcattttagatcccctttggccaagtacactcgacctcttttagcagggaagaatcctttttgtagcatctggaggtcatttggttctcccaactcccaaagcagggcttgcacaatacatacttttgacttgccaaaaaataagtttatccctgggaaatttcccatccatctgttgctttgtagaaatgcttgaactttgcatgcagtatgtccaaacatttcgatcgactccctggttagagtctcagacctcgttattattattattattatttgagatgagagttttactctcgtcacccaggccatagtgcagtggcgcgatcttggctcaccacaacctccacttcctgggttcaagtgattctcctgcctcagcctcccgagtagctgggattacaggcatgcgccactatgcccggctaatttttatatttgtggtagagacagggtttcgccatgttggctaggctggtctcgaactcctgacctcaggtgatccgcccacctcagcctcccaaggtgttgggattacaggcattagccaccgtgcctgaccttacacttttattcttattttatttttcttctttttgagatagggtctcgctctgtcacctaggcactatcaccactcacttcagcctcgacttcccaggctcaagtgatctttccacctcagcctcccaagcagctgggaccacagatgcgtgacactatgcccagctaatttttaatttttttgtagagacaaagtctcgctgtattgccgaggccggtcttgaactcctgggctcaagcaatcctaccgccttggtctcccaaagtgtagagattacagaaatgagccaccacacctggcctcagaccacgtttttattatgctcatattccaagtgaactcagacctgtagctaaatctgccacagaattgtgcactttaaaatggttcagatggtaagttgtgtcacaagtattttgtcacaatttcttaaaaattaaaaagtgagccctctccctctccctctccctctccctctccctctccctctccgtctccccacggtctccctctcatgcggagccgaagctggactgtactgctgccatctcggctcactgcaacctccctgcctgattctcctgcctcagtctgccgaatgcctgcgattgcaggcacgtgccgccacgcctgactggttttggtggagacggggtttcgctgtgttggccgggccggtctccagcccctaaccgcgagtgatccgccaacctcggcctcccgaggtgccgggattgcagacggagtctcgttcactcagtgctcaatggtgcccaggctggagtgcagtggcgtgatctcggctcgctacaacctacacctcccagccgcctgccttggcctccctaagtgccgagattgcagcctctgcccggccgccaccccatctgggaagtgaggagtgtctctgcctggccgcccatcgtctgggatgtgaggagcccctctgcctggctgcccagtctggaaagtgaggagcgtctccgcccggccgccatcccatctaggaagtgaggagcgcctcttcccagccgccatcacatctaggaagtgaggagagtctctgcccggccgcccatcgtctgagatgtggggagcgcctctgccccgccgccccatctgggatgtgagagcgcctctgcccggccgagaccccgtctgggaggtgaggagcgtctctgcccggccgccccatctgagaagtgaggagaccctctgcctggcaaccgccccgtctgagaagtgaggagcccctccgcccggcagctgcccctactgggaagtgaggagcccctcagcccggccagccaccccgtccgggagggagatgggggggtcagcccccccacccggccagccgccccgtccgggagggaggtgggggggtcagccccccacatggccagccgccccgtccgggagggaggtgggggggtcagccctccgcccggccagccgccccgtctgggaggtgaggggcgcctctgcccggccgcccctactgggaagtgaggagcccctctgcccggccagccgccccatccgggagggaggtgggggggtcggccccccgcccggccagccgccccgtccgggagggaggtgggggtgtcagctccccgcccggccagccgccccgtccgggagggaggtgggggggtcagccccccgcccggccagccgccccgtccgggagggaggtggggggggtcagcccccctgcccagccagccgccccgtccgggaggtgaggggcgcctctgcccggccgcccctactgggaagtgaggagcccctctgcccggccagccgccccgtccgggagggaggtgggggggtcggccccccgcccggccagccgccccgtctggtgggggtgtcagccccccgcccggccagccgccccgtccgggagggaggtgggggggtcagccccccgcccggccagccgccccgtcagggagggaggtgggggggtcagccccccgcccggccagccgccccgtccgggagtgaggtggggggggtcagcccccctgcccggccagccgccccgtccgggaggtgaggggcgcctctgcccggccgcccctactgggaagtgaggagcccctctgcccggccaccaccccgtctgggaggtgtgcccaacagctcattgagaacgggccaggatgacaatggcagctttgtgggatagaaaggcgggaaaggtggggaaaagattgagaaatcggatggttgccgtgtctgtgtagaaagaagtagacatgggagacttttcattttgttctgcactaagaaaaattcctctgccttgggatcctgttgatctgtgaccttacccccaaccctgtgctccctgaaacatgtgctgtgtccactcagggttaaatggattaagggcggtgcaagatgtgctttgttaaacagatgcttgaaggcagcatgctcgttaagagtcatcaccaatccctaatctcaagtaatcagggacacaaacactgcggaaggccgcagggtcctctgcctaggaaaaccagagacctttgttcacttgtttatctgctgaccttccctccactattgtcccatgaccctgccaaatccccctctgtgagaaacacccaagaattatcaataaaaaaataaatttaaaattaaaaaaaaaaaaaaattaaaaagtgaggctgggcacagtgcctcaagcctgtaattccagcactttgggaggctgaggcgggtggattgcttgagcccaggaatttgagaccagcttgggcaacatggcaaaaccctgtcactacaaaaaaaaaaaaattagcagggtgttgtggcatgtgtccataatcccagctactcaggaggctgaggtgggagggtggaataaatggaatgtgatccaacaaaattattattattattattttgatgatgtctattgcccttttgaaatacccaattctggcagggtgcagtggttcacgcctataatcccagcactttgggaggccgaggtgggcagatcacctgaggtcaggagtttgagagcagcctggccaacaaaccccatctctactaaaaatacaaaaattagccagctgtgttggtgagcgcctgtaatcccagctacttgggaggctgaggcatgagaattgcttgaacctgggaggtggaggttgcagtgagccgagatcatgccactgcactccagccagggtgacagagcgagactctgtctcaaaagaaaaaaaaaaaaaaaaaagaaatacccaattctttcacagaaaatatgttcttactggctggcggggagaggggtggttggtaaatgggaaaagggtgcttcctttgctgatatccaaagcagatactttctctgcctatttgatgatacaaaactagccctaccacaccaggctaagggagagaagaggatccgtgtcctacagaattccccctattagcctacctgccccatagcccccaaactctgctgctaatcaactgtgccaggtcaggaagaaagaaactggagggaaagaagaagcctaatagattgaaaatcccttcagcaaacattttttgagagccttataactgttagtgtctactgaattaaacttactagtgttaagaaaaattatctgaaacatgttactaaggtaaaaagatgattgtgtgactttttgctgtcatgataaagcattgactagcaagtctacttgtcatctgtccctgaagagaaacgtgacactattttcatattaattacggcccagacattgtacaattctgtaaagtaataagatgtgacaatttcctttcctgcctggtagagaagataatcccaaaggttatgatattattactctgtaggacattaacccatttagtatttaatttagcaatcttacttcaatattttccttttccattgactataaaaactcaagttcttttttcttttttttgagacaggtctcacattgttgcccaggctggagtgcagtggttcgaacacggctcactacagtcttgacctcccacatcccaggctcaagtgatcttgcctcagtccctcaagtagctgggactataggcatgtgccaccatggccagctaatttttgtatcttttcgtatagacggggttttgccatgttgcgcaggctggtctcaaactcctggctaagcgatccacccaccttggcctcccaaagtgctgggattacagatgtaatcccaccatgcccagccaaaactctagttcttatattctattttgaactggctttgtcgtcctgcttgtcccttcattaatgagttaaatgaaactctgacccatgctcactgtctatttcaatgagaattatggttggttttgtttgtttgtttgtttgttttgagacagagtctcgctccgttgcccaggctggagtgcagtggtgtgatcttggctcactgcaatccccgcctcccagattcaaatgattcttttgcctcagcctcccaagtagctgggattacaggcacctgccaccactcccagctaatttttgtatttttagtagagacggggtttcatcacgttggctagactggtcttgaactcctgacttcaagtgatccatccactttggcctcccaaagtgccgggatttacaggagtgagccactgcgcctggccaagaattacatttttaacatgctgacagttgtccttgacactaagtgtcagaccctggattaagtaatttatagacccatgatactcctttgagatagtttttgtccccattttccagatgagaaagtgaaggcacaaaaagataaaagaaattttctcagtgccagttttgtgccaggagctttactaagttacagtttttttctccttccctcgaagtcctgtttatctattcattgattaaaaaaaaaaaaatcattgagtact

SEQ ID NO: 451 - DNA, 29090 bp, Homo sapiens
taatgatggaattcctagcaccggtggagaagagatcctgaggcagaaaggccttgctatcactcttcagtcatgttgataggcaatgctacaaagggcttaagaacgtggcactgaggctgggcactgtggctcatgcctgtaatcctaacactttgggaggcccaggcaggaggattgcttgagcccaggagctcaagaccaacataggcaatatagggagaccccgtctctatacacaacaacagcaacaaaaattagacaggcatggtggtgcatgcatgtagtcccagctaatggggaggcagaggtggaaggattgcttgagcccaggaggttgaggcttcagtgagctgtgattgcaccaccgcactccagcctgggcaacagagtgagacctcatcttaaaaaaaaaaaaaaaaggccaggcccagtggctcacgcctgtaatcccagcactttgggaggccaatgtgggcagatcacaaggtcaggagattgagaccatcctggctaacatggtgaaaccccgtctctactaaaaatacaaaaaaattagctgggtgtggcggcgtgcacctgtagtcccagctgctgcagaggctgagacaggagaatggcatgaacccagggccaagaccgcaccactgcactccagcctgggtgacagagcaggactccgtctcaaaaaaaaaaaaaaaaaaaagaatgtgggcactggagccaggctgcaggctgacagattcgtatctgtcacttagcagctgttgaacctttgacaaataacctgtctgtgcctcagtttccaaatctgcaagatggagataagagtagctcctttataggactgttgtgaggctgtaatgagatattacatgaaaagcctgtagtcccagctactcaagaggctgaggctggagtaccacttgagcccaggagttcaagtccagcctgggcaacatagtgagaccctcatctctaattaaagaaaaaaaaagagatttaatctctctgtaatccccatcactttgggagtctgagacaattggatctctggagcctgggagtttgagaccagcctgggcaacatggtgaaaccccatctctactaaaaatacaaaaattagccgggcatggtggcttatgcccatagtcccatatactcagcaggctgaggaacaaagaattgctcgggcccaggaggcagaggttgcagtgagccgagattgcacttgggtaacacagcaagactctttctcaaaaaaaaaaaaaaaaaaaaaaaaaaaaatcggccgggcgcggtggctcacacctgtaatcccagcactttgggaggccgaggcaggcggatcacgaggtcaggagattgagaccatcctggctaacatggtgaaaccccgtttctactaaaaatgccaaaaaaaattagcaggtcgtggtggcggccggcgcctgcagtcccagctactccggaggctgaggcagaatggcgtgaacccgagaggcggagcttgcagtgagccgagatcgcgccactgcactccagcctgggcgacagagcgagactccgtctcaaaaaaaaaaaaaaaaaaaatcaaagggcctccgatctatgccaaccactccttaagatccctttggttctcaccaatctctcatatcccaccactgcctttcagtggccttcactcaccaaacctgttactcttcatcaaaaactgtacccctaggccctttccctcaggcctcgctttttttctttttttcctctcacctctccatcctgtccctgttaccctgttatctcagttccatatctcaaaagcctagaaaggcagacaagacagagctctccttaaaaagtgatgggcaggccagctgtggtggcttacgcctataatcctagcactttgggagatcaaggcaggaagatcacttgagaccaggaattgggcaacatagtgagacgcggtctgtacacaaaattttaaaaattagctgggcatggaggtgtgtgctgtagtcccagctactcaggaggctgaggcaggaagattgcttgagcccaggagttcgaggctgcagtgagccacgattacaccactgcactctagcctgggtgtcagagaccccatctctaaaaaataaaaaaagtgaaggccaggtgcagtggctcacacccgtaatcccagcacttcaggaggccaaagtgggaggactgcttgagcccaggaattcaagaccagcctgagcaacaaagagagagagagagagagagagagagagagagagagagagagagagagaaaggaagggagggagggggagagagagagagagagaaagaaaaataaattagccaggcatggtggcacaggcttggataattttttaaaaactatttgtatagaaggggtcccactatgttgtccaggctggtcttgaattcctggcctcaaacaatcctcctaccttgacttcccaaagttctgggattacaggcgtgaagcctgcgtgtatcgattttctattgctgtgtaacaaacaaaacctccacagacctaggggctcatgacagcacctgtttattagctcacaattctctaagtcagaagtctaggcacatctgggttctctgcttgggatcccacaagtctgaaatcaaggtgttggccaggtgtgtcctcatatggaggcttgactagagaaagatcaacttccaagctccctctggatgttggaagaattcattttcttgtgaccatattagcaaggccctgttttctcactttctgttggcaggggaccactctcaactctcagcttgtagaggtccctcttgggtcctcctcttgtggccctctccacacatagcatttggtccttcatgggagcaccagctgctggaaaaaatgattctgttaggtaaaaatactatacatttttgaaacatgcaccaattatttagctctgtgattgtgggcaatttcttcaagcagcctgagcctcaatttccttatttgtaaagctgggaaaacaacgatgcccatcttggagggttacaggcacatagaaaaacaatcaataaatataagctgctgtttacatttgttctttttttaaaaatttttaaattttatttatttatttattttgagacagagtcttgctctgtcatccaggctggagtgcagtggcgtgatctcggctcactacaacctctgcctcccaggttcaagtgattgtcctgcctcagcctcccaagtagctgggattacaggtgcacaccaccacgcccagctaatttttgtgtttttagtagagacgggttttcaccatgttggccaggctagtctcgaactcctgaccccagggcatccactgcctcccaaagtgctgggattccaggtttgagccaccacaccaagcctacattagttctaacgaatagacagggtctagacacagtgagattagatgagtgagggacagggttccctacatggagaaaactgcaagagccaaatcttggaagcaggaaagctggtggtttatttgtgaagggtgtgtgtgtgcgtgtgtacagagaacgctgaaagagtaggtgaacacagttttgcttatccctccagtcagaatttactggatgcttactgtgtacccagtaccatgaaagggtgcccggccagcagtgtgaattcagcctggaagtgggagggagccaaggaagagctctgagttggagagggaagtggtctaagcttcgggaaatttatctgctcctagtagagtggttgactcagcaggagagaacccccttctcttctgcaccctctcctccctagcctcaaagcctgctaaggacccagttcccaagcagagacccaggagggagttgcagaatctggccctgtctggacaagacagacagggtgcgactccagatgccagttcctttctttctgctcctgaatggccccaaagctatcccttctcaccacaatggtcaaggagggatacagcaatttctcttttaaatgttacacatagggctgggcacggtggcctctaatcccagcacttcaggaggccgaggtaggaggattgcttgagcccaggagttggagaccagcctgggcaacataggaagacccctgtctctaaaaaaaaaattagaaaaataaagttctaaatgtgggaaatcatgctgggcactcaactacagcagctcacttgggtacttgtccacactcacaaatatagccctgggaccccaaagtcactgtcccaccctcacaccatgggcagatggactcaaactaagccaggcttttggctttctgccacttgcctcttctctctgaagtgaatcctgtcctgatcatcacctccttgctgacagggccattaagcgcagttcacacaaacaaaccacgatgccttgaggttgagactgggaggtatgttaagggagcatggagccagccattctgcagatggggaaactgaggcaaagaaaaaggaagtgacttgcccaggctcaggcagtgagcccaggacagaccaagactgaaatctgacaatcagcccagggtttatacacacacacacacacacacacacacacacacaccccacaatttgagttacgctcaaattcagacatcgtgggttgaacaacaaagctttttttttttttttttttttttttttttgccagagtcttgctctgttgcccaggctggagtgcagtggtgcgatctcagcttactgcaacctccacctcttgggttcaagtgattcgcctgcctcagcctcccgagtagctgggattaaaagcacctgccatcactcctggctaatttttgtatttttagtttcaccatgttggccaagctggtcttgaactcctgagctcaagttgtgtgccggccttagcctcccaaagtgctggcattacaggtgtaagccaccacacctgggccacaacaaagctttttgaatagaagttcttggaatatggcctcttgttaatgtgtaggcccatctgttgggggaatttggggattatgcctgctctagctggctttaccaattaaatgttttcccctctctgtctcagttttttcaccggtaagataggaagaatttattatctatgtcagagggattcctctcagcctcactctctatctcaggtcggggggcaggggagggtggggaaggaaaggagtggtgggccagtcctccagctaagcacacagactggcccatacctgcaagtacacacaaggtcccttgagcgacacacccaggctgacacatcactttaagggggcacggaggggggcaggcagtgggagtggcaagccagtggggagcccccaggtgagggcaagcccgaggaatagaagggtggcctctttttttttatttttgtttttgagatggagtcttgctctgttgcacaggctggagttcagtggcgtgatctctgctcactggcaacctctgccgcccggattcaagcaattctcctgcctcagcctcccaagtagctgggaccacaagtgcatgccaccacgcctggctagttttttggtattttttagtagagacagggtttcactatgttggccaggctggtctcgaactcctgacctcaggtgatctgcctggctcggcctcccaaagtgctgggattataggcgtgagccactgcgcccggcctgaagggtggcctcttgacctccagtcctgcagcccatgaaattgggcaggtactcacacctgggcatgggttagatgggcgtgggtccctagtaactctgagtatgagctcatgtgcatgtgtgtatatgtttatatatggatgccttcattgtatgcacagatacccatgattatccatgtgtgtgcataggaatggcaccctctgtctgattggaaatgagactccagagttaccccagcatgatgttcactgccttttttttttttttttttttttttttttgagacagtgtctccctatgttgcctaggctgaagtgcaaccacccaggctcaattgatcctcccacctcagcctcctgagtagctgggtcttcaggtgcaggccaccacacctagctaatttttgtatttttaatagagacaggattttgccatgttggccaggctggtatcgaactcctgggcttaagcaatcctcctgccttggcctcccaaagtgctatgattactggcctgcactgccgcgcccagctctgctgcctctttttacagcctgccggcccagaccagagtctcagaatactaagcccactttctggggccagggtcagtagatagctttgctgctgtatgattctaagcaagtatcttgacctgcatgtgtctcagtgcacctcagtttcctcacctataaaatgaggggtttggatgagttgaggtctgaagcctcctccagcccaggtaataaatctttgtagtggacaggaggaataggtcctaggggtttcaggaggggacttccatgggtacctctgactctacagagaaatggaagactgagatctgacttagcagcctagaaagacttagcagcctagaaatggggttcagctaattctgggaacagagtccggtcacttaaggtaccagagtgtagccaagagcccccttttctgggcttggggaaccagaaccatgtgttcaacagaccattgcctgtacacagggtagagagtgcaggtgtatactcctgaaccagccacccttcttttttttttttttttttttttgagatggagtctcactctgtcgcccaggctggagtgcagtggcacgatctctgctcactgcaagctccgcctccccggttcacgccattctcctgcctcagcctcccgagtagctgggactacaggcgcccgccaccacgcctggctaattttttgtatttttagtagaggcggggtttcaccgtgttagccagaatggtttcaatctcctgacctcgtgatccgcccgcctcagcctcccaaagtgctgggattacaggcgtgagccaccgtgcccagcccccagccacccttcttaagcttcaagctataactactgagcctgtgatgaaagtctactctatgccagacccccacaagctgggtgcgggcagtatagggacaaagactctgcccttgggatgccaaccatccacttgagaagacacatacacatacaatgagtcatcatcacttactgtttatggacaaataaacgtccatcaaggtagccatcaactcgtgggtagggacaaggaaggctacctagaggaagaaagggtgagtagaatctctccctctctctctcttttttaagagacagggtctggctctgtcatccaagctggaatgcagtggcttgatcatagctcattgtaacctaaacccaagtgatcttcttatttcagcctccctaagcagctgggactacaggtgcatggcatctggctaattttctcattttttgcagataagtggtctcgctatattggccaggctggtctcaaactcctggccccaagcaatcctcctgccttggcctcccaaagtgctgggattatggctgtgagccaccacacctggccaagtagaatcttgaagacaggaaagatctggatttcagaaagttctgaagaaggcattccaggcaggggaaacagcttgagcaaaagggtggaggtgggagagtgctgtagagtcaacaaggagtttgactttagcacaagatgcgtgtaggagaaggggaggtgaagctggagagaactggggccggagcatggggggcatgagttctgtgttaggagtgtggggctttaggagccacatcaggttttagaacaaacaagtggcttgacaggagagacgtgttagggattatttaattaaagtcagcaagtaggtctgaaagggtatgaggttagcaggaagtggctgtgatgggcagaggctcagagttgcatggaatgaggacactttgggtataacactccaagggccacaatgccactcccctctccacccctcagccttgggttatttttttctggcttcttcccctgtcgctagggttaaggagtcccttgggggtttcagatgaggctgggatagagttttatcactagagtgccgggcacggtggctcacgcctgtaatcccagcactttgggaggccgaggcaggcagatcacaaggtcaggagaccgagaccatcctggctaacactaaacatacaaaaatacaaaaaatacaaaaaattagccgggcgtggtagcgggcgcctgtagtcccagctactcgggaggctgaggcaggagaatggcgtgaacccggaaggcggagcttgcagtgagccgagatcgtgccactgcactgcagcctgggcaacaagagcgagactccgtctcaaaaaaaaaaaaaaagttttatcactagatcattaacctctggcctaggtcacctccggcctccttttgggctaggtgggcagttctcggaccctcccccaccagccctgctctgctgacctagaacctctggccctggagattctgatatgtgtatttgtggtctcttctcgggcatctcccaggccactgggagagctggggcctagagcgtggggtgggtggaatcctgagggcagagagtgtggaagaatcttacaatggcagctctagagggaagcctggatatgtttgtttgacaaactgagacccagagaggtaacatgacttgaggtcacacagcaagtctagggcacagtcaggactgaaagccaggactctggggaggctaaagcgccctgaggtttagaccatctggttcatgtagagaatggagagggtcagggctgggagctatgggttcaaatcctggctctgccattgactgtacttttgtgacctaagaaagtcacttgagctctctgagtctgtttcctcaactgttaaacgggacaatatctaccttttgggttgttgtgaagataaaaaaacacacccatagcacaggtcgtggcacacagtaagtgtgccaatacatgtcagctagtggtatggtggtgcaatagtaggtgcctaataaatgttgaatgcattgttgaacatgagttcacacgctaacagtgagattgtgagactcagctttcccacgtgtaaatcaggactcataatcagtccctgtcctgccacttctttacagccccggtagcaacatagattaaataaggtatgtaaacgttcaagcgcggagccgtctcaggtcaatgtttactcagcccagggcaattcctctccaagtcctactctgcgaaatttcacgtcagcttcactaacttctctacattcccagatgctccccgggaaccgggggttggggatgtccctcttttctcaagcccgccgagctgaggaaaaacggggtgggaaagcagagtgtgtaaggctgaggaggtgagccagaggggggagggagagcaggaataagggcagtggggagaatgcaggtgcacggacgtggtgtgggtcgagaacagggtccgcatcgggggacttggatataggatgcagtgaaaggatttggggagcagtgggagaggtgagggcgctgcgatccgggaagaatcaggaaaataaggagccggtaggagggagtggagatcctcctcgcggagagctcgccgcggcgcagggctcccagctccccgcagctgcctccccgaacactcaccctcccggttccgagaacgtttcccggcccgagcgcccggcccgcaaaccgggaggggaggggaggggaggggcagggggggatccgcagcccgggattggccgccgccccgccagccggtgacgcgaggcgggcgggcccctttgtgacgtcacaatcagctgtttgaacgttccaatttgtgccgtgagccccgccgcagcggccgcacagactcaaagccccgcgggcgagctcagcagcccggagcgaccgcggccccgccgcctcccccgcgagtcccggcgatgcggcccggcctgtgagcggccggcgaccctgggacgccccgccgcacaactacctcaacgccgtgccgcccccctcccgcccccaggtgagtcccgacccgggtgggcctgggggctcccctgccacggacacgccctgcgccccccgcgcccgggcctttgtctgtctccgccggcggccgccggggccgcgttcccggctcccgattggttgccgcacgcccggtagaccatgacgtcgttctatttgcatatgacattgagacgtcaccaaggccggtaccgcccccacaggctcgggtcgcttgtcctcccgtgacccggtagccgctgtgtcggggctgggccctgggtgagacgctgcaatccaaagggggctgcagggggatcggcgatttcctaggcttatccaggggctggggtcaggcctctgatcccctactttctctttgcaacctgagaaggagtcagacggcgctgctgggcctaggttgagggggtcgtcaggagttcagggctgcatgggactccaggtggttgggacagcaccagatggtggtgggatcccctccctccggctccagactccgcccccagggactaacagaataacatcctcctaatccctgatttgtgtgcagcgccttagctgatgtcactcctagacccaaaatgaagggtcttagaccccagtgcatggaaggggcaacaggcccagagaggaggattagctctctcgaggtcacataaccaattagagtcatgctcactgagtgacagatggattattagccaggggcaaagacataataggggctcagtacaagtggtaagatacacatcctccttccactggggacccgatcttgggctcagccttatcacggtttgataggctcctaggtgtccttactcctggacccttttccagggaatctctggagattggttcaccttttgtggtcctgaccccttctgtcctcactgtaccttgaagtcctagagtccaataaaatcgctgcctcccagctgtttggatcacagagaggtgagtcattggctgcctcggggtgtctccagggctgatgttggggtggagggtggggtgagggttccctctattggccctttaccttcccaacttcctaggtcgtcagctaggaagggcctgacctggcctagtgcagacaattgcaggtgttttgctgctccctcgtcacctctgcccacagagagtataggagaagggataggataaggagagtttctgacttaacaagtggatgggcctagaggctgaaccaggaactccattcctgctgggagtttgctcaaggatgggctgggggtaggggtggcttagggcacaaatgctattctgggcagagctgctgtagttattaaagggaatggttctccctggagcagaactgggaatgtgagaaccaggaagctggcagggctgggaaaggaaatctgggaggctccccaagtggtcaggagagggggcaggcactggctggctggtgactgctttcactcctggctgtcactgacttgctgtgtgacctcaggcagggagcttttcccctgagcctccctcccctaaacctatctgaaatttggggaggcacagtgcaggctctggtacacagtgggtcttcagtaaatgcatgctaaatcttggtgccagtaaccccagacccttttgtagctaggcgaggggtggtgtggctaggtcaaggtctttttcacctccctgtacccctgcatcattgtattcttggggattgtttgctgagtctttcctgactgtgtacactctggactggatgcacagtaacgtgggactaggtctgccctgccactatctagccatgtatttttggatagatttatgtcttctttctgatcatcagattttaaaatgggctgggtgaatatgatggtccctgaaacagctcttaacttctctttcatattccatgaattagtaggttcttggaaggaggatgtgcctcatcaaggcctcgatattcccttccttcaagaggggccaaactttctgggcttttggtaatggagtcactagctccctgtggctacatatgggttgggatacatgaattgtgctgggtggacactagttgggggtggccccaccttcttaatccctgtagatctcccacccccatcccaccagagaagccagcatcttaagcctactgtgagtctgcagatgtggaaatattctcagggtatggaagtgaggtgattctgcagcaagtgtgaaaacatttctagggaatgggggaggtagcaataagcatggcaatactgcaggtggattagcagaaagaggagaaatgccttcagggaagtctggacatgcccccaggaagttctacaggaagtgtggaaacacccttagagaatggtgacaagtgtctcagcagcaaaaccgttgagcatctttagggaacaggtgtggagagtcagtcaggcttcaggtactgggggagtatggccagcagcccccagccaagctctagtcctgaggtaggctggcatggggagggggtagatctagagctaccaccttggtgtttccatttctgcagtagggggcctccctcttcatcttcacccagggaaggattggttaagggcttacctcggtctgggtccaaccctcagtgctcatccttaagggctcctgggaactgacagctccctcccttcatcatcacctcccactgacctgctgtctcactgagcccaagcaacctgatcttcctcctacccctggatgctgcccttgaacaggagcctgggaaaagggggtcagaggggggagggcctgccggcatgccatctttacacttcatatgacagacacaaccgaggtgtgccaaatcacatggtaagatggtagcagttctatgggatttctgctggccagtgcttttcaaaccacacaggctccaggagtggttcttaatctctggggtcaaagattgctgtttaggaaatcatgatgaaaaccaaggtcctttttcccagaaaaatacacatggaccatgacccctggccaccaaattgaaaatatcaaattcagacagacacccagaaaaggcaatagaatatagtgattctgggtgctgcctctggaatctgattgtgtggattcaatcccacctttgtctcctactagctctgagactttgggacagttaacttctctgagcctcaatttcttaactgtaaagtaaggacagtaattatccacttcctgtagttgttgtgaggattacatgaggtaatataggtaaagctgcttagcatagtgcctggaacataaatgttagctatatcattattattattttgagaccaagtttcgctctgtcacccaggctggagtgcagtggcacctcgcaggttccagtgattctcctgcctcagcctgggattacaggcacctgccaccacgcccagctaatttttgtattattagtagagatggggttcaccacgttggccaggctggtcttgaactcctggcctcaagtgattcacccacttctgcctcccaaagtgctgggattacaggcgtgagccactgtgcccggcctagctatattataatgataacaagcagacaatatgggcaatttcctccctgcctggagaactcctatttactcctcagagtgcagcttggatgtccaattctctggagaccttccctggcagagctgtgtcatgtgtcactctatgttcctaaagcaccctgtaataataactaatttattagtttgttgagtgcttaccatatgcccagacagttctaagcactttataagtgtttagctcatttaattcttcctcctccatctttttttctcattcaataactttggtatagctcatttaattcttattagagcctggaggaggatactattattagcttatttaattcttataagagcccggaggaaggtactattatcattgtcttttgacagatgagaaaactaaggcacagataagttaaataactttctaaaatcatacagaagataaaaaaaaaaccctggatttgaatgcagaaagcacatcttcccaaagcgtccgcacacatccccgttgtgtgtacccttctccctgctctgggggtgatatcttctggcctcttccccaggccaggagtggggtgaacctcaatcagtggtggctctcacgtccttctgattcccaggtttttgcactgccatagggcgcccccgtgaggcgcttcgccccccaccatgttccagcgcctctccagcctcttcttcagcaccccctcgccccccgaagaccccgactgcccccgcgccttcgtgtcggaggaggatgaagtggacggctggctcatcattgacctgccgggtgaggcctgggtctgtctcctgggcctgtgaagtcattctaagggcagatggcctagcagcggaggggaagggcgctgctgggggacgggggagtcccccaagcctactggaggtggggtcacggggccccttcccatgaaagccggggctctctcctggcggcccaggagaggcccgcacgtcaggtcccctagggcagcagggcgagacgcctggcccgtgggtgccccggggcgctgcggacgggctgcgggtctgactaacgatgccctttctctccccgcccccttgtccggtgtgtgtgtgtgtgtgtgtgtgtgcctcctcgctgctcccctcctctgcacggctcccatcccgcgccccgtagacagctacgcggctccacccagccccggggccgcccctgcccccgcgggccgccctccgcccgcgccctccttgatggacgagagctggtttgttacccctcccgcctgttttacggcagaggggcctggactcggtcccgcccgcctccagagcagtcccctggaggacctcctcatcgagcaccccagcatgtccgtttacgtcaccggcagcaccatagtgctagagcccgggtccccttccccgctcccggacgcggccctgcctgacggcgacctcagcgaagggtgagcgggccgggggcggagcctggaggcccagggagacggatcttggaggccagggtccaggctaggaggctggggtagtggggccaggagcccgccccgcgctcgagggggtagcggccttgggagggttgcctttgagacaaagtggggggccggtgggcctccgggcgaggctagaagcgggcctgaggacggaggggcggggcttgagagggaggggcgtggccaagaggctggggccggggttggaggcttgaggagcgtggctggagcgcctagggagtgggacttaaacagaaaggcaagggtggaatagggggtgggggtccagtctcccccgaggtccagtttacctgttaagggctagaaccgaggaggcacctccgggttggtacccacaagaagggcgtcgggcaccccaatctgaacagacacagaactgagccgaagcaagggtgggagatggcagcgccctctagaccccccgcccagcttacccggcttgaccgagcctggctctgtcctcacagggaattgacgcccgcccgccgcgagccgcgggccgcgcgccacgccgctcctctcccagcgcgggcggcgctgctggagaaggcgggccaggtgcggcggctgcagcgggcccggcagcgggcagagcgccacgcgctgagcgccaaggcggtgcagcggcagaaccgagcccgcgagagccgtccgcgccggtccaagaaccagagcagcttcatctaccagccgtgccagcgccagttcaactactgagcgtccaccggccgcgccacgaaccccttgccgatcccgatccctgtcgggctcctccgactcctcgggctggacaccgaaacctcccttcttaaagcgtgtgaggttgggtgatagccgttccttccccgacaccctcaatttccccatctctgatcctctaatctgcctctgaacccattcacccttcaccctcactcctggtccccatacccagcatctaatcatccatgccccctactcctggcccctccatcctttcttctctggtccccatccctgtctctccctttcacccttgccctccagtcctctacctctggcctgcccctatttctgaaagcttcttccagtccctgatctggctcattccccaccttcaactcccaccttacatgtctcacactatcccatggttggcattacactcactcctgttcccttattcttcattcccagtaattccctaccaaatggtggggaccctgagcccagctctgaccaggtagagcctgtgcagcctgggctgctgtcattgccctccagtaagggctcagggttttgcttttagtctccccttccttctgccttgggggcggtactctgtggagctgcttaggcctggaaaggtacagtatgtagaagaggactgtgagacgtgagttagagggagaagatggagggaatctagggaacgaggcagcctattggagatgcggacaggacagacacgttgagaagctgcagggagcagggcaccaagggagtgtgcactgtgcttgctcagagaggccaaaccctgctcccaggctgaagcctggagtctgcccccacttcccttttctataatccacccttctgcaggccctgaaatctgaagggcttagttagtaccttgccactctacccccaacacgtcacccgagtagaagctgggcaaggccctaccatcctggccgtctgttcacaagcccaaggtgctagaactagcttaggagacatgcaggccacagggcttctaggcagggaaagggcacacaccctaggtcagcgtgcagagcagtgatgctggaggacacaccatggggtgaagccatcccaaggctgacagctcagtcttcaccttgcctctggccttgtatttcacaccctgctcagtatggctagccagcagtcctgagtaggagtccaggactcccactgtctcaatctgcaaattgttcctatccaggttcagggccttcagggggcctcttttcattttctcccacaggcctctctttctttctaggttgctggggagaaatgggtaccctatgatccccctccccttctcctccagtaaatacctggaagagggaacctgaatccctgggggagacagaaggggcaggggccaccagcctccccttcttgtggtgagactgaattttgggctcagacaccagcaacagcctcttgggatgccctgagttgcttcccatttcctctttctagccgtccttttctagtgtgtgctcactcttcctaggaacttttaagacttcttggtacctatgaacataggtcctcccctcaccccaactctaggtttccaggcctcacagccaagctgaagcttggagaaaactctgcattcccatgagggcaaaggcagctgccctccctgaccctatagccccaggcctcatggggggtatgtggggaagggatggggtatccccatggatgctgggatgaggacagaggaagacctgatggggtctcctattccagggaataagccaaattaacactaaaaacggatcaaagctcccacgccagtccactagggccccagtagttgacagccttgctcctctcccaagttctccttcagaacctagttgcttttattcttccagctaccacttgggcacttcacagccagcctagggtcttcggcacctccaagagctgaatctccctccaacccttcttgcctactcctcactgccagctgggacctaggctcagtcctgtgtggtgcccatgatccttctggtgggggaagagtttaagttatagggcatttggctcaaattttaaaaggccttttgtttacctatatttctggaggctcctgtattctagaacccaatctctcacctgcttggttgcaaggctcatatttttttgtacctttcctatagattctgtagcatttgagtgtggcaatattttaattgtgtatagatttctaagaaccaacactactcagtctcctgctagtctgactcctgaagcatcagcccttgtcatactgtattgactgtgtacgtgcctttcaccttgagcatgcttcaggatttttttttaaaccacagaacttgaatacatgagggaaccagagttcaaagtcctatgcaaccttaggagggggttagagagtctgttttgattgatgttttctgaggccctagaggagtttgtatcaatttgtgagtattaatgtcagtactaccagcactttgccaaaactgtcagagggacccgtttctagagtgagtcccagttacatcaaacagtgacttccagttattccccagtaagtctgagtggttccttcaagctgggtgtctttccagcctttgccagtctagccccagcagggcaccgtgtatgaatgcagtttggtgctgttttagagtatgcctgctccccagccccctgcctggaaccctctgagcaacttgctctgacctataatgtcttaggtgcaacacggaccccaccagagctcttggatacccccctagatccatgtggctttatgtgaggggactgaatgcagacacaccatagcccccttctactactttccctctcgccctgccacctagttccacatggaaccaacaagttgagtgcatccctgttgggtgttttgtgttgagactggctgaaatgaggagactttgaccatgtgacgtgtcaacagactcaaggagacaaccacctcaactgggtcatgtggcatgcctgtgtatgtgtgtaacagaattctgattgttagactgtaatgctattcctctatgggagaaaaaaattaatataaagaaaaacaaataaaaatatatttaaagcacatgatcctttctgcctgagttgagcttaagtatgagaagcatcttgtaatcttaagcacagtagtggcataggatattatgataaagctggccttggttctggtgtgtgtgtcatatgggagaggaagaggggagataagcttactgggaacagagccagacaatggggtctgactcataaatgactactgttagaggatccttacaatgcaagacacatacatgaagacagctgaaatagagatgagaataacagcatgacagaatgaccaaactcatccttgtggtctcaggcactgggttagagcaagggcaagtagccactggaggggaaaggatgaagtctaatcctgggggagatgcagcagaaggctgaagcccaggctgagacaaggccagggccccaagcatcagagtctcctcaagttgcaggtagggtggggcagaagcagctggctttggagactacacacattttgaagaaggacagccagagtgaaatgtagtggacatctctgaaatatacagcacaaaatgacccctttaatttgggagctgctctgtctaaccacagaactaaaggtggaaacctgacctaaactggactagatttttttttttttgagacggagtttcactcattgcccaggctggagtgcaatagcgcaatctcggctcaccgcaacctccgcctactgggttctagcgattctcctgcctcagcctccccagtagctgggattacacgtgccaccatgcccagctaattttgtatttttagtagagacagggtttctccatgttggtcaggctggtctcggactcccaacctcaggtgatccacccgcctaggccctccaaagtgctgggattacaggtgtaagccaccatgcccggccctggactagattcttgatgctggcacaatcttacaggccagtttgggcttacctcctgcaaggaggagatgtcagcacaattgttttggagcaatccaccatgcaaatggaggagcagatatgtgacatggtgaaaaagtgccatctcagctgctgacagcttcctgtccctagaaaatcctgggtggccattgatctctaagttggttttgttatttgcatcaaaagaaatctgagcaatatatatcaaaatacctggcacagtgctgaacagggctagtttcttcaaagccaagaatgaggtgagggagcaagtatgtacattttcctcaacttgccaggcgggcatctcaggttcaatgaggactagataggaattccatccacaaggctgtgtctgcttagttaaggtccaaagaaagagctgatcacccaaaaatcccttaccaataacataactttatgttctatgacaatgacatttatttaacacgttatttcacattgtacaaatccttagattctctttattcactggtccatttctacaacaaatacatccaaaacactatataataaaattatttacaacatttccaaatgagaagattgcttttgcccccactactgctattcacacacagtacttccacggcacaatacatcattaggagatctaaaaatgctcaccctgtactctaggctgcttaggaaatgtgaaaactagtaacatttataatggcattagctcctttcaatacaagacaacattttagaaaccttgaacttcaactcgcaacaccaaaagggctcaacagtcctgctttccccattgcactttatgaaacaggttgcagggactaggaaaagggccacattattaaaattactaactgtacagaaattgatttaaaaaagtcacagctcaaaattgctctttgtaaaagtcacacacatttccaagtatcaagtcgcagtcctgcttgtttacttggattttcttcgcttggattgcaccgcactggttatgtctgtgggggaaagaaaggacatgttcagtggaagtaactctttacagcagtgccctttagacagtccacaacaagcagggcagacctaaggggagccctactcaactcagaatctgtctaaggggtgctctgaatggagagagtcacaggctttgcttgatgacttacgtgggaagagggtgtggtcctgcattgggcagaattggaatgtgacagaggtggtggcgatgaagcacactgactagagaaagtgcagggtggagagagcctttgtagctgggcaattcacccactgtttccctcaccagttctcatcataaaacgaagtgtaatagacagactgacaatgcttttggtgagaaatcaacgagtaatgccataagcaaatgagtaaattctgttagaatgcaaaaaaaaacctgccttgggatcccttttggagccaagctattgtttcacagtaaggaaccatttttgtcatgctatagtcaaggtctaaacaacatgaccatgggccttggtcagtgagggtctactatggcccagccagttatatcaagattgtggaaggctgggcgtggtggctcacgcctgtaatcccagcattttgggaggccgaggtgggcggattgcctgaggtgaggagtttgagactagtttggccaacatggcgaaaccccatctctactaaaaatacacgaaaaactagccgggcgtggtggcgtgtgccttaatcccagctactcaggaggctgaggcaggggaattgcttgaactacggaggtgaaggttccagtaagccgatatcccaccactgtactgtagcctggagacagcgagactccgtctcaaaaaaaaaaaaaaaaaaaaagactgtggatacatacagtcatgaatgcaattcagaataagcaacggcctgctctgagcccaagtgagcctgaaggcttcatggaggaggtgggaactgagtgatttacacacagaatgacagtgacatacagggaaatgactatgttttgattcctttagtttctcttgtactatcagtgttttaacttaatcttatgccagacttaaactgtgtttcttaaaaacgttttggccaggtgtgatggctcacccctgtaatcccaacactttggaagactgacgcaggaagctcacttgagcccagaagttttgaggccagcctgggcaagatggtgagaacccatctctacaaaaagaaaagaattagctgggtgtggtggcacatgcctgtagtcccagctactcaggagaccaagtgggaggatcacttgagcccaggagttcatggctgaaggagttcaaggctgaagtgagctatgttcatgccactgtactccagcctgggtgacagagaccccatctctatttaaaaaaaaaaaaaaaattctacacaaagttatggcagagtacagtgaatagcctgaagctctccaaaggtaaacacttctttagaatctcatattgacttcaaaaggtcacctttatttcatattctggttttaatatgaaaataatgttctaaaattacttctcatcaaggagaaaaaaaatgcttctaatatatcaatacaaaagatgaatcagatttacccatttctggtaactaggctgaattttctgatactgcatgttaggttgtattcaaggcaaattttcctttgtcttttgtatcataatattttgtgaacccagactctaataaatatgtagattgtaaggaaaaatttcactactctgttagctaaggtgactgctaagaagtgaggcctaggccaggcgtggtggctcatgcttgtaatcccagcactttgggagtctgaggcgggtggatcacctgaggtcaagagttcaagagcagcctgaccaacgtggagaaaccccatctctactaaataaagaaaattagccaggtgtggtggtgcatgcctgtaatcccagttactcgggaggctaaggcaggagaattgcttgagcctgggaggtggaggttgtggtgagccgagattgcgccattgcactccagcttgggcaacaagattgagactccgtctcaaaaaaaataaaaaaataaaaagaagtgcggtctagatgaatttccaagaggtgcccagtacagtaatttcattcaagcctctgttggtggaaatttcagtatgtttgtcttctcaaaggtcatgtttttttttgtgccatgtggtagaatcagtctttctgatttactcattagtcttttactaatcagaagacagttaatctgccaggatgttaataatggtgttctttattttaattcatgtaaattaaagagtctcacacagcccacataactccctaaaatcaactcttcaggtccaaatctcaagcgttattttcactgcagcaaatttgtcatttgcagtaaaaataggcagggtttttgtcttgacagtgttcatcctcagcaaaacattcattaactaggtcaactttggaagcttttcccttgttgtgatatgaaggatcaagtggtatgtctgagaaacatatgtggctgggaaaagaagtgggtagtggggtgtgggggagaagcaacctcaggctccccctccttccttgcttgttcccatttgtcactgctccgaagcacccaatgaactggtaggttgcctctgagcgtgaatcaatgagtggggtcaggaataaacaaatgacttgtgctagaaactgcaaaaaaacccacaaacacaccattaaaaaccctcatcttttggatactgtggttggtggggagaaggatgtaaactttcatacttccatgaggaaaaaaataaattttaaactgagtttgaagtctctatcaccttccctggataaatccagtcaatctgagacatagagcaaacctcagactcaacatgtctaaaaccaaacttgggattttcacctccaacagtgaggtcctttgccactgttccccatcatgtctgaaaaaaatctgtctgaaaaaaacatcttttgatgagtttttttgttttggtagttgattttctactccctccaaaatgttaccacttttactactctaatgaataggcaaatcacctttttttttttttgagatggagtcttgcaaattacttttttttttgagacagtctcggattgtcgcccaggctggagtgcagtggtgcgatctgaactcactgcaacctccaccccctgggttcaagcaattctcctgcctcagcctccctagtagctgggattacaggcatgcaccaccacgcccagctaatggttgtatttttagtagagatggggtttggccatgttggccaggctgatctcaaattcctcacctcaactgatctgcccgcctcagcctcccagaacgttaggattacagaagtgagccactgagcctggccacaaattactttaaggtaagaaattctaggtaagtgatgtagaggctaatgatccagtcagggtgtacctcagactgtgattggcacgctgttcctaaaggctgcctggcctgactgtgaacctaccttcagttttttaactatcagggattttacaaaattagtgtctcttaacagatagacaaatagttcaaactctagcagtgtagtcaaatcatttatatccatgtcttagaaccaactgggtggtaaagaactgggtcaataatagtcttttaagtgactgtccaactatgtcactgggggaacatttaaatttataacctaataaagggatttgtttttcagcctggttgcctcattttgaccttaagcaaatttgaccaaatctacagtacaaggctctacttaatcctctagtatgtgacctctaccatccaaggagctttagaaatggactttgaccttgctcacatcattgtgcctttcactgtactatttctatccgagacgtctaagtaattgtaaaaaattctggaaatcggcgagatgcggtggctcacacctgtaatcccagaactttgattagcagaggtcggcagatcacttgaggtcaggagttcaagaccagcctggccaacaaggcgaaaccccatctcttctaaaaatacaaaaattagccgggagtggtggtgcatgcctgtagtcccagctattcgggaggctgagccaggagaatcacttgaacccaggaggcagaggttgcagtgagttcagatcgcaccactgcactccagcctgggcgacaatccgagactgtctcaaaaaaaaaagtaatttgcaagactccatctcaaaaaaaaaaaaaggtgatttgcctattcattagagtagtaaaagtggtaacattttggagggagctctccagcctgggtgacagagcaagactctgtctcaaaacaaacaaaaacattctggaaattttccttcacaatttgcatggttggtttcaaaatgaagctactacagtttcaggtggttactcttcagggttttctcccacgacattataaatgtatgttcacttgcatatctacagtaatacttctgttttaattcagtatatctttataccctgtgtttttttagacagtttcttcactggctgtgggtagggtggggctatcacctactttgttgtcagagggacacccagggctgctgataattacagattgctctgaactttccttaaattaacatattttcctggttccaaacttaaagctttgaacttcatatttttaactaccttttaaaaaaataattacctttttcccagttgaaaatataacaacaactattctaaatggaggagtaaataatgataaagcaagctagaaaaatcatttgtgtttttgtggcaaattcatcatgtcaggaaggaaaactactcatttgcatgtttgtaaacaacacatctgatcaggtgcaattttaaaaagtgatttgtggtagctaatttttgtgtaattataagtgacccaaccaacaaaaacaatggaccaaagaatgaccaaaaaccatgtgggccttcctggacttgcccagaaatcatccatcccacctgctctgatctggcagtctggcaggccttggccagcatgatgtaagcaaactcggctctcgcagcaggagcatgattaatgtcactggttctccaacaatacaaacagcaacacttttaattacaaactgctcatagtgtttctcagcttcagagattttcatgaaaaacacagaatgtctctgattttgtttgcatatgatatatatgaccaaactcttattaaatgcaaaaagaagccctctttccccctcaaaactttacacagtgctgattctgcaggaagatacttcactcatatttcaggtacccagcactgcatatgtccccacatttgaggtgcatccattttagaaaccagcttgatatttggtgatcacattctgggtatgggtttaaatacaatcacagtaaattattttataacttggttcacatttttggatacaatatacaggccaaaaatatgcataattattctttaatttggctccaagagctttaatactgaaaaaccaaaagagctacagtactcatttctgatttaaaaggtaactgtgatactacaatatatattttttggtttttgtcccacgttcctggctcacagctcctataactcttgtaatttcctaagtgagccatcttttgttaaaatatttggccttttgcccatggttcctgaaacagctctgaggttgagttgatcacaaatggccaactcttttatcaatcatgcctatgtaatgaagccccactaaaaacccaaaagggacctatctccccttccccttcttcctctatacaaaaaaaaaaaaaaaaaaaaaaaaaaaaacaacccgcaaaacccacaaaaggactgaattcaggggcttcccagaaggtgaacgagaacacatctacctgctaagagggtggtgcaccaactccacagggatggaagcttctacacttgggatccatccagaccttgccctatgtatctcttcatctggctgttcatttctatcctttaaaagtggtccccaacctttttggcatggactgggggttgcgggggagacagtttcaggatgaaactgttccacctcagattatcaggcattagttagattcttataaggactacacaacctagatctctcgcatgcacagtttacagtagggttcacactcctatgagaatctaatgtcacctctgatttgacaggagatggagctcaggcagtaatgctcgcttgcccaccactcacctcctgctgtgcggcccagttcctaacaggccacagaccactaccaaccagtccatggcccggggattggggaccactgctttaaaatatcagggcatagtggctcacgcctgtaatcccagcactttgggaggcgaaggtgggaggatcacttgagcccaggagttctagaccagcctgggcaacatggtgagtcctgtttctacaaaaaataaagaatttagctagccatggtcatatgtgcctgcagtctcaattactcaggaggctaaggcaggaggcttgcttgagcccaagagtttgaggctgcagtgagtgatgatagtgccattgcactctagcctgggtgacacagtgagaccctgtctcaaaaaaaaaaaaaaaaaaaaaaaaaaaaagcaaaagaaaaagccggctgggcatggtggctcatgcctgtaatcccagcactttgggaggccgaggcaggtggatcatttgaggttaggagttcgagaccagcctggccaacatggtgaaaccctatctctactaaaaatataaaaattagctgggtgtggtggtacgcgcctgtaatcccagctacttgggaggctgaggcacaagaattgcttgaacctgggaggcggaggttgcaacgagccaagatcacaccattgcactccagcctgggcgatggagtgagactccgtctaaaaataaataaataaataaataaaataaaagtaaaaattaaaaaaaaactttcatatgggaggccaatgtgggaggatcacttgaggctaggagctcaagatcagcctgggcacacagggagaccccatctctacaaaaaaattaaaaaattagccaggcatggtgatgcacacctgtagttccagctacttgggaagctgaggcagaaggatcatttaaactcaggagttcaaggttacagtgagccatgatcatgccactgtactctagcctgggtgacacagtaagaacctgtctcaaatgaaaaaaaaaaaaaaaaaaatgccaagcacagtggctcacaccagtaattccagcactttgggaggccgaggcaagtgaatcacttgaggtcaggacttcgagaccagcctggccaacatggtgaaaccccatctctactaaaaaaaatacacacacacccacacacacaaattagccaggaatggtggtgcaagcctctgtaatgccagcaacctgggatgttgaggcataagaattgcttgaacctgggaggtggaggttgcagtgagccgagattgtgccactgcactctggcctgggcgacagagtgagactttgtcacaaaacaaaacaaagcaagaaaaaacgaaagaaaaagctgtataataaactggtaaacatgtttccctgagttctatgagccactctagcaaattaactggacctggttacgaggggttcatggaaactccaatttttagccagctagtcagaagcacaggtaaaacaacctggggcttgcacctggcattggaagtgggcagcagtcttgtgggactgagccctcaaacctgtggatctgatactatctccaggcagatagtgtcagaattgaattggaggacacccagctggtgtctgaggcagaactgatgacttgcttgatgtgtggggaaaaaaacaccttacatcttgtgtcagaagcgtgttgtgagagtatagcaggagaaactgagtctgtttttctactcatacacagtaacttaacc

SEQ ID NO: 452 - DNA, 26432 bp, Homo sapiens
catgttaccatttcaatcatggctaaatatattcatacacatcttatatgaatgtatataaatgccttgaaagattgcaaagacaacaaaagattaaaagtcattttctctatgtggtaggattaagggggcttttcactttttaatgttgttatgtttgttaaattatctacaattaagtgcatcattgtgtaatcagtaaaaaattaatccaagtagtcttccaattaaaaaattattattctatgattcatcctggcattttgatggccttatttttacatttatatttttgagccttctggattttagtttaaggacagttatagatctgctgttttctttttccagataactagttgttgcgacctttagcaacctaaatgtccatcaataggcatctcattaaataaattatgctccatacggacacaaataaaggaacaatagacaccaggcctacttgagggaggagggtgggaggagggtgaggattgaaaacctacctatcaggtactacgcttactacctgggtgacaaaataatctatacaccaaacccccacaacatgcaattttcctatagaacaaacctgcacatgtacccctgaacataaaataaaagttaaaaaacaaatacaggctgggcgcagtggctcacgcctgtaatcccagcactttgggaggtcgaggtgggcggatcatgaggtcaggagatggagaccgtcttgaccaacatggtgaaaccccgtctctactaaaatataaaaaattagctgggtgtggtggcacgtgcctgtaatcccaggtccttgggaggctgaggcagtgaaatcgcttgaacccaggaggtggaggttccaatgagctgaggtcgcaccactgcacttcagcctggtgacagagcaagactccatctcaaaaaaacaaaaacaaacaaacaaataatgctacagccacccactgaaatactatgcagacatgaaaaatgagagaatttgatgtcatgtgctgataggacaaatgctcacatcatattattcggtggaaaagcaaagtaggaggccaggcgcggtggcttacgcctgtaatcccagcactttgggaggccaaggcagacggatcacctgaggccaggagttcaagaccagcttgaccaacatggagaaaccccgtgtctactaaaaatacaaaaaaattagccaggcatggtggcgggagactgtaatcccagctactcgggaggctaaggcaggagaatcgcttgaaccaggaaggcggaggttgcagtgagccgagatcgcgccattgcactccagcctgggcaacaagagcaaaactccgtctcaaaaaaaaaaaagaaaagaaaaaaagaaaagtaggaaacggtttgtatatcatgatctcaggttagaatatatgtatgatgtatgtttccatttatctaccttcctgtagattcttaaatatttttctggaaagatacagcagaaggctaataatggttcagttgttcctgggggcggtgagaagaaagaaagaaaaaaggaaaggaaaattttacttttcattttattcctttgatagtggttgaattatttttcaatatgtaatgatattacttttgtttcataacaaacataaaaatcataagtggaacatgactttcatgtgtgtatggattttatgtcctcttaaaaattaggtggccaaacatggtggctcacacctgtaatcccagcactttgggaggccaaggtgggtgggtcccttgagcctaggagtttgagagcagcctgggcaacctggtgaatccccatctctacagaaaaatacaaaaatcagctaggcatggtggtacacgcctgtaatcctagcgactcaggaggctaaggcgggaggatcagagaggtcgaggctgcagtgagctatgatcgcaccactgccctccagcctgggccagagtgagaccctaaaaaaaaaaaaaaaaggccaggggcagtggctcacgtctgtaatcccagcactttgggaggccgaggcaggcagatcccttgaggtcaggagttcaagaccagcctggccaacatggggaaaccctgtctctactaaaaatacaaaaaatagccaggcgtggtcatgcgcgcctgtaatcccagctacttgggaggctgaggcactagaatcacttgaacctgggaagtggaagttgcagtgagctgagatcgtgccattgcacttcagcctgggcaacaagagcgaaactctatctcaaaaacaaaaaacaaaaaaacaaaaaaacccctaaaacttaaagtataataataaacaaacaaacaaacaaaaaaaccaggtgatcccttcaatcaatcagtagctgtctgtgttttgattgattctgttccctttgaaacttcttcccctaccagtgataatgcctaaaatgtattgattactttctatgagccaagcactgttctgcttatcaatgctgtagttatctaatattccttcgttagtaggtagcagggctgagatttatgcttagactttcaacccagaggatatggaacttttttgttagtttgttttgtgcacagggaaagaaggaacagagcctgtggaacttaacccctactccatactgcctttttgttaaacttgcagaaattggaagaaaacttcaattttatttatttattcagaaaatatcttctgggtttttgttttgttttgcttttttgagacggagttttgttctgttgcccaggacagagtgcagtggcgtgatctcacttcaagctcacttcaagctccgcctccagggttcaagcaattttcttgcttctgcctccccagtagctgggattacatgtgcccactaccatgctcagctaatttttgtatttttagtagagacggggtttcaccatgttggccaggctggtcttgaactcccaacctcaggtgatccacccgcttctgccttccaaagtactaggattacaggtgtgagccaccgcgcccgccagtaaacattttctgaatgtctggtatatccaggtgaagctgttaagttgcttcttccttttgtttggatattttttttggagggaggagtggtcccactctgtcttccagagtggagggcagtggctaaatcatagcttactgcagctttaaactcctgggttcaagcaattctcctgcctcagcctcccaagtatttgggaccacaagcacatgccactgctcctggctcctgtttcttgcttctgttaaggaaagcttcccggaggaagcacaaatgggtgaacctaaagtctctttgatgttgctagtgggactgaggagcaggaaatggtggctcacgggagcagcaaacactaaagctgtccttagctacgcgaaggacttgcagaggagtcttgctgataatggccacttcatcttggagttcatagctggttccttgcatgctggagatacaaagtggtcctacccttccaagagtttcagcttcctaaaaactcttgcagtaattctgccagtggatttattattaaagggaagcggagggtgctagtgtgttgccctcaataaagggaagttgagaagtggaaaaacacaattctcaaacttttttgttattcattaactcatgtcatcattttattgaactcattaatgagagaaccaataaggagacaaaagagctgctttgaggaggatttgagaaacaggaatttaaacagtcaataagaaaagaattgtcaggccaggcatggtggctcacgcctgtaatcccagcactttgggaggccgaggcaggcggattgtgaggtcaggagatcgagaccagcctggccaacatggcgaaaccctgtctctactaaaaatacaaaaaaattagctgagcgtggtggtgcacacctgtaatcccagctactcaggaggccgaggcaggagaatggcttgaacccgggaggcagaggttgcagtgagacaagatcgcaccactgcactccagtctgggcgacagagtgggactccgtctcaaaaaaaagaaaagaatgtcaaaattagattgataatttagatataggactggctaactttctagcacagtaaaaccaaaacccctttgtgattaacttctcaattgggcaataaaaccctatcattgtatcaagttctgcaggttagcctttacccaacaggactataaatgtctgtgcatttgtaagttgtagattatttatcaaatgtactgtgacaacaaagtcacattccctgggagagtcagatgagtgtcaagcaaacttattagaaaatgctctagaccaggtgtggtggctcatgtctgtaatcccaacaatttgggaggccaaggcgggtagatcacttgaggtcagaagttcgagatcagcctggccaacatggtgaagccccgtctctattaaaaatacaaaaaattagcttggtgtggtggctcacgcctgtaaccctagctacttgggaggctgagacaggagaatcacttgatcccaggaagcagaggttgcattgagccaagatcatgccactgcacttcagcctgggtgacagagtgagattccttctcaaaaaaaaaaaaaaaagaagaaaagaaaaaagaaaaaaaagaaaaaatgctctagtgtgatatataaaaaaatcctcaattttaccatttccaagtttcaagaaattattctttcacagcaaagaagaactcatctagctttagagataggctacctgggttacttagtaagtatatgaacttgaacaagttactagcttactaaccctttctgaacatcactttcctggtctataaaatgggaataataatactgtgatagagtttatttctcccatgtgaaagaacatacagctataagttggggttcactttttttttttttttgagacagagtctcactctgtcaccaggctggagtgcagtggtgcaatctcagctcactgcaacctccgtctccctggttcaagcgattctcctgcctcagcctcccgagtagctgggatcacaggcacgcgccaccacacccagctaatttttgtaattttagtagagatggatttcaccatgatggccaggatggtctcaatctcctgacctcgtgattcacccgcctcagcctcccaaagtgctgggattacaggtgtgaacacggcacccagccagagttcactttttcaaattattccaatcctggtctgagaatggttgattaatacgtgtagatcttacttctgggtttgtttgaccaatatgagattgggagtgagaatctgtacaaactgaagccagaccccacctagactggccagaatcagaagacaagccagggatttgagaagccacgctttgaggcctgggaaaataagatgggctaagaaaataaacagtcaagattttgagatatttatttggagggatagctgagcaaaaatacagtttaaacggtccacttgaatatcagcagtgaattgaccattataaacagaatgacaagtgacatgattattaataagtaaaatctaattttacatcttggtaactttgcaaacagcttcttgacatttgccttttactgttccttgtgctttccattatttcactttatccttatccacctctgagatgggcagaagaggtactattttgtttgactgagaacttcatacagtcaggagcttcatacaatcatttgcttctgtgtctctgcagactgaggccctttagaaagtaatttaaatagaattgagtttccattgtgcagatgaagtaacaggcccagcagcgaagcctgggcctgtgtcacctaaggtgacactgtggcagaactgtaactagaacccaagcctcctgtcctctactagaaggtctcctatgcccagcagctgtaaaggtttgtactgcagagttctaccttgcacgctctggggagtaagccttgcatacttcaggcctctatatatggccaggagtggagtctaggagagcgtccaaataaagcaccaggctgagttcaatgttgctgccttttggccctggagaaatgctggaaagccaggcatgggggtgcccgcctgtactcccagctaatcaggaggatgaggcaggagaatcacttgaacccagaagtttgaggctgcagtgagcaatgatcacaccactgtactgcagttctgagtcacagagacagatcccatctcactctctctctctctcttttttttttttttttcagacagaatcttggtctatcgcccaggctggagtgcagtggtgcgatctcagctcactgcgacctccgcctcctgggttcaagtgattctcctgcctcagcctcccaagtagctgggactacaggcacgcatcatcatgcccggctaactttttgtatttttagtagagatggggtttcaccatgctggccaggctggtcttgaactcatgaccttgtgatccgcccacctcggcctcccaaagtgctgggattacaggcattagccaccgtgcccagccaaatcccatcccttaaaaaaatttttagagatcctatctcttaaaaaaatttttagagatcccatctgttaaaaaaaattattaaaaaaatgttggaaagagaaagaccaaagagagccatgccttttaaagtcctccctaaagtgtcatcttgccagcccttccagtcattcacacaacaatcctagtcataaactggggccatgcttgccatcaccaggggtcaggaaaactggccagctgaacctgcttggatggtggaagcgagtgtgggtgttagagaaggagatgtcgggactccgtgcttgtctggaatcactccaccacactctggtcagtaggtataggactgacaaagcccttcctcagagatgctgggtcagtgaggagaccccagcttgtctcagccatctcaccccactcccattttagcgtctggggggaaactgagaatgaaagtgaccttgagtaaactaaacacagtttggctattcattatatgtattcctgtctgttcctttctcattctgtcctcactgggttgtttttgcatctgtcaaatagttctaggctttcctccccatcaaactcagccttttatggatttacataccagagacttccaagccacagttcagaagtgatttgtggagaaaggaacagtaaatttgtggagaaatgagcctgggaatggatgcagtggccaggctgtggagccatttatatctacttctccctctgccggaggctgtttgtttgagttggcaggaagccaatcagatgcactggatcagggtgtcctgtccaaggagacagggggctatttgtcttctctcatgagagagacagtcgtgggaggaggagggaagcgcttaagaacagggatggagtagatagggaaaagatagtcaatcagatctctcaagagtatagtcggccgggtgcagtggctcatgcttgtaatcccagcactttgggaggccaaggagggagggtcacttgagtccaggggtttgagagcagcctgggcaagatagggagaccctgtctttacaaataatttttaaaagttagctgggtgtggtggtgcacatctgtgcaccaagctacctgagaggctgaggtgggagggatcgtttgaacctgggaggtcgaggctgcagtgcgccatgatcgtatcactgcactccagcctgggtgacagagtgagaccctgtttcaaaagaaagaaagaaagaaagaaaagtatattcaaggtgagcttcctattattagatatggcccaagtgaaaacctggagcttgtctgaattggacagccaaggagagaggcagaagaggattagtggaaaaagcagaaacttctaggcttgactcaatgactgtattgtgcgtgatttggggcaagccaccttcctctccatctcctcctctagtaaatgttcagcatcctgaggtctccagttctgaaagggtatggttctttttttttttttttttgagatggtgtctcactctgttgcccaggctggagtgcagtggcacgatctcagctcactgcaacctcctcctgggttcaagcgattttcccacctcaagcctcccgaggagctgggattacaggcgcacaccaccatgcctggctaatttttgtatttttagtagagacagagtttcaccatgttggccaggctggtctcgaactcctgacctcaggtgatccgcccacttcggcctcccaaagtgttgggattataggtgtgagccatagtgcccagcctctttttttttttttttttaactcacagaacatgaaattatatggttttaataatgcaaagctacttccatggggctacagcagagagaaaataaggctaaaatggaacttaaagctcaaaacatttctacatggctgtttacaggggcaggtggagggagtcctccctctgcattaatagaaaacaaaaacaattgggcctattcggcattgttggaaatgttctatgtcttgatctggtgggtttttacctgtgtacaatatatgtacacacgtaaaaattcatttagctgtacacataatttctatgacttttttgtatgtaaattatacctcaatggaaaggttttaaaatggacttaattaggcccagcatggtggctcacgcctgtaatcccagcatttggggaggctgaggtgggcggattgcttgagcccaggagttcaagaccagcctgggcaacatgatgaaacctcatctctacaaaaaaatacaaaaattatcttggcgtggtggcgcacgtctgtagtcccagatgctctgaaggctgaggaaagaggaggatggcttgaacccgggaggcagagcagaggtagcagtgagccgagactgcgccactgcactccagcctgggtgacagagccagactctgtctcaaaaaaaaaaaaaaaaaaaagttaattagacgggtgtggtggtgcgcgcctgtagtcctagataatttcgaggctaagggggaagatctcttgagcccaggtgttcgaggctgcagtgagctatgattgggccactgcactcctacttgggcaacagatagaggccttgtcttaaaaaaaaaattttaaaaaggccgggcacggtggctcacgcctgtaatcccagcactttgggaggccgaggcaggcggatcaccaggtcaggagatcgagaccatcctggttaacacggggaaaccccgtctctacttaaaatacaaaaaattagccgggtgtggtggtgggtgcctgtagtcccagctacttgggaggctgaggcagaagaatggcatgaacccgggagtcggagcttgcagtgagccaagatcgtgccaccgcactccagcctgagcgacagtgcgagactccgtctcaaaaaaaaaaaaaaaaaaaaaaaaaagacttgagagaaagtgaatttccatccaggaagattaaggatccccttctgagtactttaaaaaggttatctatttgtgctgagggaagaggtagaatattagggaaccaataagataacttctcttttggagaggtttccaaagtccttctgtcctcagaaattctcatgttcctccccagggacagaaaaatcctccttgctgtctaatctccatctctcctattgcaatgctagccactccctctgccctcatggagcccagcctttcccctggcctcagacaaaatctctttagagccctgtaatttggagtgttgagagagattccatttcaaccttttcaccatccgttctctgcccctcaccctattctcttcttcttggggatgtcaattcctgttctgagcccgccccccacccaggcccttttccggtggtatgtgccagccggtcctgcatcccacatccccagctgttgacatttcattgccattacccacagaataaagaaaggggccctgttattcaacaataggggaaaagacagagacaatgggaaattgtgcttccgatggggtggggactgagaaggaaaggacagacagacagacagacagggggttgtacagaagaggtccggtttcttgaagcagctggaagtcctggatagttcccacctgaaagtctgtttgcaaaggcaatgcgcactcaggcaccagagggcagaggtgagtactctgttgtggggagaggggagatggggatgctgcttagatgaggcgcatatggaaagggaggcagctcgagcttggcagttatggatctttgagccacatttagagttcatccccatccccatcagtccaacaccttcatatccaccgatcaatctacacctctctggttcaaaggcatcgagaaaaaatgaagcacctcactttctgcactcttccaggtcatcattcctgggttgctccctttattccactccccttcatgggttcccagccctcatcccaaccccagcatcttcccctggtcccggaatagtgatttccacagatatagtcacagggctggacacaggtctcttaacatggcttagtggactgatgggggtgggggtcgttcttggcaccttggcttcttctttgagcacaggacagaagcttttcctcaaaggtgcaaaaggagcaactgtgttgaacaggggctcaagttccagggttttaaggtgcttggaactcccaggagcctggcaaaccttcatccagaacctcttcctcaagcaagacaaaaagctgctaagcactgctccctccgtctctgtgaagagaccagcttctaacaggtaggcaatgggctgctgactactctcattttctgtaagaggtatgaagagcatgtgtgtgcactgttttgaaatgcagaaatatagattagtgattaagcgcttgagcctcactgtcagatctgtattcaaatcccagcaaacccttcctcttactagctgtgtgacctcatttcctaaaataggtgcaccttggtttcagcatgtgtacagtaggatttataattgtttctgcctcaggattgctgggaggagtaaatataaaaatatacatgtaaagtgcttagagcagtgtcaggcacattcaattttaaacgtgttcatttgagctatcattattgttggtctcagtcaatctcagtcctcacgatcattcttacttatcaagttctcctataaagaagtggttctcttgctcatgttcgcatcccagatactttcacctttaaccactgagaagttttctatgcataacctccgtttctcctactgcaaactggtctttggtcctcatttgcagaaagatggagctccattctttagatttctggcaacttctcagggtgcttcctccatctccccattccccatcccatcttcccatgaatccttaatgtaagttcattaaaccatacacacttatttagcacctactatgtaccagaaactatgctgggaactggagataacagctaacacatagacagcacttattacattccagacactatttcaagcattttgcgtatatcaatttatttattcctcacaactactcagtgaggtaggtgtgctattattccccacatttcactgatgaggacactgaggcagagagaggttaaggaacttgtgcatgataattaacttatgcatagtcatgcaattaggaaatagagtagccagatttggaaaacgaatgcagtgaagtcaagaagtcttcattttttttttttttttttttgagacaaggtcttgctctatcccctaggctggagtgcagtggcacaatcttggctcactgcagcctccacctcctggtttcaagcgattctcctgcctcagcctcccgagtagctggaattacaggtgcatgccaccacgcccagctgaatttcgtatttttagtagagacagggtttcaccatgatggccaggctggtcttgaactcctaatctcaagtaatccacccgcctcagccttccagtgttgggattacaggtgtgacccactgtgcctggcccagtccaatttttttttttaaggtcagagggataagaatgatacaataggtgctggaggcgatggctcacacctgtaatctcagcattttgggaggccaaggagcgtggatcacctgaggtccggagttctcaagaccagcctggccaacatggtgaaaccctgtttctactacaaatacaaaaattagcccggagtggtggtgggtgcctgtagtcccagctactcaggagaatcgcttgaacccgggaggtggaggttgcagtgagctgagatggtgccattgcactccagcctgggcaacaagagtgaaactccctctcagaaaaaagaaaaaaaaaaaaaaaaagaatgttacaataaaggaggagctgggtgcagtggctcaaacttgggaggctgaagtgggagcattgcttgagcccaggaattgggcaacctagtaagaccctgtatctgattaaaaaattttttttaccgggaggtggagcttgcagtgatccaagatcgtgccactgtgctccagcctgggcaacagagcgagactccatctagaaaaaaaaaacacaaaacaaatttaaaggggggaataactacagtactgaaatagataattgcatttgaagtagtttttaaaaataactttataattttatattttttaacttcataatttctgtatctatatgtggatacatattatgttcaaattcacactgttaagtttaggtgctaataaaagtacttgtaagacaaaaaaagtcctggctgggtgtggtggctcatgcttgtaatcccagcattctgggaggccaagacagattacttgagcccaggagttcaagaccagcctgggcaacattctgaaactccatctctacaaaaaatagaaaagaaaaaaatttagtggggtttcatggtgtgcgcctgtagtcccagctactcaggaggctgagatgggaggatggcttgagtctgggagggcgaggctgcagtaagccatgatcataccactgcactccagtctgggcgagagagtaaaaccctgtctcaaaaaaaaaaaggtccgcagtccagcagatcacagtgcactacagtgtggcaaactgggggtgggtaaaggtttcccaaaggaggtgaggcctgtgcgaccaatgcaggcacaaaggaaaggaaatgaatgcaaacttggactgtgtgggaaactgccagaaatccagcatgtcaggggaacagtgcagaggccaaagtggttaagaggcgaggcggggaccatgctggaggtgcagggagcaactggattatagacagccttggaagctgtggttatgagattggattttatcctcagggcaactgggagtcactttcaagcaggagagtgacaaggccaggcacggtggctcacgcctgctgtaatcccagcaccagccttgtcaacacagcatgaccttgtctctactaaaaacttaaaaagaaacaattagctgggtgtggtggcacatgtctgtagttccagctactcaggaggctgaaatgggaggatcacctggagctggaagttaggggctgcagtgagccatgatcatgccacgggactccagcctggaccatggagcaacactctgtctcaaaaaaataaataaataaataaataaataaataaataaataaataaaataaaaaagcaggagagtgataagatcattttgactctggcttcaagatggagaatgggtgttgggagaggatagagacgagctggcagtccagatggcaagcttgggaagtagcacttgtgatgagggggacaggtagagaagatgctaaattagtacctgcaggctgagaggatgtgacagaggaagagagggagaggaaggggattgctactgccttcttcccctcatcaccttcattttgtcaccaaccccttttctctgccccagtggcttccagctggacagtcccttctaggatctctgatgggagttcacccacaaccctgctcttccccacccttttgccccagtcctaagaactgcccactctttgtgccctgcagacggtgccgggctgaccccccatcatgccaggctggctcaccctccccacactctgccgcttccttctttgggccttcaccatcttccacaaagcccaaggagacccaggtaagaccccagcccaggccagaatctgggggaggcttggggagactgcaagggtggggaaaggggaaagggcagttgttgcaggtacccagggactgaaagtcattgctgagaaggcaatggaggagagggttggggggctctggagaaagcatttggggagcagggtctgatgggcacttggggcagtgaggattgggggttcctgccactgtggccccctctgcccagcatcccacccgggcccccactacctcctgccccccatccacgaggtcattcactctcatcgtggggccacggccacgctgccctgcgtcctgggcaccacgcctcccagctacaaggtgcgctggagcaaggtggagcctggggagctccgggaaacgctgatcctcatcaccaacggactgcacgcccgggggtatgggcccctgggagggcgcgccaggatgcggagggggcatcgactagacgcctccctggtcatcgcgggcgtgcgcctggaggacgagggccggtaccgctgcgagctcatcaacggcatcgaggacgagagcgtggcgctgaccttgagcttggagggtgaggcccttccgctcccgccccattcctgtgtagcagcgggtccgcctcgcctgggtctcccagggctccttcccagtatctcctccgcacccctggggaccccagctccctctcccaggccgcgccgcccttcctccccctccgctcccatccgctggccctccccaggatccccgccaccccctaggtgtggtgtttccgtaccaacccagccggggccggtaccagttcaattactacgaggcgaagcaggcgtgcgaggagcaggacggacgcctggccacctactcccagctctaccagggtgagcggccgaacccagcacttcccaagccccgcggagctgtctcaggggcccgagagagggcgccaggcgagctcagtctggctcctgcctatgacgcctcttatccccgacctccgccgtctcccgccagcttggaccgagggtctggactggtgtaacgcgggctggctgctcgagggctccgtgcgctaccctgtgctcaccgcacgcgccccgtgcggcggccgaggccggcccgggatccgcagctacggaccccgcgaccggatgcgcgaccgctacgacgccttctgcttcacctccgcgctggcgggtgaggcgcgggacgaaggcagggtcttggggaggggtctgaaaaatgtgggggacgaggagtggacctcagcttgagatcagggcagggtctccgggtccctccaaggcaccgcccccccatcagcccgcccgcccgcccaggctccagctcacctctccaaaccctccctgcacttttgcctcgatcccccaactcctcttacccaagctcgatccagcacctctgcggtcccgcaccccaactccgcctcctgggtgtcagccgcccctctccgcccaccctgccctcggtcggtgacccgctgtggtccccaggccaagtgttcttcgtgcccgggcggctgacgctgtctgaagcccacgcggcgtgccggcgacgcggcgccgtggtggccaaggttgggcacctctacgccgcctggaagttttcggggctagaccagtgcgacggcggctggctggctgacggcagtgtgcgcttcccaatcaccacgccgaggccgcgctgcggggggctcccggatcccggagtgcgcagtttcggcttccccaggccccaacaggcagcctatgggacctactgctacgccgagaattaggcgcccaccgtgtcccctccagcgcgcgcgaagaagcttgggagtcgtggcgggggtctctcgccacccctttccggagagcctcccctccctccagacccggagcggcctctccagacctgccttcccagccgggggctgcgggcctcggaccccggctggcccggcggcggggaggggaggcgggggcgcctccggcggcgagatgcagaggtgaccctcggacccgctgccgttcgcgaaccctagcagaggactcagccaccgccggggggagggtgaggcggccgggggcattaactgacctctgagtacagcaataaaataacctggggatcttttgtgttgggtggagctgtaagagctgcgaggcgtggaggggtgtgtgtgtgtgtgtgtgcacgctcatgtcggggctgatgacccgggatcctgcgtgcccactgagcacctaagacagggtaaggggcagggctgttgctgttaagggatgggtcagcggaagagcgggagtgcggccggagggcaccaataggccaagggagagagagaagtggagacgtagtgggcgcctggcccaggacccacgcagaacccagcatgttgttgcgccaggcgccacgcgggggcgccgcacactcacctaagattagttcaaatctgccaggggcgccccatgccaccaggcccaccctatgtgccccagataacaaatataagacaacttaaacatatttcaaaatgtgcaggctgcagacctccctgaagcgtttgcggggactactgttaaagataggaaagtcatattgttgctagaattgacaggaaattaaccttgcgtaaggcggaggcaaataccaaacaccagggccaccaaggcaaatggggaactggacaagtaacattcttaacctgtggctaaaggaaacatactagcaattcaagagacaaattctaatgttattaattcacttttcacatatatattggtgtgtatatacataggtttctaactatactacaaaaaagcctgagctagataatactaatgaatggggcaaagggcacgaacacgctaatggtgcgtgatatatgttgtaaaattgatttccaagggggttcttgctataattgctaaagaaaattcatcccatggaacattatataagggacagagaatgatagaatgaacagtcttcaataaccatcatgcagcaaatgagatatttgtgccatttcctaaaccttgattttctcatcttggcaagggataataatgtttgtcttttgtgtttgttgtgagaatcagttgaggcattgcatgtactgggtagtacatgcctggtacacataataggcactcaagtggtacctataataattaataattattgtgattacagtaatatggcaacaatagtagtttttcagcttcttatcaggcagcctgaagggttggttgtcgtatggcactatattagtcaagatcaggtagattatgctgtgaaaacaactcccaaatctcagataacaaatataagatgacttaaacatatttcaaaacgtgcagcctgcagacctcccagaagtgtttgcgctattaaggataggaaaatcaggcccagtgcggtagctcatgcctgtaatcccaacactttgggaggctgaggtgggcggatcatttgaggtcaggagtttgagaccagcctggccaacatggtgaaaccccgtctctactttaaaaatataaaaattagccaggcgtggtggcgggtgcctgtaatcccagctacttaggaggctgaggcaggataattgcttgaactcaggaggcggaggctgcagtgaacagagatcgcaccactgcactccagcctgggcgacagagcgagactccatctcaaaaaaaaaaaaaaaaaaaagataggaaactcatactgtggcttaaaataacaaaggtttatttctcactcaggctacacgtgcgttgtggtcaaaaagggagttcttatttttgtcattcagggacacaggctgatagagtagccaccatcttgaatactgtcagtcaccacactagcaggaaaaaataataagagctctgcagggtttcacaaaggcaattaatagcttccacccagaagtgacacctgtcccttcagttcacaactcatttgccagaactaatcacatggccccacccaaccacaagggggcaagaaagagcaatccttctttggcctagaaataggaaaactggaaatatttgatggacagcatcagtgtccaccataagcaccaaggagagcagtctagactctctcttagacatagtggtagtcacccaatcttttctgggttttctaagctattgcctatgatgaagtcagagccccagaaagccaagatactggaccccagcagctcagccagcaggaggatggcttttcttcagtgtaatgccttcagcctaagggcaagagaccatacaagaaatggtcacgggccaggcgcaatggctcatgcctgtaatcccagcactttgggaggctgaggcatttgggatcaggagtttgggaccagcctaggcaacatggcaaaacctcatctctacaaaaaaatacaaaaattagctgggcttggtggcacactcctgttgtcccggctactcaggaggctgaggtgggaagatcgctttagccaaggaggtcaaggctgcagtaagccaagatcgcaccactgcactccagcctgggtgacagagcaggaccctgtctcaaaaacaaaagcaaacaaacaaacaaacaaacaaaacggtgaaaaaggccataagaagagctttccatttgctgcaaatctccatttcttcaatcacaaaaccacagtaccactcattcctacaactactctgtatattgctatcagcattatttcttattatagaaaactttaaacatacacaaaagtaagggctgggcgcggtggcttacgcctgtaatcccagcactttgggaggccgaggcgggtggatcacgaggtcaggagatcgagaccatcctggctaacacggtgaagccccgtctctactaaaaacacaaaaaattagccaggcgtggtggcgggcgcctgtagtcccagctactcgggaggctgaggcaggagaatggcgtgaacctgggagacggagcttgcagtgagccgagatcgcaccactgcactccagcctgggcgacagagcgagactccatctcaaaaaaaaaaaaaaaagtaaggagaatagtatgatgaactactccatcacctggcttgaccattatcaaaattctgcccttcttttttcatgggtcctctcagtcatgttgggttttactggagtatttgaaagtaaatcccagatatcctatcttttcacctgtgagactcaatatgcatttctaacacacaatgacttctaaaaataaccataattccattatcacacttccccaacaaaattaaactaaacattagtcatctaatatttagttcatgatcatttttccctgaatgtccaaaaaataaaattttatagttggtttcctcaaaccagaatccaattaaggtctacaacgttgcaattggttaatttgggggctgagggagttaattaatgctttttttttttaagggacagggtttcactatgtttcccaggctagactttaattcctgggttcaagttatcctcctgcctcagcctcctaattttttttttttttttgagacggaatcttgctctgttgcccaggctggagtgcagtggccaatctcggctcactgcaagctccacctcccaggtttatgccattcttctgcctcagcctccagagtagctgggactacaggcgcccgccaccacgcccagctaattttttgtatttttagtaaagatggggtttcactgtgttagccaggctggtctcgatctcctgacctcgtgatctgcccgcctcggcctcccaaagtgctgggattacaggcgtgagccaccgcacccggcccgagtaattttttttaagtctctgttaagctgcaatactcctgcccccttcattttatctatgccattgtatttgtttgtttaagaaactaggtcattttttcctgtcaagtttctcacattctggatttggctgagtgtacccttgcaaatgtcatttagcatgttcctttgtcccctgtgattatatttagaagtttgattaaattcaagcaagcacagtggctcacgcctgtaatcccagcactttgggaggccgaggtaggtggatcacctgaggtcaagagtttgagaccagcctagccaacatggagaaaccccacctctactaaaagtacaaaaaattagccgggcatggtggtgggtgcctgtaatcccagctactcaggaggctgaggcaggagaattgcttgaacccaggatgtggaggtttcagtgagccaagatcacgccaatgcactccagcctgggcaactgagtgagactccacctcaaaataaataaacaaacaaacaaattcacattcacttttttctggaaacattccataagtgatactgtatacttcctctttcatcacatcaggaggcacctggtgactggcggttctactttcttttgtttgttttttttggtttttgagatggagtcttgctctgtcacccacgctggagtgcagtggcacggtcttggctcactgcaacctttgcctctcaggctcaagtgatcctcctgcttcagcctcctgagtagctgggatgacaggcatgtgctaccacacccagctagttttttgttttgttttgttttgttttcatagagacaagatttcgccatgttgcccaggctggtctcaagctcctggcctctaaacatcttcccgccttggcctcccaaagtgttgggattacaggtgtgagccaccacacctgggccttaatctactttcaatgatgttgagattgatcagtaaattcaggctgtctgtccattaattataaggttatccattgtaggtcgggcgcagtggctcacgcctgtaatcccagcactttgggaggtcaaggtgggaggatcacctgaggtcaggagtttgataccagcctgaccaacaaggtaaaaccctgtctctacaaaaaataaaaaaattaaaaaaattagcggggcgtggtggcaagcacctgtagtcccagctactcgggcggctgagacaagagaatcgcttgaatctgggaggtggaggttgcagtgagctgagatcacgccattgtactccagactgggtgacagagtgagactccatctcaaaaataagtaaataaataaaaggttctccattgtattagtttccggtgtctgctgtaacaaattaccacaaattttgtgtttaaagcaacagacatttattctcttaccacagagacatttattctctaccagccagaagtccaaaatctacgttttcaatagcacagtggtaaacaacaacaacagcaacaacaaacaaaaacctaggtgtcagcagggctgcactccctctggagattgtgggcagaacccttccttgcctcttccagcttctggcggcttctgttccttggcttccttagccgcatcactccaatctctgcctttgtggtcatgtaccctcctcctcttcatgagtctgtgtcttttcctcttctatctctcataaggacacatgtcgttggatttaccccacctagctaatccaggatgaactcatttcatgacccttaactgaagttaaggaatgaattcatgtaatgaattacatcggcaaagatcctttcctcaaacaagataacattcacagttttcagggattaggccgtggacatattatctttttttttctttttctttctttcttcttctttttttttttttttcttttttgagatggagtttcgctcttattgcccaggctggagtgcaatggcgccatctaggctcaccgcaacctccgcctcccgggttcaagcaattctcctgcctcagcctctcgagtagctgggattataggcatgtgccaccacaccggctaattttgtatttttagtagagacagggtttctccatgttggtcaggctggtctccaactcctgacctcaggtgatcctcccgtctcagcctcccaaagtgctgggattacaggtgtgagccaccgtgcccagcctatggacatattttctagtggccaccattcgaccctctacacctatcaaccttttatctgatggcactgctgatcattgtctagattcattcattcattaagagttgcaaaatggagattgtctaattttgtcattcctccttcttcttcttttttttttttttttttgagatggagtcttgttctatcacccaggctagagtagaggtgcagtggcttgatctcggctcactgcaacctcttcctcctgggctcaagtgattctcctgcctcagcctccctagtagctgggattacaggtgcgcaccaccatgcccagctaatttttgtatttttagtagagaaggggttccaccatgttggccaggctggtgtcgaactcctgacctcaagtgatctgcccgcccctgcatcccaaagtgctggggttacaggcatgacccgctgcgccaggcccaccttcgtttattagctgtgaatcatctgtaagaaaaactgctctcaataactgctttgttactctgacatttcacccattcaggaaaggtagaattagtgcttgattatctcgcatttgtcttaggtgggctaagaaggatctgcttcctagaagcagatcttgagtcaggaacaaaagtagtttatttggtaagtgatgctaacaggcactgggagaggagtggagaagtgggacaggaaagggaagggagccagttagaggcatgtattagagcaggtgggccaatggggatcaatcctgctgaggaacctgggagaagtgtagaagctgcctcagagaatcctccccaaggggcaaagaaataggatataattgtcaactccctctgtgttggttgagagctccttctgggagcattaactctctagcattcctggcttgccctgagcacaaacatgctcccatagccagaacaaacgcctccaggcagagtcacagatgttcacaaagatgcgtcctcctgtagaggtgaatgctgaaggatatgggtcacagtaccgtcccccctttgcactgctaggatccatttgtgcctctcattccatgagttcattctattctgtctctgatgcttcaaggtggtggctgattgcaatttctaattcttttaaaagaaagtcttaacaacaggctgggtgtggtgactcctgccagtaatcccaacactttgggaggccgaggctggaggatcacttgaaactaggagtttgagaccagtctgagcaacaaagcaagacctctgtctctaaaaaataatttaaaaattcaccaggcgtggtggcgtgtgtctgtagtcccagctaccagggaggctgatatggaaggatttcttgagcctagcagtttgaggcgcagtgagccataatcatgccactgaactccagcctgggtgacagagtgagactccatctgttttttttttttttaattgtacaatgggtgggttagtaggacaaaccataaccattgctgcagttggttgcaaggctgaaatcagcattcaacatttccctcctctacagttcattctgttagtctgcagggctttctcaatggaaaatccagaccttcatgactgaagttctctgccttacatcaccatgcccttgccaggccatcattgatacaactgcctgttcatgggataatgaagatcaaatatctctgcttgcataattcctttctttgtgtactggccaattggtatgagatgccccaaatgacccaatggctgctgtagccttaggtttagtagcatcttcactgtgacctctgggagctgcatctgccacttcaagaaccagggcttctaatcccacagaccttaaatgtataaggacaggaggcacaaattcccccaagtgagtcactaggactgatggtgagaggggtattccttcttccataccttggttcctgtacccctgatttctaactgtctggcatatagcactatataatggccattaactcaaaatatatacttcattttgcaggactgcacccaaatctcacaggatcttttccccaggctggctttagatgtgctgtaaagaggccacagtaatgtactaacaagctggcagtttcaaggtgatgtgatatattatagcatagaaccaatggatcctgtggctgtgcatccattgtcacatttccttcgctataaagtgcagacccttggttagaggtgagactataaggggtctcataaggacaaatcattgactttgggcccttgatatttggtgctggcccaggcatttggtcaggaaagacaaatccatatccagaatatgcactaatcccagtgaggacatattgctcctcccccagattgaaagagatacactgaaatcaacataccatcaggcaggcacagtggctcacacctgtaatcccagcactttggaaggccgaggcaggcactcacttgagatcaggagttgaagaccagcctgggcaacatagtgaaaccccatatctattaaaaatacaaaaaaaaaaaaaaattgccaggcacaatggtgtgcacctgtaatcccagctacccaggaggctgaggtgggagaatcacctgagcctgggaggtcgaggccacagtgagccgagatcacaccactgcactccagactgggcaaccagagtgagaccctgtttcaaaaacaaacaaacaaacaaaaaacatactatcaactggctggttgatctccttgagggctggtaccatgttgaggggtcagcatctgtctctgctgcagacaggccaaacattcagcagtggcagtagctagatgagccttgatgagaggtcgcccatgctagtgggcccttgcatagattccagatctactgccacaactactccattcatgggctcaccatggaagccctggcatgacaaaggctggtttatccactggagtccttctgtccccttagctcttcaatgccccctctgcagtgaatgttctttgatggtactgacataagacacaaagatttatcactttgtgcccactcctataagtccatccatatacctcttccctggacatccttacctccaaccttccaatcttactctcttctgggccctgaccagccaactaagccactgccactgctcaagaatccatgtgtatatactttcctcaagtcacctctctcactgcagagtagaccaccagcatgctgcttgaaacgtcctccctggaggatttcccctcatgttgtctttcaaggccacccctgagtggggctgtagtgtggcagcatccaagtttagctcacatcaataaatcagacaggcccatccatgaacctggcctgcattttttcctcctctaaagcctggttatagggaaattcccacaaggctacagggtgagctaagagaggtacaggagcaacagggacaggtaaagtgggatctggactccctgcacttgtagcttattcgtgccctctggacatgcttacacccaatcctaaatgtaccattttttgttgctactgtgcccatatgtcctcatgacttggtgggtctgaaaattcccagatcttgatggcaaacagagacaagaaagggaaggaatccagtaaagggtgcataatggaataggctatggccatggacaaatgaaatgcacgctgctggggcactctgggagccagtgtagaacttgccgccgttttcccacctgagagatgaggaggctggggttttaatttaccaactccggcaaggtgcggtggcttacgcctgtaagcctagcactttgggaggccgaggtgggcagttcacctgagatcaggagtttgaggctagcctggccaaagtggtgaaacccctgtctctactaaaaatataaaaattagccaggcacgatggcatgtactgtaatcccagctactggggaggctgaggcaggagaatcacttgaacccaggaggctgaggttgcagagccgagatcacaccactgcactccagcctgggtgacagagtgagacgccatctcaaataataataataatttaccacctccccacctgttactggttgaggactggtcccag

SEQ ID NO: 453 - DNA, 41608 bp, Homo sapiens
tcttgtcccgcgcgtggtttttgtgaagacacgtgggcgggatgggcgcagggtttcggtagccttggaactctcgccaaagaaaatcgcgggcgccggtgcctcagccgtcctgcctgagagactcgcctccgagaggaggaagggacagaccaaagcagtaaatcggccatcctgcagaggagccgccttctgctgtctgtgggtacagccagaactcccatacgcgggcgctgaagtgccaaaccttcgtgcgtgttctctagtaattaggtgcattgttttgaaggaataaagaatggctactccataggcaggacagcctctagtaaccaggtttgttttgtgtattttcatttggttaaaaattaagtttaggttgggcgcagtggctcaggcctgtaagcctgacagtttgggaagccgaggctgcaggatcatttgaggccagcctgggcaacatagcaagaccccctctataaaaaaaaaactgtaaacatcagccaggcggtggcgcacccctgtgggccaagctattctggaggctgaggctggcggatcacttgagcccaggaggtcgaggttgcagtgagccgtgatggcgccactgcactccagcctgggcgacagagcgagacccccttctacaaaaaaaaaattaaaaattaccccggggaaggccaggcgcagtagctcacgcctgtaatcccagcactttgggaggccaaagcgggcggatcacctgaggtcgagggttcaagaccagcctgaccaacatggagaaaccccgtctctactaaaaatacaaaattagcctggcgtgatggtgcatgcctgtaatcccagctacttgagagtctgaggcaggagaattgctcgaacccggtggtggtggtggggggggtggggtgcggaggttgcagttggccaagatcgcaccattgcactgcagcctgggcaacaagagcgaaattctgtctcaaaaaaaaaaaaaattacctcagggagcctgtggtcccagctacgtgggaggctgaggctggcggatcactggagcccaggaggttgagactgcagtgagctgtgatcaggccactgcactccagcctgggcaacagagcaaaaccctgtctctaaaaaaactaagtgtataccaaaacaagatttcttaacacatcttgtccattacatcagggaaaacacttgttctctttcacttccatgtttaacttctgcctgacacagctattcgtagccacattgtgattatagtaagtcactgacaaaaaatgttgtcctgaaagccaaggctacgttcggtcagaatgagctcctgcaggtctggaattgttagaacagcgtatctggttatagccgcccttcatattaattattaaaatgttacatcacttaaggcttttatacagtttttcccccaagccccataacttcaatctataacagtgagcaactagcagacacattggaagtgtttaagaagccagcctttaagaaaaggaacagaagggacaaaaaccccaattaatgcgaaatcatcacagataatgacaggtatttaggtggcctggtttagctaaggcctggaaaagaacagatcgggtttaaagagtggcctgccgggaacgcgatgcggcgtggtctgccgtgcacttggcttcctgcttccatcctgtggtgcctcttccaggagcccagttctgagtctctgatgccgatgtcctgtatttactggcttaaaactcttgcctgtgtgagattccacaaactctggcacagaaggccccagatctgcccaagaagctgtgggatcagccacaaaatctcaccaacgccaggtttctgtcctgccctccctggcgctgaaggggaaatagaacagaggctgtgttcaggttgctgtcctgcctgccgcccagcggtgcagcttgagcctccttttatgagaggtttccacccaattctagatgtgtattgaggtatctacacatggagggacgtgcacatatcacacgtgcaactggcctgagcccttttcagacaattagtccgctccaggtcagcgtggatccagggtgagtcagaggcgtcttcagatgcaaaacctcagaatcaaaaaggaggaaagagactccactcactcctcgggcttcctgtcatctctcaggtgggggtgggagaaggcccaagaggttgcatgataaaaagactggacagctgcattgctggtttggaaaatccttatttttggagggatatttggggataaaatttcagaggaaagcaaatgtctcatcaatcatgaaaaaagatttgttacaacctaagtcagaaaaggttttcatctagtcatatatgtgtggcaaatacggagaagccacagacggtgagccacagacaatgagagcagctgttggggtgggctccagggtgctgctttccctgagggccagctgggtctggcccaggttcacttcccaccccggtgcccccggtactcgctgtctccagcctcaggttctgaaaggcagagactcctagcctcattgaaggatggttagagaggcacgggagctatctagtggcaggcccacggtatatgtttgctgctttctacaaatacgagatcaaaggaaaataaagcaggggtggttcctgtcagtgtggagcgagacccgggaaagcatcctggtggctgtcaggccttgctcacggcccctttctctttcagggagaggatcctccacagtggtatcctgctgcgtgcccctccaggacagcacccagaggcccgaattgctgctgcacagagagcactcggcctcaccccacgttttccctaagttctgtctagtaattccactttggagaggggggtgttccttgacagatttagagagttgatgtaacttcctcggatcagttctgctggctccatcccctacctgctcagccctgcacaaagtggctaagcacgccacactgccggctcccaaggcgatggccacctgcctctgtctcggccgctagtggcaggaagatggaaatccctcactttgtccctagattcattttattttatttttgtttgtttatgtttttttaaggacagagccttcctctcacccaggctggagtgtggcaatcacagctcactgcagcctcagcctcctgaagctctggcatcaggcgggagccactgtgcctggccccatagactcatgttagcataaacaaataggaaatgtacacagctcaggaaatggctactagatacttaagtcccccaaacagaaatatatttcctctgaagaaactgaaaaaagtggccgggcgcagtggctcatgcctgtaatcccaacactctgggaggctgaggtggacagatcacttgacaccaggagtttcagaccagcctggccaacatggtgaaaccctgtccctactaaaaatacaaaaaattagctgggcatggttttgcacgcctgtaatcccagctactcaggaggctgaggcagaagaatcacttgaacccaggaggcggaggttgcagtgagccaagattgtgccactgcacagtgtccagtctgggcaacagagcaagactctatctcaaaaaaaaaaagaaaatgacaaagttattttttctctcttaactcataactggggccaaaggcagggtgacatcactggggatgccagtgtgtggaggctgtcccctgaccagtcctgtccacagtcaggagggcaggggctgcagtgcacagaccgcattgttgtggcatggaggggggtcccacaaaggccttgtcagctcatgggaccacattggcagccagcatagtgacagaagcctcagataggcagtgagccattgccaagactccatggtcccttggtgtctgtggccaccaaacagatgacagaaccagcccctcttgttcagccacctgggaggctgctcccaagcctgttgagcttgaggatccttaaccactcaccagctctcttcagttccccttcaaatgctgttttatctcagcggaacgtactacgccctgtatttcctcgccacgctcctgatgatcacgtataaaagtaagtcagggacgggcacagtggctcacgcctgtaatcccaacattttgggaggctgaggtgggcggatcacttgaggtcaggagtttgagaccagccaggccaacatggggaaaccccatctctactaaaaacacaaaaagtagccgggcgtggtggtgggcgcctgtagtcccagctactcgggagactgaggtgggaggattgcttgaacccgggaggtggaggttccagtgagccaagattgcgccactgaactccatcctgggtgacagagcaagaccctgtctcaaaaaaaaaaaaaaggaaaaggcaagctgaggtggctgctgctgctgtgccaggttacttatgttccgtccgcgcctctgctcttcaggtcaggtgttcagctatcctcaccgctacctggtcctcgatcttgctctgctgtttctgatggggattctagaagcagttcggttatacctgggtgagtggactgttaacaccgtgaagaacctgtcctaagagttgctatctgtttccacagcctttcaagagtaattattttatagtgtggttctcagagacattttttatccaaactgcttacccagttgctttgcaggctcaccttacagtgtcattaagtattaatcaagaagttttgtcccagagacaaataacactgggggcatcgttgggagagactctgtgtttggaagcatgtcttgtagaagccactgggtaatggcactgagatcagaaaagcccagcccaccaccacatctggagctccggaatattcaccagcacccctttccttccccttgcccttagctgtctgaggagagagccctggagagttctgccaggtcccaaaaggcagcagagtctggaggggtgggagcccccagcctccccactccagctctagggatccccaagtctgcaaccccttccagtgacctactttttttgagacgaggtctcactctgttgcccaggctggagtgcagtggtgcagtcacagctcactgcagccttgacctcctgggcttgagcgatcctcctgcctcagccctcccctcctcccaagtagctgggattacaggcacctgccaccacgcccagctaattttgttttgttttgttttgtttttttttggtagagacgagacaaggtttcttttttttttttttttttttttgagacagagtctcgctctgtcgcccaggctggagtgcagtggcgtgaacttggctcactgcaagctccgcctcccgggttcacgccagtctcctgtctcagcctcccgagtaactgggactacaggtgcccgccaccacgcccggctcatttttgtatttttagtagagatggggtttcaccatgttagccaggatggtttccatctcctgacctcctgatccgcccacctcggcctcccaaagtgctgggattacaggcgtgagccaccgcgcccggccggagacagggtttcgctatgttaccctggttggtcttgaactcttgggctcaagcaatctgcccaccttggcctcccaaagtgcctggcctcactcccctttttttaaccacacaatttgttcaagggtatgttcttgtacaagattcaaggggtgcagaagtaaaacatggaaattcgccctccccagagctcacctctgtggccagcggggtgcagacttccagccctctgcgtgctcatggtcgtaacatgtgcacctaaacacacgtgtttgtgaaacattgtcctgccgtggggaacgcaatgggcacttccagggcgctgtgcccctgccaggctggaatcttgggcccctcttgttcacatacagatacacccctgatgcctgatgtccagtgaggaaccaaggctgcggggaagggtggcccccacccttcctcttgttatcaggcctcagacacactaggaggatggaggcgagttctctcagctgcccatcccactgaggggtgcccggccgtcagtgtcttgtctgcacttacgtcccagaacctctagagcttgccccccagggcgggcactgctgggagggtgcgagcaccgctgcggcacagaggcccggttcttggctgatcttctggggcctgggcctgccctgaggtggtggggacagggtgtggcctggccctgctgggggctgctaggccaacgggaccctccccaagcgcgccgcacactgcagggtctccaggcacctgggctcagctagtgactgacccatttgtttgctaaatacgcagttttgtttttaatacatactcgtgaaattttccagaactggccttggaccagagaaaaatactttgggaatttttcaaaaaaatcccttcagttccacttggaattaggaaaacgtggcagatgcacttgaatcattttagaaaccaaattcacccccgcccacacagccgacccagaagacccagagacagatcaaaccatgctgttgcaggggcacctcccccaggaggggctcacgcctgtgttgcccatgctctctggctctcctgagttctgggtggccatggaggctgtttccctggaattccccaggccccggaggaacgtagggcaaggagctgctctggtcccagcagccctccaggcacctgtgggcggtgggctccagggagcgcctcgcaccaccttccctcccctttgctctgttctccaggcaccaggggcaacctgacagaggctgagaggccgctggccgccagcctggccctcacggctggcaccgccctcctctctgcccacttcctgctttggcaggccctagtgttgtgggcggactgggccctcagcgccacgctcctggcccttcacggcctggaggccgtcctgcaggtggttgccatcgcggccttcaccaggtagctacggacacccgggataccccacactggggccctcctcctgggcctgaccagtcccccagctgtcacctccccattcctggacaggaagggcacttttcctagtgactggccatagatggttttggatggttccatctgttctggcaggagtgggagcaggagccagggcagaacaaactgctggaggccctggtgttgggaacagctgcggggagggtagggaccagacagaactgccttcaagatgagtcccaggagcgcacactcagccctgtcagtggggtctggctttagcagccaggcctccacagacccccatgggcccccagggccgagagggaggacagagcccttcagaacagaggcctcatctcactgcatcccccatcaccccctagttccccaatggtcctaatttgtgttctgagatcccagtttactccgtggccaggccccacctgtgtttccaagtcgggctggagacgcaggatggggtaggccttgtgctctgagcaaccccagctctgcctcacaggcaggcaggcccggtgcaagagtggactctgggttcctaaagcaataaatgcaaacaagccaacagctctgctgcctagcaatttccatcttagccacacttctcccttcaggggcttcggaggagaggtcagggctaaggccggggatgagactgcaggagagagagcagcggagggccacattcggagcctccgtccactccagttttatcagcttttgccttttgcacggagtgctaaacaaattctagctctgtgtttttttcccattcccagatttactatcagttctccttaaaaagtatctaagctgttacagtagctttcccttcacttgattctattgtgtgttttctatgtttggaataattacacccaaatatctagatattttctcttcaccgcattttgtaaataaagagatgtgtatgcctccctgaattctcctaattatggccacctcccccaccccatctccagttctcctgccctgcaagagagcacaccccacttgccagctggtcagttcctggctggcctcgccctcgggccctggctgccgggcgccttccgctcggtggactcctgagggcaggaggctgcgggactgtcctgggcctccactggggctccctcggctggggtggctgtggctgtggcacctggacagtctttcctgcctgtcttcgtggaagcggtgggagcacccagttgtcctgggccgacttcctttgacctgtctgtggcccccagtggccacggtgagctgcaggacagccctgaggacccacttcacacaccagcgcctgagcgcctcgggccacctccctcaccagcgcctgcactcgcagaagaccagctgggcacacctgccatctggaggacccagcccacaaaccatgcagaccagggaaggaccccctccctgaagctggagacctgttgccttcatggttaatggatcctgatacctccagtctcagcgagcacacaaaggcagtggtcacctgttccacagggaacgccatggctccaggtgacccggagtggatggggcccgagaggccagcctggactgtctcctgagggcaggctccgcactcaaaatcgtgttgacaggcacccgtttaggagtggagagggaccccaccccccagctgtcctctccagcgcctgtttcccacttggccactcccagctctgcctccaggaagggtgagggcacgggtgcaccgaggggttggcgtgtgtgaccctgagctctgggtcagggcaagctcatgcatggagcaggatcacggcaggttcctggagatcaaacggcaaaggctgtaaaccaggaagccaggtcttgcctgggctcaggggcaggcactgggcccgaaggaggagggccacttcctgccagccctccaccgagctcacctatggcgcctccccaggaagtgctccggccagcccagggtaaacacgctagccctgcccctctgggaccatagcccggggacccagactcttggccacgctcattcccacccctacccaggaccggcagccggagccttgggtccctgcatgggcctggggcgccctgtgccccttcacctcgtcctcgtccagttgactgctgtggcagccggtgctacccgctgtgtccactgcaccctggccctgttctgagcggtcacagcagctggggagaagggccatcctggaagccgggcagatgaggacggaaccagacagtcccactgtggtgggcagaggtggggcctgggcctgaccacggggcagtgcaaggagagaggcatcctgagagggcctgaggtgtccccacctcccctgacaccccatccctcagtgcccaggctgggcagaaaggggggcctggaggagcagctgcactgtgaactcagggctccaggcctggggtgggcatggctgggtcctgcctgacacccacccactcaccgaagcctctgcccctgggcctgcggtgggcccggtaagggaagtgactctgccccatgcctggggcacctgaggggtgcacctggcccggcggaggctctgacctccccagggctggagccctccccagcaatgcgccagcgctgcccccgaagtcccattggcagcgttcccccgtcccccggcctgctggggcgcagctaggccctgcccaaggaagagctcgaggcctcgccctgctcatcccgcggaggcggccctgcgccccgcctgtccccagcgccccagctctaggggctaggcccgcggaggggcacaccaggcgggtgttggggaggacgcagagggctggggctggagcccaggcggggcagggggcggggcggagctgggtccgaggccggcgggggcgcctccatcccacgccctcctcccccgcgcgcccgcccgctctcgggtgactccgcaacctgtcgctcaggttcctcctctcccggccccgccccggcccggccccgccgagcgtcccacccgcccgcgggagacctggcgccccggccgaggcgcgaacagacggacgcaccggcgagcgccgaggggacaggccgagcgcggggcgccggaggcaggtgagcgctgcggacacgggggagcgcgcccgcccgggcctcagtttacccggtggcgatgggacgcggggcttctggttcaggacaccgggacgaacgcggcgtcgcagggcgcggggcacttggagggcggccgggccgagggcgcggggcaaggggctgggggcctggtcgagtccccacctctcctggacgggtcctgctgcagcccggcctgcccccgtcggtcctgggcggcggccggcgagcaaggatatttttaagccagcgatgggtgactcacctgccccgtcctgcccactcccagctctggggcttggtgggggcaatccctgcgtccggagagcgctggtggtagggaggcttctcccggttctgtgagcagcaggaccctcccgagggcctgaccgtggaggtagcactgcacacccactccctgtgggccggagccaggaggcacttcctgggtgtcggagcccagaaggaaaccagtggccgggaagcaccagctgggtcagtctccaggtcagggttgggggtgggagtttcagggaggaggggaggctgggacaggggctgcagaggccctgccaggagaggcaggagggtgggctggcaggagcctgtgggcacgcgaacttcagccatcctagattcctggtccctgcgtccagctgcctggcgttgccccttgctgcggggtgtccctggtggcaggggagggggaggcagggccgggcatgcccggacctctgcccccacccaccccgtgctcagtcctgggtcggctgtgctgggaggcaggcccagctggcggcggcccctcccctcgcggcccctcctcccctcgcggcccctcctgggtcccagcctctcccgggcctgcttagcacccaggccttgttggcatagctctcccaccgggccttctccgcctgcctcggtctcctttcccaccctcagcttccccagcttatcccttcctccctcaagccatagcttccaaacaaggacagggccagggcctgaggggcctccccattccagggccccacccagcgcctatgagggcagcctggagcccctgtgactcagctgacccctccccaaggtcactcagcatgtggagctggaacttgaacttggagcccgtccctctaccctcctgccctgctgggacctcctcccctccacagcccgactgaccgggcaccccgctctgcctcacttcacaccgggaaaatgaccacagtacaaagtgcagcctgggcctccagggcttcgtccccaccaccagtgggccaaagaagcctccccaggggggcggggctcccacagggcaggaggcagccccatacccatgtgcttcagacccagacaccacacctggacccaccccactgctgcccggccctgcctgggcctgaggtccccgatgccctgcaggcaaccgaaggccaggaacctggccttccccaggggggtcgcgtgtcacagccctccatgtttgcgtgcccccaggcctgagtctgcaagggtgcgttggtgtctcgcccaggtgtgtgcctggacacacgtgcctggcgcccttggtggagcccgccaggaatcccattaagcaaacactcaggctcgccactgagcccgtgaacattccagacattctccacggatagatggatggaggaagtggccataccccctggtgcacccagcccctcatgtcagcggcagtgcccccgggcctcccagaccctcccactaggccagacctggtcaaaccagaaagtcccgggtgctccgagccactcccttgaccctccataccaacagcagtggctggtgacccccaccgtggcagacccaaactctgaagccacaggggacagccctgcagccctggcaggaggcagatggtgtggacctgtggggagctgatcacagagccacagaacagccaggtccccacagggcatagtccccttgggacaagtcagcctggttcagggccatcaggctctgtccatccccccgggaagcccctagggtccagcccaaatcagacccacctgtctgccctggcggctgggccttagtttccccaaaatgctcggggaagaggtcagcactaggagcccagagacaggctctgaggattctgcccctgggggaggccagaggcacctgccccatagccaccctacctcgttggaggggcagtgatactgtgtgttggggccactggactggctcccagtctcagcccccaccacacctgccctccagtccctcccctaggcttggctgctgccaggggttctgcgctggccacctggccgcatccctgccctcgaggtgaggaaacactgcaccccggggaccccagggtttcctgcccgcacagcctcttccctgccaggtctcccaggcccaggaaagagccaagggccagcctctttgctggggcctggacagaggtggcatgtgtgggtggcaagtccacatgtgggtgcaggagccccttggggtgcaggcctggggtggggcaggagtggcggctagagccgggctccctctggacttcaggacctaccccaactccagcctcacctctcctgccatcctgcagctcccacccgccctcccccaacccccaccgcacccccctccccccacactcccacctcatccccctccccttacccatcccacccccctccccacagcaccagggccttaaactccatgctgcccagcttggaaggcgccttctgcccccagggcccttgtcagagcctcccagtcagcctctggggggtccctgtggagcacctagggtctgaggcatgacgaggctgatcgactgtcaactgggacgtggggccaactgggacgtggggccaactgggatgtcgggcaggggctctgccccccaagggacccccacccaggccaggccagtcagggatctggcccagggaaggaggggaggaaccagccaggccggaggaagtgtcagcgcagcccttctgtccacccaggtgtgggacaggcactggcctcagaccggggccacactgaggtctgcccttctcccgctggccgccacccaagacaccatgagccagtccggggccgtgagctgctgcccgggtgccaccaagtgagccctcccacccatcccgaataccccaccctcaccctctgaacagtccccagggaggggtgcagtttggccctgccctgacagcccctcccctgcagtggcagcctgggccggtccgacggtgtggccaagatgagccccaaggacctgtttggtgagtgaggtttgagaacgggctggacgtcacaggggagaaatgggcactgcatccaggtgggggacagctgctcctgccccacagctgtgcctggtctggcccaggggatctccgggtgcccagggaggcctctggaccctaatcaaccttccgaaagctcctggccactggatcccctcccccacacccgtaaggggagaggcctttactaataattcagggagcatcaatattgattccgctgcactcattgctgtaacctgatcacagcgaggttcaggcaggataagccgccaggtgtctgctccaggaggggggcctggccagcccccacctccccccactctgcccttccccagagacgaccctgccctctcgctagctagatgcacccttcacttatgtctttggacaaggtgcctagtctggaaagcgagaagacctgggagggcagggagagtgaagctggcagctctcagagtgggaagaagccgggctgggacccccttcctgtcccctcaccctccgggacagaaaccccccgggcacaggctgctggtccccactccactcagagcaagcccatcgccttctccgagctgcgtccttctccaagggggcttccctggagggagggagggggcttcctgcaggtcctgatttcacacccacatccttcctggtggccaagaggtccacggagcagcctccctccgcttgactccaccttcccttgtgggtccagtcccaactggacgggaggctgtgggtcctgcccgtcgggggagtgactggtgtctcccggttcagagcagaggaagaagtattccaactccaacgtcatcatgcacgagacctcgcagtaccacgtccaggtaaggccccgcccccaggtaggctccgcccccagggagcaccctcaggacatggctgtcctcaggttctcgtctccacaaaaaataaaataattagacgggcatggtggtgccggcctgtaggccctgctactggggaggctgaggcgagggggtcacttgagcccgggaggcggaggctgtagtgagccaagatcgcaccactgcactccagcctgggcacctgggtgacagagctagaccctgtctcaaaacgaaagagagaaagagagaaagagagaaagggaggaagggaggaagggaggaaagctccagggagagtggtcagcccagcttctgacacccacggggccgggggaggccagagccagaactgcccacactgtcccgggctcagccacggggccggggaaagcgcccctctggttccagtcctgggaactcgcggcctggggggtgaggcagcccagggtgtgccgggaaaacactgtggctgctgcccagccctggatgggaagagcccctggaggagatgatcatcctggccccaaaacgaggaactgtatcgggagggagcaggcagaacaaagacgcccttgatgggggattcagggaggcccgggctgcttctcagggctcagacggggctgcctgcacgcgccggaccagccgccagccctgagggcttttctgttctcctaggtcagtttcattgacacggagaactcaggaaatgtttttttggggggttttgtgtgcgtgtgtgcgtgtgtgcgtgcgtgcgtgtgtgtgtgtgtgtgtgtgtctttttttcttcctttctttctctctctctctgtctctctcttttcttttctttctttcattttgagacagggtctagctctgtcacccaggtgcccaggctggagtgcagtggtgcgatcttggctcactacagcctccgcctcctggactcaagtgatcccctcacctcagcctccccagtagctgggcctacaggctggccccaccatgcccatctaattattttatttttttgtggagatggaagtctccctatgttgcccaggctggtctcaaactcctaggctcaagcaatcctcccccctcctagccaggcctggtagtgtgagctcgtagtccagctacttgggaggctcaggcaggaggatcccaccacggccctccagcagcctgggcaacagagtcttaggccaggcgcggtggctcacgcctgtaatcccagcactttgggaggctgaggtgagtggatcatctgaggttaggagtttgagaccagcctgaccaacatggcaaaacctcatgtctactgaaaatacaaaattagccaggcgtcgtggtgcatacctataatcccagctactcgggaggctgaggcaggagaatcactggaacccaggaggcggaggttgcagtgagccgagatcacaccactgcactccagcatgggcaacagagcgagactccatctcaaaaaagagaaaaaaaaaagggaccaggcgcggttgttcatacctgtaatcccagcactttgggaggccgaggcgggtggatcacctgacgtcaggagttcgagaccagcctgaccaacatggtgaaaccccatctctactaaaactacaaaacttagctggacgtggtggtgggagcctgtagtcccagctacttgggaagctgagacaggagaatcactagaacccgggaaatggaggttgcagtgagccgggattgcgccactgcactccagcctgggggacagggcgagactccatctcaaaaggaaaaaaaaaaaggcccctgcgcctgggtacgagctgggctcccggttgtggtccaagcctgggtgcgagctgggctcccggttgtggtccaagcctgggtgcgagctgggctcccggttgtcgtccaagcctgggtgcgagctgggctcccggttgtcgtccaagcctgggtgcgagctgggctcccggttgtcgtccaagcctgggtgcgagctgggcttccggttgtggtccaagcctacaggactaggaaaaggagggagggtgagggagcctggagctgggtcctcctgcaggaccagtcctttctgccacaaacagccctggctgggggcccaaaatgccccctggttcccccttgctgtcctccacacctgcagaggtgagacaggtcactactctttgagcctcagtttcctcgtctgtacaatgggtccaaagagccatcaggagtccctgagctcttgaatcgggctgttttgggtgaccagggccctcccagcagcctgggcagctagaccctgcatacagccaggctggtgacttcggccagctcagtgtccaggggaaggcacagagcagtggccgagttcactttagtcccctcttcctgggcagctccaccacctttctcagggactctgccctcttcgggaggagcctggggcctctcagcctggctcctggactttggccccagctggcctggcctggcccccagccagcaggagcctcgtctgcccagaggccaacagagtgaggagtggagggtgggtggggctttcctgcctctccccgatgaggacactggggaccagagagagggtgagagtctggtgggaagtctctccagccaggtgggggccggatcagattggccctgacagtgggtggggggcacctgagcccgggtccatggtttgcttttttctaagttatcacacagtaaaagccatgtgtacgtgggggtgtggttctgttgccaccatagtcgacccatcagccccatcactccaaacctgtgaatccccgaccttggtggctacccccaacctctggcaacacctgcctgccttcatcaccacagtttctgtttgtttgtgtgtttgagacggagtctcgctctgtcacccaggctggagtgcaatggcgcgatctcagctcactgcaacctctgcctcccaggttcaaaccattctcctgcctcagcctcctgagtagctgggactacaggcgcccgccaccacgcctggctaaatttttttttctctgagacagagtctcaccctgtcacctaggctggagtgcggtggcgtgatcttggttcactgcaacctccgcctcaagggttcaagtgattctcctgcctcagcctccccagtacctgggattacaggcacgcaccaccacacccagctaattttttatatctttagcagagatggggtttcaccatgttggccaggctggtcttgaactcctgacctcaattgatccacccacctcagcctcccaaagtggtgggattacaggcgtgagccaccgtgcctggcctaatttttgtatttttagtacagatggggtttcaccatgttggccaggctggtccccaacgcctgacctcaagtgatccacctgttttcactatgttggccaggctggtccccagtgcctgacctcaggtgatccacctgcctcccaaagtgctgggatgacggactgagtcactgcgtccggcctccatcattgtggtttgataagtggaaattaatttttatgatgtccattcgtatgtgtttttcttttatggtttagggtttttggcatcctaagaagtcatcctttgaccaaatttctggagatttcttccgtgttttcttttattttttgtaaattaggaattcactgtggaagttcctgtgttttctttttcttttcttttttctttttttttttgaggtggagctttgctgtgtcacccaggctggggtgcagtggcgtgatcttggttcactgcaacctccacctcttgggttcaagcaattctcctgcctcagcctcctgagtatctgggattacaggaatccatcaccatgcccggctcattttttgtattttcatcagagatggggtttcaccatgttggcaaggctggtctcgaactcctgatcccaggtgatccaccagccttagcctcccaaagtgctgggattacaggcgtgagccgccgcgctgggccagttcctgtgttttcttttggatgcttcccagtgtaggcttttgcgtttagggccaggatccattttattttattttattttattttatttatttttttatttaatttttaaattttattttatatttattttattttattttatttttttttgagacagtctcaatgtactggaccacactgattgactgttttgaatgttgaaccagcctaatcctcatttattccaagtgtgtgatcctttttcctgtgttgagggactgatgtggtaatattgttgttaggggtattttgtgttgatgtccattagaggtactggtctgtaattttcgtataatgcctatggcaggttgtgtggcagggttatgttggttttataaaatgggtggggaagtattccctcctcttctgttttcagaaagagtttgtgggccgggcgcggtggctcatgcctgtaatcccagcactttgggaggctgaggtgggcagatcacaaggtcaggagatcaagaccattctggctaacatggtgaaaccccgtctctactaaaaatacaaaaaattagccaggtgggatggcgggtgcctgtagtcccagctactcgggaggctgaggcaggagaatggcgtgaaccccggaggcggagcttgcagtaagctgagattgcgccactgcactccagcctgggagacagagtgagactctgtctcaaaaaaaaaaaaagagtttgtgaaagcttgttattgtttcttccttagatatttgttaggatttgccagtgctgccctcggagcacaggattttctttgtgggaaggtttcggttattaatcccctctcctgcctgtaagatctgtagtgatgccccctcttttgttctggtttttgagaatttgtgttttctctagtatttttcttgatcaggcttgctagggatttaccaagtttattaaccttctcataactaactttgggctctgttgatttgtgtctgtcagtagtctgtgtaaagtgcgttgacctcctcttaattttctaccttccacttactgtgggttttatttgattcactttatctttttcttttgttttttttttttttttttttgaaatggagtcttgctctgtcgcccaggctggagtgcagtggcacgatcttgattcactgcaagctccgcctcctgggttcacgccattctcctgcctcagcctcccaagtagctgggactacaggtgcccaccaccacgcccagctaattttttgtatttttagtagagacggggtttcaccgcgttagccaggatggtctcgatctcatgacctcacgatccgcctgcctcggcctcctaaagtgctgggattacaggcatgagccaccgcgcccggcattgattcacttttcctacctgcttaaggtgaaaccttagattatttatcttttttttttttttttttttctgagatggagtctcactctgtcacccaggctggagtgcactggtgcaatctcagctcactgcaacctccgcctcctgggttcaagcgattctcctgcctcagcctcccaagtagctgaggttacaggcatgcaccaccatgcctggctaatttttgtgtggggttttttttttttttgagacagagtctcgctctgtcacccaggctggagtgcagtggcaccatctcagctcacagcaagctccgcctcccaggttcatgccattctcctgcttcagcctcctgagtagctgggactacaggcgcccgccaccccgcccggctaattttttgtgtttttagtagagatagggtttcaccgtgttagccaggatggtcttgatctcctgactttgtgatctgcctgcctcagcctcccaaagtgctgggataatttttgtattttcagtacagacaagagttttgccatgttggcccagctggtctcaaactcctgatctcaagtgatccaccctccttggcctcccaaagtgctgggattacaggcgtgagccaccgtgcctggccagattattgatcttaagtctttcttcttttctaagatattcatggaaagctctacattctccttgcagcactggtttagttgtattccacaaattgtgatatgtatgttcagaatgctttctagttttcttgtgacttcatctttgatgcatgggttatttagaaatatgttgctttgtttctaaacatttggggattttctggttttatttttattatgggtttctaccttaattctgttatgatcaaaaaacatattctgtactgttgcagtcacttgagatttactgagacttgttctgtggcccagcagcctggtttttcttgtttggttgtattgtgtgtttcaggttttactctgcctctcgcagagagatgagtggcctcatagtcccttgcgtgtttctgcacacttattttatttatttatttatttttgagacagagtctcgctctgttgcccaggctggaatgcaatggcacgatctcggctcactgcaatctctaccttccgggttcaagtgattctcttaactcagcctcctgagtagccggggttacaggcgcccaccaccacgccgggctaatttttgtatttttagtagagacggggtatcaccgtgttggtcaggctggtctcgaactcctgaccttgtgatccacctgccttggcctcccaaagtgctgggattacaggcatgagccaccgtgtctggccctgtgcccactgtaacctgttggatctgcccacttctttaacctgttgatggacatgtaggctgggtccagtctttattattacaaatagttctgcattgagcagcctggtaccgatgccacattttgcacgtgtgcagattacctgtagtagaattgggaggggatggtgtgtgcagctttagaggtgccactggcctctccccagagaggctgggcaggtgctggatgagggcatcctttctccacatcctaacccataagtaaaacccacaatgactattagtattgggcaatagaataggtaaaaaaacacaattcctggctgggcgaggtggctcatgcctataatcccagcactttgggaggcacaggcaggaggatcgcttcagcccaggagttcaagaccagcctgggcaacatagcaagcccttgtctctagaaaaaataaataggcagggcacagtggctcacgtctgtaatcccagcactttgggaggccgaggcgggcagatcacaaggtcaggagatggagaccatcctggctaatatggtgaaaccccatctctactaaaaatacaaaaaattagccgggcgtggtggcaggcgcctgtagtcccagctactcgggaggctgaggcaggagaatggcgtgaacctgggaggcggagattgcagtgagccgagatcgcgccactgcactccagcctgggcagcagagtgagactccgtttcaaaaaaaagaaaaaaaaaattgttaaccaaaaaccaaacagaggctgggcatggtggctcacgcctgtaatcccagcactttgggaggctgaggcgggcagataacctgaagtcagtagtttgagaccattctggccaacatggagaaaccttgtctctactaaaaatacaaaaattagtcgggtgtggtggtgggtgcctataatcccacgtactcgggaagctgaagcaggagtatcacttgaacccgggaggcggagcttgcagtgagccaagatcacaccactgcattccagcctgggggacagagcgagactgtctcaaaaacaaaacaaaaactaacaaacaaacaaaaaaacccgccaaaccgacaaaacactaaaataaaagaggctcagagtttcaaattgtaattctttcattcaatggtgttgcatacaattttttctttgagtttttgcatgcttttttaatttttttttttttttttagtttgagacagggtctctctctgttgcccaggctcagtgcagtggcacgaacatggttcactgcaactttgacctcctgggctcaagcattcctcccacttcagcctcccaagtagctgggatgacaggtgtgtaccaccacacctggctaattttttaatttttttaatttcttttttttttttttgagatggagtctcactctgtcgcccaggctggagtgcagtggcacgatcttgattcactgcaagctccgcctcctgggttcacgccattctcctgcctcagcctcccgagtagctgggactataggcgcctgccaccacgcctggctaattttttgtatttttagtagagacggggtttcaccatattagccaggatgatctcaatctcctgaccttgtgatccacccgcctcggcctcccaaagtgctaggattacaggcatgagccactgcgcccgatcttttttttttttttttgagacagagtcttcctctgttgcccagcctggagtgtagtggtgcaatcttggctcactgtaacctctgcctcctgggttcaagtgattctcccacctcagcctcccgagtagctgggattacaggcgcccgccacaatgcctggctaattttttgtatttttagtagagacagggtttcaccatgttggctaggctggtctcgaactcctgacctcaggtgatccacccgcctcggcctcccgcagtgctgggatgatagatgtgagccaccgcgcccggccacacaaacttttatgttttgcgttttgtggttgtctttgactgtcctgtagttcaagttagtgtttatccagctgtgccagcattgtgcaccgaacggccaacccttcgtgggagggttttacttagtgaacacggcagcttggctggaggagggggcctgagccaggcctggaaagaggagaggtgaagggcacagggcaggggccaggctggccgcagatcctcagggatggacgcatcccgcacacacttgtcgagggtcctctgtgcaccaggctttgccctggacctggggacacagcttagcaagtggcaaccggaacagtgccttggagtagcgagcacgctggacgcacagcacaccacgtgcagcgcgacgttgggtctgattcagggaattagggcaggtcgggatggggtgacggctggcattgtagccaggtggccacagaggggacgtctgagaaggaagagagctggggaggctggcaaagctggtgcagtgggcgggtactgagcctgcaccaggaggtgggcgggtgaggatggtggcgcggggccgggcagcagttggaattcctttgaggatagtttcaggacacaagcatggcccctacagatgcctgccaaggcagaatagagactccccccaccaaaggcggggccggtccccgttctagccccctacccagggttggctgtggcccctcagcccctcaggctgtggcccctgggggctgggctttcgacacaaggagggctctgcccagcagtgaccacctgcccacccccagcacctggccacattcatcatggacaagagcgaagccatcacgtctgtggacgacgccatccggaagctggtgcagctgagctccaaggagaagatctggacccaggagatgctgctgcaggtgaacgaccagtcgctgcggctgctggacatcgagtcacaggtggggcccagcgccacgggggacagggagcacagtgggtagaggcggtggcagccaccggctgcagcccggatgtgcggccggtcctctctgcagggccggccatgccctatcattctggtccctggaagaggatgggacaagggtgggcagagggccgcatagagctgagagtccagggaagtttggaagccggggtcagccttgcggtacagctgcggggtgtgtcccgggcctagtcctcatctttgggagcccattccccagcggcgccagaggggcctgtgctccaggcttgtccacagctccggccactccctgccagagtgcccagaccccgggtgcgagtcgtgtccgcgcgatgtacccgcaggaggagctggaagacttcccgctgcccacggtgcagcgcagccagacggtcctcaaccagctgcgctacccgtctgtgctgctgctcgtgtgccaggactcggagcagagcaagccggatgtccacttcttccactgcgatgaggtggaggtgaggcggtgccgggcggggcagggtggggccccgccgcgccgcgccccgccctcctggccgcctgacgcccgctttcccaggcagagctggtgcacgaggacatcgagagcgcgttggccgactgccggctgggcaagaagatgcggccgcagaccctgaagtagggcagcgggcggagcggggtcgcagggggcggggaggggaggagcccggcaggggaggggaggagccggcaggggaggggaggagcccggcagggagggagggtcaggtgcgttcccggcggggctgagcaggaccccctcgccctccaggggacaccaggagaagattcggcagcggcagtccatcctgcctcctccccagggcccggcgcccatccccttccagcaccgcggcggggattccccggaggccaagaatcgcgtgggcccgcaggtgccactcagcgagccaggtgggccgaggggctggagggggctccacagggctcgttgtggggggctcggtgagcagccgccgtgtcccccatcaggtttccgccgtcgggagtcgcaggaggagccgcgggccgtgctggctcagaagatagagaaggagacggtgggtgcccgggcccggcaggtggcccctctcttccccgcccccagcagtggacactggtccttgctgtccctccggccagtccccagcctgtggctgcccctccgaaggtgtggggcccagctcctcccatcatctgtggggctgtccctgcagcaaggcggggcggtggggagtgtcaggggctgacccctgaccccctctgaccccagcaaatcctcaactgcgccctggacgacatcgagtggtttgtggcccggctgcagaaggcagccgaggctttcaagcagctgaaccagcggaaaaaggggaagaagaagggcaagaaggcgccagcaggtgcaggggacagggacggggccggcaggtgcaggggacggggccagcaggtgcaggggacagggacggggacggggccagggacatccatgggggctactcatggaggtggaggaaggtccagcccacacagatgggctgcgtgggacagaaggcgcaggggccggggagatcagggccagcctggctcacgcggtgcctcccatgccagagggcgtcctcacactgcgggcacggcccccctctgagggcgagttcatcgactgcttccagaaaatcaagctggcgattaacttgctggtgggtccggtggccccagccctgccccactgtctgtgctgaggggagggtggaggccccgccccgccccggcacctgctcacttgttcccacccccaggcaaagctgcagaagcacatccagaaccccagcgccgcggagctcgtgcacttcctcttcgggcctctggacctggtgcctggggccgggcggcaggggcgcgcagggtgggggcccagaggcctctgcagcatctccccggggtcggggttggggcagcaggtgcccgccttgggcagcccggttcacgctgtgtggccactctccctggggtccaaagtcccttcccgagggccagcctgtggagctacgggggtgctgggccagggtctgtgggcctcagtcccctctgaacctcactgtgccccagatcgtcaacacctgcagtggcccagacatcgcacgctccgtctcctgcccactgctctcccgagatgccgtggacttcctgcgcggccacctggtccctaaggagatgtcgctgtgggagtcactgggagagagctggatgcggccccggtagggcagggcagagcagtgccggggcttcatggggggccagcgctgcatgggggccagcaagggggtcctggtgggccagttctggagaggcagggctgacttcaggacctctcaccccagttccgagtggccgcgggagccacaggtgcccctctacgtgcccaagttccacagcggctgggagcctcctgtggatgtgctgcaggaggccccctgggaggtggaggggctggcgtctgcccccatcgaggaggtgagagcaccagcagcccccatccctaccccagccccaacacccactcctcaccagagctcccccccagccctgacacccacccctccccagagctccccccccagccctgacacccacccctccccagtgctcccctccccagccccgacacccacccctccccagagctcccctccccggccccgacacccacccctccccagagctcccctccccagcccacctccacccaccgccccttcagccacagctcagctgcccctagcccctgccaggagaggcaacccatgctggcatcaccgggcatcaggctccatcaccctcagtgatgcatcagtcacaggacattagcccagcccctgtcatatgccccctcgtcctgggacccagccccgccccatgtctaactcaggtcgcccaccttccccacaggtgagtccagtgagccgacagtccataagaaactcccagaagcacagccccacttcagagcccacccccccgggggatgccctaccaccagtcagctccccacatactcacaggtaagcccccctcaaagtgagggagcatgaaagtgaaacccttcagaacctacagtctctaaaaacatatgggtacgctgccaccaggtggtggcaagtgcattgttcaagtggtttaaaatacttttccagatttgaagcggttttcatttcaactgcatgatatataattaaaggaaacatttcaaaagtcatgcacaaattctctaccctaatatatcagctttttctgtgcatccacatgtatgttttagaaccaaggttagaaactactaaaccactgaacttgagtggtttcaccaaacactggcaccctgttggggctgttgggactgattcaggcccaacctctggtagagccaaaagaggagactggggttctgggctagtgaagcctctcccctcctcccacccccagccccacctgtttccaaagaggacaaagaacaagcctatggcactaggggagtcccgtctttccttgcctctcctcttcccttctgtgctcattcctggtccaatctgcatgggaagcccctgaccctcccacaccccaggattcaattttggggtaaagaggggccagcaatccatcttctaagcaagcatggcctcccctcacccacagtgtcagcctggctcccgtggtccctggcctaggaccacacttaaaaacatttccaccctttgacttcagctcctggtctgtccaccctggccatgtcctgacagtccatggccacttcatttccctgagcacctggacacgggagctgccctgatgaccagggccacactgaccaggatggacggcctggccaggtgacagccacaggcctgctacatgccaaagccaggacccctcagccagggccagcccccccgcgcttttgaggtgcaggtcccaccccacagagaggagcttgagacccgtcctccactggaccatttgggctgtgttcagtcctcagaggggccacggctctgaagacatgctggccctcactggccagctgcggggagctgtgaccctggcgtttcccaggaacgcccctggctctggttcccctggggtgccggactggagacccctgaggtggcctgggatgggccagccttgctgtaccacaggcccctgcgccacgcccacctcctgcctgccccgcctccacgcagggccccaaagctctggggctgtcacagtttccattccgggctgacgctgcctgcagcctctctccacggtgacctccagaacagaaaagaggcagccagtcgtgcacctgggaagctgctgccccccagccactgcccaggtctcagaggagacccccaccagactgggcctcagcccctcctgttcctcacaggggctaccagccaacaccagccatggccaagtacgtcaagatcctgtatgacttcacagcccgaaatgccaacgagctatcggtgctcaaggatgaggtcctagaggtgaggggctggaggacggggtccaagagggggaaacagggcagggcttcaagggaggggctaccaggggaggtggggagcggtctagggccaggctgggtgatgccaggacggggcacagctgctggcccctttctccagggtccccgcccttggactctgatcaggatccccagcctgttggaggggccttcccatcttggggctccccaaaggcatgcagagacccctgtgccaggctggggggagcatctgcaccacgtggactcagcgggggcctgtcattcacacccacccaggagcccccacatctgcactggccgcatctgccagccggaatccaggccacccactgggggacagaaagtggagcaggctaggggggagtgggccacatccacagcctggctcggcggctcacgcctgtaaccgcagcactgggaggccaaggcgggaggatccctttagcccacgagttcgagacaagcctgggcaacacctcaaaaccccatctctacaaaaaacataaaaattatctggatgtggtggtgtgtgcctgtggtcccagctactctggaggctgaggtggggggatcgcctgaacccaggaggtcgaggctgcagtgggcagtgattgcaccactgcattccagcctgggcggcagagtgagaccctgtctccgagaaaaaaagggtcccccagactccttgaggcagggtgggggaggagcagcccagcgagggatggaggggtggaaacaggggtgcggagagaatggagcgaagcggggctccgggagaccctagggcgctcccgacctctgtaaagcggcgccagcgggtggtcccagccccgcagagcctgggtgtggggaggggctgacggcgcgccccgcaggtgctggaggacggccggcagtggtggaagctgcgcagccgcagcggccaggcggggtacgtgccctgcaacatcctaggcgaggcgcgaccggaggacgccggcgccccgttcgagcaggtgagcccgcgggggtccctggggtcgcagcccccagcttcctggagcagccccgcctgcgcctagccccgccccaaggccagccccgcggctggagagactggggcaggtgcagggctccctgggcagaaggaaagggctggtccgcaggccggggctgtagggggattggcggggtggggaggtcccgggcaggtgctgggaggcgggggcggggcgtggggagcctaatcgccccccgcccccgcaggccggtcagaagtactggggccccgccagcccgacccacaagctacccccaagcttcccggggaacaaagacggtgagaggtgctgcttcgaggcgggggtcccgggcccagggccacctgggggaggaagtgtggggggggtccctgggccgggggcgggggcaggggcaaggcagcggcgggcctgagtcgcgcgccccctcagagctcatgcagcacatggacgaggtcaacgacgagctcatccggaaaatcagcaacatcagggcgcagccacagaggcacttccgcgtggagcgcagccagcccgtgagccagccgctcacctacgagtcgggtccggacgaggtccgcgcctggctggaagccaaggccttcagcccgcggtgagcgggggcgggggatgagctggggcccgggcgaggggtgggaggtgcggccgaaggtgcgcagctgtcggggcgggcgccaggcagcctcgctcacagcgcggccctgacgcccaactgcccgcccccaggatcgtggagaacctgggcatcctgaccgggccgcagctcttctccctcaacaaggaggagctgaagaaagtgtgcggcgaggagggcgtccgcgtgtacagccagctcaccatgcagaaggccttcctggaggtgagcccgcctgcgctccggcgccacgcccctcctgcccctgcgccctcctctcccccgcccgttcctggggtcgcagagcaagggggaggccggcacccagacacgtgggacccccggctgaggatgcccccatttctcctccctagaagcagcaaagtgggtcggagctggaagaactcatgaacaagtttcattccatgaatcagaggaggggggaggacagctaggcccagctgccttgggctggggcctgcggaggggaagcccacccacaatgcatggagtattatttttatatgtgtatgtattttgtatcaaggacacggagggggtgtggtgctggctagaggtccctgcccctgtctggaggcacaacgcccatccttaggccaaacagtacccaaggcctcagcccacaccaagactaatctcagccaaacctgctgcttggtggtgccagccccttgtccaccttctcttgaggccacagaactccctggggctggggcctctttctctggcctcccctgtgcacctggggggtcctggcccctgtgatgctcccccatccccacccacttctacatccatccacaccccagggtgagctggagctccaggctggccaggctgaacctcgcacacacgcagagttctgctccctgaggggggcccgggaggggctccagcaggaggccgtgggtgccattcgggggaaagtgggggaacgacacacacttcacctgcaagggccgacaacgcaggggacaccgtgccggcttcagacactcccagcgcccactcttacaggcccaggactggagctttctctggccaagtttcaggccaatgatccccgcatggtgttgggggtgctggtgtgtcttggtgcctggacttgagtctcaccctacagatgagaggtggctgaggcaccagggctaagcaattaaaccagttaagtctcccaggagccgtgtgtctcagttctctgggagtcggagtgggtcctggagcccccggaaactgcaccttttctaagcagtgccgggcagagggctggccgtccgccaggctgctctgcccctgagcccagaggggaccctgcccacttctcttcctgtggccctcccaggcccagcgaccagaaggcccaaagcgtgtcatccaagcccggctttcgctgggcacaaccctagtgggagcggtggggacagagccagctcggccagacggtcggcaggccccaggagggccatgagtcagagggcaaggctgaaactggatttggagatcttagcccaggctgacggaggctcccaagaagggggagcaggccacactcagcaccctgcgtgggaggggcacctgaccgccagatgggcggtccacctgagccgcacccttggaggggcctttggtgccctctgccggccgctccatgtgctgccgtgagtggccgccaggggtgccctcgccctggattggtggcagggggcaacccacaaccatgtgtccccatagcagccgtgaacccaaccctggtgcggagcatccggggacacagtcctggggtcttggcctgggcaggggcgactgtggggctgggctggggggggcgtgtcccttgcctggtccaccacccagccaggcctggacaccaggccacagaagccctgactcacagctcaggccacactaggccaagtcttaaccacagtgtctggtcggggcagcagggattgtctggtgccctctgagccacgacccgggcttgatggccaccaccactcctccaggcccccggaagaggcccccccaccctgtcagatggaccctgcagtgagagagacaggtccaagaggaaaaggggagggatgggggcaccggccctcctccctgcaacctgcagctcccgctgcctgctgagccaccacctcaggacggggataggcaccggggctatatctgctccaaaaggggcctctgtgggccccaggatgccagtccttggaagtgagggaggctgcccactccccaaccactcccagcaacaggacccttcctccaccaggatggtctgggcttcatatgcagcctccaggctgggctgctcagcttctgagggccccagatctacacctgcttcttcagccttctccctgtccacctcccccagccccatttagagccccctacctgctgtgccccactctgccacctgcacagctgaggagccccaggaagccagacccccagactccagcccccagatcccagccctaggccccaagcaggctcccaccccaggagccctgagtccgaggcaccctggccccagctgcctgctcggacctctgggcttccagaaattacctcccgtttcttccaaggggcttcctgccacctcctgagacccccctcaagagcagatgggaccaccgacctcaccggcctggtgatgggcacagggtcacctggcatcgggtgggctggctctctgtgtcctctctggccacccgccccaggggtgaggattgccccccttcctgccctgagggcatcactcttgggggcctgtggtgttttgagtgctgcccgcggcctccggaggccccagtggcagccccgtgaggcaggcgtggataagaatgacccgtagaggggccaggtcacctgctcgaggcccgagtttggggcaggggctggggttaacatgcaatctctcttagttccaacgtgtccttaaccactcactccctccccggcctccctacccacttccccatcaggcaggtccacagaaagaaggagggtctgctggtgctggccctggtggggccagggttgccgagggtctggccgtgagtgtgggagagtccacactgggcgaggagggagggcggggctttgaacatcagacctcagggtgggtggcctgagctgccagtggggccaccagtagccacaagcaaatatctccaccaacaaggcccgtctgtctcgggacaagcatgtctttgtggcgcttgctccccttctgtcctcccccacagctggccctgtccgcccgtgcccagtcaggccccgcagaacccaagaggggcttcccatgccatttaggaagggctgtctctttaaaaaaaaaaaaaattacaaaacggttgatttcccaagaggttgacacagcagcacgtacagtaagatgttcctcacacctgcggggatgccatggtcccagcccggggcacccgttacccaggaaggtggtgagagtggtgctgggaaaatgtgtggagaaacacaacagggacccccactaaccccacaaagctgaaccagccccagcagtactagacgtcatgagaggcaaaacgaccaagttcacagaagatgccaggatatccatgtgacaaaggggaagaagaattttctgtacaaaacttcaaaagcagtggataccaggcgcggcagctcacgcctgtaatcccagcactttggaaggccgaggcaggtggatcacctgaggtcaggagttcgagactagcctggccaacatggtgaaaccccatctctactaaaaatacaaaaattagccgggcatggtggcgcgtgcctgtaatcccagctacttgggaggttgagggaggagactcacttgaacccagggggcagaggttgcagtgaaccaaaatcatgccacttcactccagcaaaagagcaaaactctgtttcaaaaataaaataatgaaaattttaaaaagggagtcaatgagtttgattttggcaaaattaaagacttgcagccgggcgcagtagctcacacctgtaatcccagcactttgggaggccaaggcaaaaggatagcttgagcccaggggttcgagaccagcctgggcaaatggctagaccctgtctctacaaaaaaaaattattaggccgggcacggtggctcatgcctgttatcccagcactttgggaggccaaggtgggcagatcacgaggtcaggagattgagactatcctggctaacacggcgaaacctcgtctctactaaaagtacaaaaaattagctgggcatggtggcgggcacctgtagtcccagctactgaggaggctgaggcacgagaattgcttgaacctgggaggcagaggttgcagtcagcagagatcacgccactgcgtgagcagagatcatgccactgcactccagcctgggcaacagagagagactctgtctcaaaaaaaagaaaagaaaagaaaaaaagttattaaattagccaggcgtgctggtgagtgcctgtggtctcactgcctgtgctactcgggaggctgagtggggaggatccctcgagcctgggaggcagaggttgcagtgagctgagatggcaccactgcattccagcctgggcgacacagtgagatcctgtctcaaaaaaaaattttttttttttttagatagagttttgctctgtcacccaggctggagtgcagtggcgcagtctcggctcactgcaacccccgcctcccaggttcaattgattctcctacctcagcctcccaagtagctgagactacaggtgggtgctaccacgtccggataattttttgtatttttagtagagacggggtttcaccatgtagtggtctcaatctcctgacctcgtgatcaacctgccttggcctcccaaagtgctgggattacaggcgtgagccactgcacccagccaaaaaaaaatttttttaatgaaaacatttttttaaaagactcgcattcactgacggccacttggaggggatgctgactggcaagcagagcagacaccaaggacagtctctgggagacctaagaccctttcagggcattgtgagctccagacggtgtttgtttgtttgcttgttttttgagacagagttttgctcttgttgcccaggctggagtgcagtggcgtgatctcagctcaccgcaacctccggctcctgggtcaagtgattctcctgcctcagcctcccgagtagctgggattacaggcgcttgccaccacgcctggctagttttgtatttttagtagagacggggtttctccatgttggtcaggctgatcttgaactcctgacctcaggtgatccgcccaccttggcctcccaaagtgctgggattaaaggcgtgagccaccgtgcccggccctctacactgtttttatagcaagacttgagaagcaggccaggcacgtggctcacacctgtaatcccagtgctttgggaggccaaagcaggtagattgtttgagcccaggaatttgagattagcctgggcaacataccgagaccctgtctctactaaaaatttaaaaattggtgaggcgcagtggctcacacctgtaatcccagcactttgggaggccgaggcgggcggaccacaaggtcaggagatcgagaccatcctggctaatacagtgaaaccccatctctacaaaaaatacaaaaaattagcctggcctggtggcgggcgcctgtagtcccagctactcgggaggctgaggcaggagaatggcgtgaacccgggaggcagagcttgcagtgagccgagatcacgccactgcactccagcctgggcaacagagtaagactccgtctcaaaaagaaatgtaaaaattagccaggtgtggtgatgtgcatctgtagtcccagctacttaggaggctgattcgagagaattgtttcagctcaggagttcaaggctgcaatgagctgtgatggtgccactgcaactccagcctgggtgacagagcaagacgctgtctcaaaaaaaaaggtgctctgggttgaattatgtccttcagaaattcatatttcagtccttgtcccagcaactcagactgttgccctatttgggtcactgcagatgtaattaagatgaggccatgctggagtacggtagccctaatatatcaaaaggggaggccgggtgaggtggctcacacctgtaatcccagcactttgggaggccaaggcgggcagatcacttgaggtcaagagttcgagaccatcctggccaacatggtgaaaccccatctctactaaaaatacaaaaattagccgggcgtggtggcgggcacctgtaatcccagctactcaggaggcttgagacaggagaatcgcttgaacctgggaggtggaggttgcagtgagccaagatcccaccactgcactccagcctgggcaaaaaaaaattaaaacaacagataaaaaggggaaacgtggacacagacacgatcggggtgatcaccggaggagggggaggtttctacatgctaaggagcaacacggagcggcagctcccacagaagcctggagaggcccagagcagagatttccacacagcctcgaaggaaccagccctggccacgcctgcatctcagactccagcctctagaaccaagagaggagacgcgtctgttgttcacaccacccagtgtgcggcgtttgccatggcagccccgtgaaacacagaagcctgccttctcaaccgcactcacctttgctcgaatatgagcagcccccattcttccccgacacacacagtcaaatcagcaaacgtcactgatttgatgcagtctcacctggaagcgtaagcatccggcgtcccgggcgcctgctgcctaggtgttggggctgcccggggaagagctgggagccatgtcccagccgtgactgacctggccagcttccccaggttacttgaaagaacctcttgtgtcgagacgtgggtagtcattgtctccaaaatgaacaaagtgaaaacaacggaccctcttcgctgccgtgataaatctgcattttccagtggacatttgagttttggaaactgccatcataggcaaggctgctccaccacctgaagctcttttttttttttttttttgagaccgagtctcactctgtcacccaggctggagtgcagtggcccgaccttgtagctgggacctcatgatctgcctgcctcggcctcccaaagtgctgggattacaggcgtgaaccaccgtgcctggccctgaagctccttctgataggctcagttagggagcgtgcatgttccttattgaaattggaggggtcagcacttgggggtctgggaaaccccacgaccaaggcgggacattccagcatcactcatgggcctaagagccagtcacagaaggtccacaatgatccagaaaggctatcagggtgcccttccctgttccgactacaaatctggatgaagccagattttcctcacatacttctcctagaacaatgattcccagaggcctaggcaggccccgggaggaggacccctgggcctaggaaaccggcatgatggagattttgcaaacgtggataccagtgccactctgctcactagattttttgtttaacaaagatgtactgggccaggtgcagtggctcacacctgcaatcctagcactttgggaggctgaggcagatgcattatttgagctcaggagtttgaaaccagcctgggcaacatggtgaaaacccgtctctactaaaatacaaaaattatccaggagtggtggcaggcacctgcaataccagctacctgggaagctgaggcaggagaatctcttgaacccgaggtgtggaggttgcagtgagccaagactgcggcactgcattccagccttggtgacagagcgagactctgtctagaaaaaaaaaaaacagacacacacaaaaattagctgggcacggtagcacgtgcctgtagtctcagctacttgggagactgaggcaggaggatcacttgagtgcaggagatggaggttgctgtgatcacaccactgcactacagcctaggcaacccagccagaccctgtctcaaaaaaatgtataactatttatagaagtgtgcaagcgtgaaagcgctggctcccaggacagccacgaagccacgggtcgttgacacagccgagtgggcgccattgccggagcgggaacccgcctgagggtcttcacggggtctgagtgggcgccattgccggagccggaacccgcctgagggtcttcacggggtctgagtgggcgccattgccggagcgggaacccgcctgagggtcttcacggggtctgagtgggcgccattgccggagccggaacccgcctgagggtcttcacggggtctgagtgggcgccattgccggatccggaaccccgcctgagggtcgtcacggggtctgagtgggcgccattgccggatccggaacccgcctgagggtcttcgcggggtctgagtgggcgccattgccggatccggaaccccgcctgagggtcttcgcggggtctgagtgggcgccattgccggatccggaaccccgcctgagggtcttcacggggtctgagtgggcgccattgccggagcgggaacccgcctgagggtcttcacggggtctgagtgggcgccattgccggagccggaacccgcctgagggtcttcgcggggtctgagtgggcgccattgccggagcgggaatcccacctgagggtcttcacggggtctgagagggcgccattgccggagccggaacccgcctgagggtcgtcacggggtctgagtgggcgccattgccggatccggaaccccgcctgagggtcttcacggggtctgagtgggcgccattgccggatccggaaccccgcctgagggtcttcacggggtctgagtgggcgccattgccggatccggaacccgcctgagggtcttcgcggggtctgagtgggcggcattgccggatccggaaccccgcctgagggtcttcgcggggtctgagtgggcgccattgccggatccggaaccccgcctgagggtcttcacggggtctgagtgggcgccattgccggagcgggaacccgcctgagggtcttcacggggtctgagtgggcgccattgccggagccggaacccgcctgagggtcttcgcggggtctgagtgggcgccattgccggagcgggaatcccacctgagggtcttcacggggtctgagagggcgccattgccggagccggaacccgcctgagggtcgtcacggggtctgagtgggcgccattgctggatccggaacccctcctgagggtcttcacggggtctgagtgggcgccattgccggatccggaacccgcctgagggtcttcacggggtctgagtgggcgccattgccggatccggaaccccgcctgagggtcttcgcggggtctgagtgggcgccattgccggagcgggaacccgcctgagggtcttcacggggtctgagtgggcgccattgccggatccggaacccctcctgagggtcttcacggggtctgagtgggcgccattgccggatccggaacccgcctgagggtcttcacggggtctgagtgggcgccattgccggatccggaaccccgcctgagggtcttcgcggggtctgagtgggcgccattgccggatccggaacccgcctgagggtcttcacggggtctgagtgggcgccattgccggatccggaaccccgcctgagggtcttcacagcatctgagtgggcgccattgccggagccggaacccgcctgagggtcttcgcggggtctgagtgggcgccattgccggagcgggaatcccgcctgagggtcttcacggggtctgagtgggcgccattgccggagcgggaatcccgcctgagggtcttcacggggtctgaggggaaagcagggccggggtgggcgtgtggaaggttttggggtgtggcttcaggtgagtcttcaggaggcttcgttaggattgggcatgtttgggacggaagtggttcgggactgatggacataagaagggtttggagtgagtctggagactgagcccagctgtgctgtccgctcacaggtcctaggcaacgactgtcaggaagttcccaaaataagtcactcacaacctcatcgtcctgggtaagtttcctgatatgttccacagctcaatggtccatcattgtttttggttttgttttgttttgttttgttttgttttgtttttgaggcggagtctcgctctgtcgcccaggctggagtgcagtggcgcgatctcggctcactgcaagctccgcctcccgggttcacgccattctcctgcctcggcctcccgagtagctgggactgcaggcgcccgccaccacgcccggctgatttttttttttgtatttttagtagagacggggttttactgtgttagccaggatggtctcgatctcctgaccttgtgatctgcccgcctcggcctcccaaagtgctgggattacaggcgggagccaccgcgcccagcctgttgtgttttgtttttgagacagcgtctcgctctgttgcccaggctggagtgcagtggggcaattggggttcactgcagcctcgacctcctgggttcaagggatcttcccagtctccacctcccaaagtgctgggattacaggcgcgagtcactgcacccggctccatctttttttccccccaaaactggctgtcaagaacaaggaaaattaaaaaaaaaaaaaaacacaaggaaaatttaccatcttaaccattttcaattgaacagttcagtggcattgagaaagtggaaaaactcaaaccgtgttccctctggtctcactgcacagtaataatcagcacagagaacttctgtttctcccgcacaccaagcaagcagccagctttgcaacagacacagaggagttctgtttctccccgcacacccagcaagcggccagctccgtttttcctgcacacggagcaggcagtcagctgtgtctcccgcacaccgagcaagccctcagctttgccacagacaccggctgggtgttctccctttcagttcgcttctgaggctgtctacctgcagttagccccagatccacaggctgggggctcagtcccacaagactgccc
